United States Patent Application Publication US 2008/0114160 A1 - sequence listing, part 38

SEQ ID NO: 9570 - DNA, 95547 bp, Oryza sativa
  unsure (1)..(95547): unsure at all n locations
ggttgtggtatttttattactgtgatgtgagtttagatcattttatttgtcagagaagaaacttgctgtgaggtggaaactcatattttacgcatatgtattcttggatcttcttctttaattgtatagcaattggtagagcataagcatgaacagtctgaacatttcaggcctgattgtttagttcttttttttttttgcattggatcaacgtggtgagcttcatcattagggagcggctccgttctactatgaatcatcctaatattaaattatcaatggctattatgcatctgttcaaagttactgaaatagagataaaatagtgaatacaaatgaatttgtacttgctgtttaattttcctccctcccactatagaatacaccagtgagataattgaaatcaaattattatgtgcatgtgtgacacaaaaagttattatctgcatgtgtttctcattcgattcctgcctccagattgactcacgctgtcaccgccgccaccacacaaagcgctgactcggccgtagccccgtcgccgattcactgccgccaggtcgtgtccatcatcatgccagatccagcagtggacanccnancgagnnncacncaacggtgtaatcggattgtaaatcggatgagtagtttaagagaaaattgtatttgaagtgtaggtggatagtgtttatcatagatggagtggtagctagtttagacaaatcagctaccatagctgtgtagccatgtccttaaaaatctgtggacccataggccacaccgtctcatctctcgtggcaaacagtggtaggaattatttcattcagaaaacaagaatatgcctacctatcttacctcatctccaaaccaaagtaccgaacacacgtttagattttgcagacccagagtttaaaaattatacgccgattgtaaacttgtggagtagatctcgtccaatgaatgtaacctggatagttcacgggtgatagattgggctgcccactctcacatatacattgctgaactatatgtccatatttttttaagactatatatatataattatatggccgtctgatccctacgtcctttatgtgagtgtacaatgtcacggaaactatatattctctctcatcgtacttcgcttcctcgttctaatctcgttttcattcatttgaaacggactacgttatggatatgattctctcttctcataatgatgcgatgtgaaaattttcaagcaattaatgttgactagcgaatctagctaattaattaacgacgttattggttggaagaggagatactgcagaagattagtttacaggcccacaatcacggaggtgatgagatgatctgattttaattaatttgatcttcgttagacaaatgcttggccttttgttctctttttccttggcgctagtcctgtctatcaagaggacttctatcaccccatatgaatgatgcataacccccaatcattcgttcagagaacaaaaatataacaaaaagaaaacgtaaaatctatttggaggcctctcgtttttaccttaaccagtgacgcctaaatatggagaagacgtggagtctactacatcgtactcgtactacatgcatgcatttttttaacgggatggctatttggcagtcacatgttttttcttggctctatcgttcgttttttaagccatcggatttctttgtgattcgtactggcttgtagttcattttgtagtatcggtgtgtgggcttatgagctttttatttgtgtctaggcttttgggcttttttttttgtgtgtggtaattatgtgggacccacatcagaaatttttttcgacagcctgtgtgggacccatgggcactgttcgaattttgaaatccgcgcttgtcttttttgtgccgacggagagagagtgagtcagatagagggagagagagagatatatttctctcgttctcgtcgtctcaggcgacgtggcagcgattccgtcgggcggagcggcggagtttccgtcgggaggagcggtggcgattccgtccggtgattgtgcagtcctgttgcgcagtttgcgggaggtgaaggtggcagatttattttccattttttattgatttcttcttctatttgttgctcttgtgttgattcatctcttcatttttctcttctcgtagtttttggtttgctggtggctacgacgcggctgtgaagttggagctgattttggtgagtttccccttcgtttttctgatattcccttgtgttttaggtcgtcgattcgtggggcttgtagatctgagtttgtttcgactcggaatctatgtatgtgtttgatatggtgaatccccttgattcatattcgtttatgactcggtgatctctgtgttcttagccctatatattgtcttcttgtgcactagatctgcgcttttgcttttgtgaactagttacgtgcttttttattttgttctagaactgtgttttttgcttttttctgaactagatgtgtgcaaataagggagtaatgtacatatgttcacctatctatatgcactgattgtttttttagtaatgcattcaggatgtttttattctagaaatctgcaaatgctatatgttaattcaatgacaaccttatatgagcagttaaatttgttattgatattatcaattgttttttgcatgactaagatatgctggtttgtactaagtttcaagttttatgtctttattagaatggtatttatggttgttaattttttttgtctctgatgcatgttccatgttcaggttcagtattcaaaatgagaaaagtactgttatgtttatggttgtgatttgtgttcttagccctagatattgtttatgtggactagatgtgtgattcatttcattttagatatatctttttatgattgcttttttacatttgtgaactagatctgtgcttttgcttttgtgaactagatgtgtgcaatgtacatttgttgacccttctgtatatccttgatttgcatgttctgtgcactgattgattttgtagtaatgctttgatgtcagtttctaaatctatgcaagaaaatgctatatgctatttaggtggatgtttatgcactgattcaggatgtttttttttctagaaatccacaaatgctatatgccatttgcattttagtttggtatttttaatctttcaatgacaaccttacatgaggaaataacacaagttattgaagatttctgtactagaatgttttttatagtagtcaatttttgtctcttcattttgcatgctcaggtttagtattcagaaggagaagagtattgttaatacatttgttcagaaggagaagagtatagtattcctagtcatcactatactctgatatatgacatgagtttgtgctacacatttgacactactctatgaaaataattatttctactatatgaaagtaatattattttcatatgacatggtgcatttaacttgtatgttttattctgttttgttatatattttagtccataatacttatgttttgagatcttttttctctccttgcagtcatgggtcatagaaaaagatcaaaagttgatatttctagtgaatctaacagtgacaatgattgtagtttgagttctgataatcatgatagtgatgttcatttatctaatcatgatgaaagttctgataatcatgtaagttcatttgtcatgttcatttatcatggaagtttattttttatttcaatattttttttgaatcttcttgtttttttattaaggaccaacattttgaggaaaatgatcctttgcttcatttaactaaagaagagcttatgaagaaattgaaaataaagcttggtaaaaggccatttacagatgaccataaaaagaaggtatgattaatgcatatttagatttttgtaatttacattatttttttaatatgatatttttttattttcagagacataaagttgaatcagactcaattatcgatgatgcattgttagagattcacaatgatctagttctccattctttgaaaatgaaattaagcatgcttggtgaacagtctaaaaataaggtaattttattaccttattacattggtgaataattttttctttagtttttttaatttcttttctttaaatttttttggcagagaaaaacctttgagaaagataaccaacaagggtgtgttctgactgattgcaaattattgttttatatgatcatgatctttaattttttatagtttttgatatgctatgggataagcttgacacttttatatttacttgctgaacatttagctgtgattgaatgcttgtgcaagcatgtgctgctccatgttagaatgtctgcatactttttttttcttgcaaaattaactgtaactttaaatattttttcatgtaatttttttcagtttcttcatatatgtaagttttgtactgttactgcagtcaagaaactgttaatattgatggagttcactgcaaattctcatcttttggttcttcattcaaacaaggtggagaattatcaaattttgtaatgtctgtgttctgtcgatatatgtttaaatcgattcatccttcaaaatccaaaagacactatttcttctcttcaattggggtaagtgtttgtaatttttaatttttttattaaatacaactcagttacttgcaaattgagtatgtattttttttatttcagaatgatcttatgaaacacccttcaaaaactaattttggaatggtccaaaagagtttttctggagcatcacttgctagaccaattgagatatgtgacatggtatgtacttatgtaatgtttaattgaattagtttgtattagatttctctgtttttacatttgtttttattgtatcatttttttcagctgtttttcccaatattgcatttgaggcattggtttctgtttgttgttgatttgaaagatgagagttttgttttcattgactccttatttgaagaagaagaagaagactatcaatacaatgctagatgcagactggtatgattttttttttgcaaattattatatgtatagaataatttatttttatgattgtttcattttgtcatatatcaaaattttcaattgtatggaggaaatttgtccctgaacatccaattaactttgctagtttcaagataatatacccacctcgtccaagacaaacaaatcggtaaattacaaatgttaactctttgaatgttattttaattctagtaatttttattatttatgacttatgttttttttatttctgtttttttagccttgattgtggtatttttactctgaaattcatggaaatttggcgtccaagagttctgctaaccaaccagttctctcaaaaagacattcctaacataaggattcaatatgtcaacaaattgtttttccatccatgcaacattgtgctgaactctgcaacaaagaaacttgttactgactattatgcaaaggtaagtagtcattttaactttttttaaaaaatatgtttttaaattttttttcttctgttacctttacatttagctttttttttctttttttttgtagggctgatttaattcaacaggaatactttgaaaaccaagattactttagctcaacagtttatagtagatttgtatagatacaatttctgcgccatattgtaactattatagtaagataacaacttgaaaggtcacatcacaaaaagtaccaaacttcatatattgtaactattctgaacgactattacaattgttcactacgcaggaatataacttctcatattcagtataactattttctgcttcactactttctaacttcaactttagccatctgtctttcttttcttagtccctttttgctccattaatacttgtgttgttgcttcttgttttttccctttatttgtcttctttgaaccatcagtttgttcttcctctgcattctgcaattgcaatcaaattcaaattaaatattttaaatcaaatgagaattcttaaaataaatacttttttaccttttgtgctgtgttttttgtctttctaattttctttcttggcaaatcaaattcaatgtgctttagtgggcatgttggaaaagtgtgatctgttcgttgacaataactgcaatgataaacttctttactctgtaattcctctctaaatgatttgtatctttgagatggtcttccctttgactttgctatgtctggatctatcaaaatttcttcattgttttcttctgtttcttcaatgacttctccatttgttgtatctattttgtctatctccatttgctgctttgttctttgctctgaattcattgatattgattctttttctaacttgtcaatctgatcaactgtaaattggaacgaatcaatactttttgatccttgtgaggctatttcagcacatttccttgacagaatattgaatctgaggattgagctctccgataaaggtataattctatcttcaaaatcatatttttctttgtaatccttttttctccaccgatcgataatatatttctttggaatcttcataatgttgaggtgaagcataattttcaatatgtgggagcaaagaaggccatctttctcaaattttgagcaaatacaagtgtattcctccttttcagagtcaacaattacaaggtacttccttcttcttactacttttattttctgattcaatgcaagaaaaacttcataagtcttcaatttctcgacctcaatcaattgtaatcttgttgtcctcttaagttcaacttggaactttttgaatatttttgaattgtacagcttgacagcttggtactcaatgtagtaatgagaccaaagtttgcttggcctttttgtccttgaattatgatcatctagctgctccaaattctgaatagtgtccattactctgacatattctatcaaaaagcttattatactgtattgtggaccaacatctttcttaaaccttgaatttgtaccttcacttagagctgtgctttttatgaatggacaaaaatttgttttgaagtatactggtatgaatctctttctaattgaccacatgtgcttcaaaaagtagatgtgctgaacctcataggaatcaaccatttcattccacaaatattcaaattcttcttcagtaactgaattgttcattatatcctcatactcatcatacaacccttcttttgacttgaacaaagttccagacagattgaatgctttccttactatatgaaagaagcaattcctatgtgttgaatttggaaaaatctgtcttattgctgacctcatagctccgtcctgatcagttataattgttttttatgctttttctgacattgctttcaaaaaagttatgaacaaccatttaaatgtttctgcagtctcatcatgcagaaaggcacacccaaaaacaattgtatttccatgtcatgaaatcccaacaaatggagcaaatggaagattgtatctatttgtgaaatatgttgtatcaaaactaacaacatctccatacttctcgtactagtcaattgaccttccatcagtccaaaacaaatttgtcaccttcttattctcatccaaatcaaattcataaaagaactttggatctttctccttcttctttctgaaaaattgaagaacttgcatcatatcattgctacttgtctctttatttatacaagttctcacattactaacatccttcttagtataaggcaaagatgtcagccctcctctcaaagttgacaaaatcacaatcatatgccttgtgggaatattgcattcctttagtgtccttatcatcattttctcttctgttgtcatatttttgtgtgacttcaagaatctaacttcatctcttggactcatcttatgattgtgatctaaattaacccttataattctccaaatcaaatttctcttagaaattaccagtgcacagttacaacttgtggctttaatctcattattgtttctctctgctactactgtctcttctgtttcttcttcttgtgattctgactttgcttttccatgtcgattgcatttgaatgttactctaatcacttctccattcctttttttgcttgtactgtggtaactgtgagcaatgacaacagaaaatccagccaacaaagcataaaagttaaagaaatcgtgtgcttctttaattgatttgaactgcatatcaactcttggaatgtacttcgcatcaattgctgcattatttccttttgtagcttcttcttgttcttgctccaaaaaattgtttatatcttcttctgtcaacatttctccatttgcatctaaatcattactttccactgtatcaacatttgttgttgcttgatttccaatttcagtactgttgtcagctgaattttgcacctgcttattcaaaaattcaatttcatatttcaaacaattattttttaaaaagtttttttctttaatttcacaacaattattatcaaatcaaattttatcttttagatttgaataacattcttcaaatgtaaaattttcagtaatgaaaagttcttagtaaatcttacattttgaccgtttgacagattgaacatatcaagattccaattttccaattcattatcttccagatcctcatcttcaacctttaaaaatagttagaacaaataatatcataagtaaactcaaacattaattgtatcacaaatacgatttatagaaacaaaaaaataaattaattcatacctgatttgtattagcataatccatatcaaaaggaatatcttatgttctacttgttgtcaatatcattgaattctacacaaaaagtaattcaaataataagacaattatttaaaatttaatacatatttactattttctttcttcttatgaaatatgtgagtacctgaaatgctcttggtgtagcaacaaagtttgattctgttgatatttcttgctgcatttgaaatttaaaatgttagttttacacattaataatattgtttatctgtcttcaacattacatttattacacttgtaaaatacctgaacttcagatattgaaggttgagatgatataatttgttccatgagacttgtatatgaaaaattttgagcctgcaaattgaaaacaaatttattttatgacatgtattgctgatttttgtttgatattataaattctgtcattccaaaacttactcctaaaagagaccattcatcatgtagagtacaattgttgtactcatcacttgaatttgttttttctctatttaatttcatcttgtcgttgatgcttatttcttcttgagatgcctgcaaataaacataactcaaaatataaacataactcattactcattactcattttagtctctgcatataaacataactcaaaatatgaaagtaatgatttgttttctctgaatttttcagatttgctgcagagtccaacaaaattaaataaaaggtaaatcaaattgctttacttgtttatatgaaatatatactgcttctaggagttacatgtatgttcaactctatttgcagtgttaattctatgtttttttttaatttttggactgtaatttgtttttatgttgattactagacatatatatgaatattaagaccattaagactgtgcaaatacacaatatcactctgtgatatttttttaactaaagtgttaatttttttcattagttacagtgaactaatattggaattacagtgtttcttaactgtaattttaattttatttcactgtaacttatttgaaaattataatatctacatagtaaatgagtgtctgcatatttatttgtaaatgaaattgtttatgtcatcatgaaatcactaattatctatttttgacagatattttgacaatatatgattcaaaccagctaaattttattttaactatgatgttttgtctaaatgtgatctttgcagattatatttgaaactaattatgtttcttacctgaaatcaatgtatttgcgttatgttctgtcaaaactaattgagtcatattctgaatgtttccatgctgaatgcttctttctgcatctttgttatctttgtttcctgcagaacataatttgtaatataattcaaatcagtacatcagtaattaaatttgacatatatagatatatccaaagaaagaaagatataactcaaagtggtaatagtacctgtatccaaagaaatacttcttcctgcttcatagaaattaaaaatataataagttatttcactgtgatatttggagaatatctagatgtaacaaatattcaaattaaaattcacctataatctctgtatccatagaaatgcttctccctgcttgtccattatatttgtttcctgcaaaaaacagaaggtttaaaacacaagaatataatttgcagtgaactaatactagaattacagtcatttttatatgtaattttattttgaagggagaagcattgatttgtgcttgtattttaaagttttaggccagtgatgaatctctatttagtattagtttcagcgaaaatatcttttttgccaactctgaaatttatctttatattaaatatcaattttttttattgtcctctgtgttgtttgtttacttgtctaagagcaccaataataaagaaaatcttctcatcatcataggcgaaatttttgccttcacttgtcaagcacctttttacctttgcttttcccaaaattagtccatcatccttgtacttcaaattaacatctgtaaagcaaaataatctagtgtactagcttctttttgtttttatatatgctaatttgaagtgcaagaattatatactagtttttgagaatggtgcatgtaaaaaggtgcttgacaatctatagctaactaattcttttgagcttgcaaaattgataaaaattttgcctatgtgaatattgaaaaaaattatagtctaatactaagaaatgtccattttttttgtactaattgaagtggacaatttctgaggccatatatatgatatttttttgtttttgtatacctttttttgtgtctaaagaaatgcttctccctgattgtccattatctttgtttcctgaaaaaaacagaaggtttaaaacacaagattataaattacagtgaactaatactagaattacatttatttttatatgtaattttattactatttaactataatttgtttcaatttgctgatttcagcaccaatttttaattgtgaaattaaatagtttttgaattgaattcagtaccattgtacagcttagtgtttttgttttttattagattcagctgaagtgtttcagcttagttttttgcttatttttctctctgcatttcttctatgcttggagtactaataacctgttatgtgcttgatgaatctgaaacaatttcaatttgaaaataaaactgccttagatttaaagttccctgtatttacatgcatattgaactaaaattacagtgttctttcgtatatgtttttattattctttcactgtaacttgtttgaaaattgttaaatgactgaaaataatgtaagcaaatcttaattttgcttctcaccaggcaagaaaataatttatacctgttcttgattcttgtctattcactttggtggtgtattccttgtgaattccttctgcatttgctggaacttgagtcatatctgcacaatcattgacgttacgttttagtcaatactagacatttcatttttgctttgaattacttttttttagatttgttgtatagtccttataatgttgtaatgaatagtaataaaatttgcttttagttgttgatttgatatgaaatatgtactgcttctagaagttacatgtttgttgaactaaatttacagtgttccttctatgtaattttataaatatttgactgtaactagtttgtatattgatttgtagacaaatatgtgaaaattaagaccattatgtgctcttttgaatatactgctatcatgcaaatacacaatttcactctatgataattggtgatttctaaaatatttgaaatgaaacaaaaataaaagtcaagtatgaggaatacatacctttggaagtgtcttttgattttacttgttcatttgtctccatttcctgtatgcttgaagaaccgatgacttgttctatgcttgatgaatctgaaaccatttcaatttgaaaataaaactgccttagatcatgcttttgttagaatttgtacagtgtttcctgcagttacatgcatattgaactaaaattacagtgttcttttgtatgtatttttattattctttcactgtaacttgtttgaaaattgttaaatgactgaaaataatgtaagcaaatcttaattttgcttctcatcaggcaagaaaataatttatacctgttcttgattcttttctgatcactttggtggtgtattccttgtgaaattcttctgcatttgctgaaacttgagtcatatctgcacaatcattgacagtacattcagattgactatatgagttcatattagaacagattcacactattcaccattctgaaaatttcagtgatttgcccagttctaaaatgacagttacagtgatttgcccaatttacttacagtggtcagatttactttcagattgactctatttagttcatattagaatagattcatttttttagatctaatcagtttctacatttctaacctcattaacttttctttacagatctgatcaaacaaattccaaaagaagaatcaaattctgaaaagaaccaagcaggtaatatttggagaatttttctgttcactcacctttgttcttcttggacttgtcttttgtgctctttctgctcttcgattcttttttttggagttctttggattgacctttagtaccagtttctttgatagatttgatattctttcctgacatttccttcttttctggatcttgatcttttcctaagcgtatctttctcttcttgatctcttctgaattcatcttgattttggattgatgttttgggggatctttctcttcctctagctccatctccctagtataatatggattgttgcggcgtgtgttgtgtgatctctttggaaagaggtggtcctagttgtgatctgtaatagttagctgtcatcacatgcccatcaacttggattgcaagctttctaaatatgtttgttttgtgggctctgtttgatcacgtgcctttgtctctgtttttctagggacctttttagactttattgtgggcttgtcaatttgtttttaagatagatgggcttttttggcctgtattggtctcaaaaaaataaatctagacttttataatatgttattgtagcagtttttgtgagttgttagatgtaaatcgtgtggtacagaaatctgactgaaataggacacaaaaaacatgcgtttgcagtatagaccgtccctttttttaatagacatgcatgtatttttcctcttcaaacaaagttttctctcaaattatttatccgatctacaatccaattacaccattgtgttcgttacaattaaatcttcgtaacaagatcttacattattatattatgatgaaaaaatatttatatttataaattacttttattatatatgtaagttacttttatcatgtgtataagttacttttagatttaactaaattacttcttagacatatacaagtaaattcaataaagtctaaaagtaatgcacatatatattataaaagtaacttaaaaacaaaacggaagtaactttgtcacgacattagaagtaaattcgttgtagggataaaaatatgacttcacgtccaatgaaaaaaggcattcattaaagttactttctttttattataagttacttccataatatatgtaaattacttttagtctttattaaatttacttttatatgtctaagaagtaatttggtgaaatctaaaagtaatttagatatatgataaaagtaatttataatttttcatcaaaatataatcatggaagatcttgttataaagaattagttgtgacgaacacaacggtgcaattggatcgtatcggatgagtagtttaagagaaaattacatttaaagtataagtggataatatctctcttaaatggagtggtagctggctaccactagcctagctgtctagtcacgtccgaaagaaaagtatgagctgccgaaattcccacgtgctttctaaaatgcacagcgacggcgtctagggggacacggcaaaatttcccatgttacggtcaggtcaaaattagctttcctttttttaggatcgtgtgtcgaattgttggttgatccaggctaatatctaaggccgagtgcatttctcttcagtggacgagttatctaagttggatatgtctctgagtttcacagctggtactgtacaagagtagagaaaagccccatacataaggtgatgatgcctctgagtttcacttcccaaagccctaattcttagcttcaagatgcccgagaactgcctctcctcacaccttaaaaaaaaaaaaggcccgagaacttcacctattatagaaagcgcctcgaaagaagaaaacactaaaattatgtagtaatattaatattagaaatcatgtgattatgtcttaggctaaggtacatatagagataatgaagttaggtcctacatatatccctctgtttttttaaatatttgacaccgttaactttttagcacatatttaacgctcatcttattaaaaacttttatgaaatatgtaaaactatatgtatacatataagtatatttaacaatgaatcaaataacttaattttttaaataagacaaacggtcaaacatatttaaaaaagtcaacggcatcaaatatttagaaatggaaagagtataacaaaactataacaaatctttaatgtacagtagtgtaagcatccacatcaatatgagtaggtaacccacgaatttagtgtgttaagggggaagctactgccatcaatatagtactaccttggtctaaaaagaaattgtatttttttactgttcgtatttatagccatagctgaagagagagagagagagtggtaatagtatatatatactcccttcgtcaaaaaagactcaattcctaagttttggtgtttaatgtttgaccgtccgtcttatatgaatttttttatgattagtattttcattattgttagatgataaaatatgaataatactttatgcataacttatctttttaaatttttttataattttttatataagtcaaacggttaaacgttagacacggaaacgcaggaatttagttctttttttactgagagagtactccgtataaagcaaaattccatgaaaccatcgaattaagttaaccggccgccatcaaaattaattgatgagggcccctttgttttcatgaggtcaggtgccgggcacgttgaagtctgactgccgaaattgagtttttgtcctcatcattaattagtactccatccgtttcacaatgtaaaccattctaacatttttaacattcatattaatgttaatgaatctagacatatatatctatatagattcgttaacatcaatatgaatatggaaaatattagaatgatttatattgtgaaacggaggaagtaatagatcctaactccacagatgataaattgatgttacgtgctgctaattgttgtctgaaagctacagttttaattaacaattcactttggttagtccaattctgatccacaactttcttgcacggtcctacacatcagtctagataattcataatctaggatcggattgaatggcatggcctgctgatttaattaaggggacaaccggccggcaatattacgatggtacgttgtcaaagaatagaaagggatcgtccctgcatgcactgcttcagaaaatgatgagctttgtcaagatccattcgtcgtaaacgttcttcaattcactgcctatgtatacgtgaggacttttactgtacgttttactgcgtgtatatacttgcagtatatagaagggtatgtttggtatttgttaaaaatttaaaatgggttgtttagtcatttgaaattgagatttattttcatcaagagtaattgtccataggaagtaattgtcctggatctcgtcatctgttcgtgctagcgcttcttttgaatgtatcgtgcatccccggcacccttgcctcccgtcccggcgcctccatcccgattcctttaggctaggaagccaaaagaagccgagcctttatgcgcctagcgtctcctgtgtccctggaccccggcgccttgcctctcccccgcatccaacctcccacagcttctgtgttccccaacccacgctgcctccccccgtctcacatatctagcctggcctcattgccctgcctgccctgacgccgctgagtgtctacacaagcttagacttctggtaagacacggacctatatttggtataactgtaatgattaattttcgcaatggttgttttgttctgcaatttaaggtgtgcttaactttcatgtcgatatgaaaatttgctgtcacattaagaaaaagaggtgggatttaatcttgttgattgactttgtatttagaagatctgcctacgaacactaggctgtctttgatgagagaagtaggatgaaaatctgtaactagaatcgcattaaacctaggtgtatagctagatgagtgagctatgtcaaattaatgtcacagagctgtaaattgtgctacttaaatttagtaaaaattaaggtattatccatatatgtcataaagctggttccattgaacgtttatatattgcaagttgtcataaatcatttgttttaacatttgccaatagttcgtcaagcctttattactttgtagtttgtaggatgtttttcacaaaataattttatcattattcttacatccatttttctatttgtgatgtgatctgtgtgtgacacaactcgtctttgtaactacttgatttatgtgaagacttgcaaattttaatatatttttgtaagtgatgtatgaaacgcaagatgttaattttattttaaaatatgctgatatggttcatctctctgtctatgattactatgtacgtattgacagtggcacacaatggctgagaacgaagttagcttggaggagatggaggagtataacatggttgctagtaagcattttagaagcgagtaagatggttacaagttttacaatgaatatgcaaggtgtaaaggttttagtattagaagagacaaagtgaagcaatttagtggtaccgagcttgtcttctagaggtgattttagcaagtatatttacaatagtttgttgtgaacatttgtgcgtgtaccgttttgtgcaatacactccattatcaggtagtcgatcataccttcatgctgctactatgaactcctatcaacacctgacccattcgaactctcttaaggttttagaattggtaaaaaaaagtaagacgtcctcttttctatcgtttcttctcttacatactccctccgtcccataaaaaatcaacttctggctataaatctagacacacgctacgtctagattcgtaaccagaagctggttttttatgggacggagggagtaagtagtattggtgcggaaaagctaattggcgaacgattgccctccggcctctgcgatcactttctttacgcattctcattccatattccttccgccactggttcggactgagcatgttttcggcgttggagagacgagccatgtcaggctacccatgcactttttttttcttttgttacttgacttttctattgcgtgcatgcaaggtggacccacaccatatatttttaagtttgcatgtagtttacaaatactacttaacctacatctttctatttttttccatttaggggcatatagaaagtttatatattctttttacatatttttttatttttaaaattcattcatacacttttttaaaaaatcaatatcaaaaagtttatatgtgcaaagttcatatataaaaatttaccatgtataaagttaccatgtgtataaactttccgtgcagaaagttgcaatgtataaagttagtatataaaatgtttatatagataaaattactatgtatgataaattagtagtatatgtattgggctatagtctaagcccacataaaacatgtacatagataagagaactctggatgagaaagaaaaaaaaaatacttgagctagtgggcctggaaaggtttttgcacgtgggctagagaacatggattcaggggttgttgcgtctgtcatgcgcacacgaaaacgccaaaaaatgaaatagcgagagaagccgacacgtgcagatgtaataggtcttgacatgtccgccgtactagacccacccatgttggtggggctcgggcccaatcccacctaggattatgttgtgttatgattgttactgattccaattataagtaagtcgactacaccatggacaaattatattctcccttctatttattttggtaccacacaaaaacaatgaatgccaacaaaagcatggcattttgatttgatttaaggtcactacattttagccaaattgattaggatcctctgactttggagaatgctccagatcagtataccgatctatccggcactgtaaccaactaattatcctactgtttttcctactcaatccatccatacatgtatatattgtttttcaaaatatattttctcctaaagtacttatccaatttacgatacaattgcaccatcatgctcgtgttaattaaatctttatgatagaatatcacatgattatattccgataaaagaaaaacatatgttttaaaccgttaaaagtgaatgtttcatacattacagctatatgtttccgtgtgtttttagcgtgttttaaagtttacgtaacaacgtctttcacactctctctctcttgtcttgtactatttgcacactctctctttccattttagatctttaaaatattttttcttctaaactacttatccaatatgtgatccaatcacaccattatatttgttgtagttaaatctttacaataagatatcacatgactatattctaatgaacgaaatacatatgttttataccgttaagacttattgtttcatacatgacagcagcatgtttcaatgtgtgttttcactataggcttggtttagttccaaactttttcttcgaacttccaacttttccatcacatcaaaactttcctacacacacaactttcaacttttccatcacatcgttccaatttcaactaaacttctaattttagcgtgaactaaacacacccgtactttaaaaaaagtcaatgtttcagttactaattttttttcaccatgtataacttaatgtttcacctaatggttaagtgaagtatttaaccacctgatttagagggaatcgaacgtccgatttggagttcactcctcagacttttagttgaatataaaggcataggtgaattaagtcgaacttaatttgggatattttccgatatccaattcacaaggaattaataaggccaaacatgctacagtactattgaacgatgattatttttgcatcatctacactgttgtcaccgtatttgcaccaaactcatttctgtgtacctttgaaaaaggtcagagaatctgattctcatctgtatcactacatattttcatattcacaacctttctcaaagctaaagcataatcgatttgatgctaatatgtcaatttatggatgcgattgtcgcctgtgcctactgcctagtgttcagtaaatttgcgctagaaacagaaaagaaagaaaaatagtgtccacgccagcattctaattgtattgtactcctgtttatttttatgttatatgtttagttaaaaaagaactaatcaacatcaaacatttcataattaacagagagagtatttcttttttcaaatatgttcactgtttagcaagcccacgcaaggagccagcaatgatagtaacatttgatatttcagagagacttctaaaccatgcacgcatctaacaagctatcgatatacatgcctctttgcgttaaggtcaattaaccctttacttgaatcatactacacaacatataattctgtctgcacagtgtacctgctagttcattgataaagtagcttatcttaagcaagtaagtatgttaattagtggcctgagagttctaaaacgtagtgtaactaacctccctaataacttgtctagagttaattaattagtggagactgtgggtggcagacaaataccaagggaggaatctgtgtggattatgggcatgctgacaaagacattcttctttggtcttaagtggggagcagcatatgtatgtatgtgtagctaagtgttcattaattgccatgattggaggatatagtccactaaatacagtaccaaatggggattaaattaggcaacccagcactccacaaggacagttttggtatagaagagtaattattataagtgggggcaagttgatcgatcaccaatatagtctcaagaaaatgaaaagtgtaacatggaagctgccccgtgcttccaacttctttgtttgtatcgggagacatggataatactatgaagattgttaagagttacattagttacatatcgattcttcttttaatagtggtgatctttcaaaaaaatatgattcttgttttaatgatagattaattgttgatgctagctttaccaaaagttgcaacatgacttcgtgcgtggtgaacaaaagatatagcaatgacagttgacaaataatgaatgggcatctcgaaagaacaaacccaatagaatcctcgcctacatagctgatattttccccgtggacaaaagaattgaggatgttataggctctgttctattcgttttttttccagatttttaccacagattatgttgctccacgcttataaaaatacgattttttttaaaaaaaaactagtaaccaaatattctaaattactactttgttccaggaaaaatcaaattctagggcattggacaaaacgtacatctagatacatctttaggatttgacagggtatttgtgatttttatatgttgcatctcttcacccgttttcctctatcctagtacaaaatatatatgcttggctcaattattatggtcgtacttatacatatcataggttgttttttatgaaattaaatatcactgttggacagcggcaaatcctcattttttccacgactgagtgagatcaagctagatatatatacattaaaccatgtatttcggttcctcacaaaccaaaatataagtatgtatttcagttgacaagtcagttggtccattttatacaatcgctgatgtggttaaccaagcatgacgggcgattagattgccattttggcatgtcattttctgaagcacgactgttatatccgtaggcccacttgccagtgactaggttggtcgaacatcctgatggttcaccctcaataaccagggctacgctaatcatagttggtggataggtcaaaagaacgatcgatctgaaaagcctgaaaggtgtggctactaatcagggaattaattgaacaatttcaatccaagaacttgtttaattagcaactaaaacaggggtatcacgaaagctgattaattgttgatgcttctcttctttacatacgggccccctgtttttaagaaagaagggactttgggaactttttccatgactcaatccccagcctcactatgcataaagttttttttggataccccacaaaaaaaggggttttttttgacaattcataaactagttggttattcacgtgaattaaaaaaatctaaagaaagctcgagagtacaaaatggtcgtcatattacatatgtataagtttaaggttattgtaatttcaattattgagccagattactataagttgaattataataagccaacacagaataaactataagctatttgtttctttagattattagatgtttgttagctgttagccacccaataatctaaaaaagcatagttagagtggattactatattatagtaatctagcttatagattgtaataagctactcctaataacccagattattataatcctaagctaaatcaaacatggccttaactgggtcaggatacttctttgttgaccttttttttctctactcctagcttgtagtattatattgtattcttgtgataaattttagaggtaagtgaactagtgctgacattatcttattaatgtgcctaaatttatgttgagtaaataactagcataaagatagtgcatcctccaatgttggtgccatgtgcacccaaatatatggctgtttcaatttaacccacacttccattatgcttagcagaaggttatcccataaatcattaatcatttatgtatccttaatcagttactattgtttgttattgcgtttttcatgactttttcagcaggtttagccgtgatgagcataaattgaccgtacaatgaaaaaccaaacccaacagaaaagagtcgattctcttggttttcggttggtccggttattccagcttggtttttgtgttgtggtagattttttttaaaaaaacagtaatatggcaataaagtaccgctgaggagtgaggactcatcccagtcaactgaccacgtcaccggttgccgtagcttcatttgaatcccggataaaacaggagagagagaaagatgaaggggtgaacgaaaaatgagggataatttgattcaagtttttttataaatgtattgaagaaggggtaagtggtgatatatttcactttttatttaaatataatagcatatgcatccaaataggctagtagaaataatttctttttaaaaatcgaggaagttgtaatggcatagatcccgttcgaatctgcttaaaaggatgattaaattttagattaaagtggcgcgtttttcaaactgctaaacggtgcgtttcgtgcgaaaattttctatatgaaagttgtccttaaatatcatattaatcctttttcaagtttgtaataattaaaacttaattaagcacacgttactaccatctcattttgcgtgaaacacttaatcttcatcttcagaagattcaaacaccacactaattaaccctaaaacgaaaagataatccagctatggcccatgaaacattaggcccaccagccgccggcccccaccaccaccaccactgccactctattcacttcacttccaccgcgcggcggcgaggcgagcctggctgcctgcgcgccgccgccaccgcccgacgccgcggcgtgtgttggcgagagcgagaaggccgccggcgagcagccacaggagttcctcctccccgcagaatgcggccgccggcaatggcgaatcgccgccgccacttgagtccgccggagaccccggggagccgtaaaactcgagacgaagaaaatttcaccgctttgttttttttccccttcttgtctcaccttactctattccaacccttcctttatcactaaagttctcaaccaaaaaaaaaaacttcctttattccttttttttcttctctcgcgctcgattcgcttttgtttgttgggtgcaacagcaacaaaataaaagaagaaaaaaaaaatcgatccgcaaatgcgtcggcgttgcgtgcgagctccgatctcctaaacctcctccaattccctcaacgaaatctctctctcgatccgactctgctctctatccggcctcgatcacccccaccaacatcctcctccgattccctcgccttctccttctcctcctccaacttctcgatgacttccactatactaagctagctagcccccgccgatccccgcggggttttagtttagctccgcgccacccaatcgccgcaggtgatctttcccggtcaagaactcgcggtaaatttttcccaaatctttgcttgtttttactcgagtcgagtcgcaatcgttagcagcagcactggtcggccatcgccgccgccgccgcctagtcgccttcgccgatgttttttttttctctttttaaattcggtttgcgactcgggctatctcgcagattcgggggcggatacggaggaaggaaatctgtggtggattcggatcgagctcttcgttttcttgctctttgtataaattgcgatcaggggcggcggaaacaagggttcttctctgtctctcttcattagcgccggcgacgaggtgaggtgaggtggtggtggaggcgatcgaaatggggtcggtgctgtgctgcttggccgacgacggccgccccgtctgctgcttccgcctcccatggccgatcttcaacgccgctcacaaccacaaccacaactcggtatgattctacctctgcttttttttttttttgcttcttgattgtttattttgttattacttttgcgaaattgcgcttctattttgtgttcagattgtaagcaacgatgaggcgctgattcacgattgagtttagtttttttttattagtttctggtgtcggtaatgtgtgctttgtgatcttgactcttgcacgcgttaggtgttgtgtcccggtgttattgaggtcacattgctgctgagatgagcttggcaaagtatgtaaaaaaaatgtgggtttgaatagagttcgcattgcattggtatgggaaaggaaagagtgattgcattgtggctttgaataaagaaagggttgattcgtgtgtttgcatgttaattttgttggatactttctctcagtttttgtgcattactattaactttaataatccagcaatcgataaattgtatggatatggagtactactagtatcaactcgctgctatttttagaaactggaattgcacaactgtcaactgggactgaataagtaagatgctgcatgttctcaaataaatattcctgcactagacttttcctgcaatttctacacatcattttgtcatctttgctcattattttagatcttctctctatgcctgatctttcaaccatgtgctatccatactcactctgttctaaatggtttctctacagggttccattgctcgtccaagagcggatacacgagttgcgcctgatcaaggaagaattagtctcactgctccatcacagcatgattcgatggatactttccgctgcccgccaaggcccttgccttgggatgatcctcgattcagccatcatacagagcatcacccactagtaggaggacatgacaaagcttcaacaacgttccacaaatctggtagccttggagaaagcaagaatgctgatagcatatctaattccaaagctgtcaaggatgatgggccttccacagctgtgaaggatgatggatcatcagtaaaacaccattcagatggtctgcacattggcaaagagcaagtacatgatcttttcgactttgaggacgactgtccaatatgcctagaaggttagtgaaaacagtaccactactcttttgttcatacatacactatcttatctttttctcagcagatagtgtttactatttaaatttctataatgcaaaatattaacagcaagagaaaggggggagcattcaaacattgttatgctgtagcagaagatacgtgttcatgttgtataattctagctaatgaacagtgttcatgttgtataattctagctaatgaacaatgctcaattgtggtggatcactacattgtgaccactctgctgccataatgtcagtgccatcataaaagaaagctaaatttccgtcaaaaaaaataaaagaaagctaaatcatgctcaggtctatttgcttgcatgattttggtgcttgtgtcgtaaagatctttttttttctcgcagagtatgattatgagaatccaaagatgacattacaatgcaaccacaatttccatctttgttgtatttatgagtggatggagagaagtcaagcttgcccagtctgctcaaaggtacttgcttctacttcacttttaacttcacctcagaagtgaagcgtttagcttgactccatcgacattaatgatacctttctcactacaggtaatgctgttccatgaggattcatgatcataatgctgcaacgtttctgtgatgttggagagtggagactcacggggactggatcacctagatttgtgtacatagcttgacgaaaatcaaagtcgctagattgtttgctgaaacttccagcggcgcaaagattttttattatttttttgtttctgtagagcatataattcttttctcatttttcagaaaaaattggtagcttgtgtcaatccacatatcacatttcgattggatgttacagatgcgcgtttgagtgattgcatttgcttctgatgctgaaatacgaaacttctgaaagccctagcatctgaacttgtgcttcctgtttgagatgacgagagattctttgcattcttcaggtcccatcgtaataagccaaacagcatatttgcaaacgaaaaatatttgtgaataaaacttttatatacgtattcttagcgatctaaaagcaaaggctgaaaaataaacttcaataaaaaaacgttaaaattagcttcaaatttaaggttgaaaatttaaattttgtctaacaagtataagcataaacgaaaagacgaggcccgttcttgccatgactgagttaagtccaatgaacatttctactattcctactttgtggacctatctaatattcctgcatttttcattacaaaactatatcacgcctgcttgctctctctcaaaagaaaaaggaggaataatcctgcttgctctctctcaaaagaaaaaggaggaataattgtattgttgcaaccacaacaaataggagtactaattttcgtcattgtaagctcgagtgttgttaatttagccaaaaaaaaaagggaatattttgagctttcatgcggaaaactggtcaggaactgttttaaaatgtctcaaataaagaataaattgcaaagaaaaatttcctgctatgttactaccacttttcacttcaaattttgtagattataccaaactggatttcaaaatgccttcaaacatttgtggtattcaaaaggttccaaaaaggcaaccaatgaaaaacttatccggatttggagctatagtctaaaatcctatataattatttctagaaagctcagcccaatagcaacatttttttattagccgcatgcctaaacctttggtccatgattggtgaaatcgtccatcaccacacatgtgatgcttccaagtccttaatatttcgttactttcttgttgtattgtactcgaacggatactcttggaactttataggactctgctgaactttgaattttactatttcatcaccggcaatctgtgagcaaaggcatagctgtcaattacgatggcagatttatgcaaatagagcatcgcaccatctattctttagttcttcagttgcacagaagaggggtgattttttatttttgagctaggaatgtaaatcggcacacaaatcattgcatcaccattcatataccgacaattttccgtaattaggtaagtgttcgcaagtccattagaattcggttcagatttcgtaaaattcaacctcttcagaccaggttaaatacaaaaaccactaggttcaaactgaattttaaattttcaaaatttaattagattctatcagcttatcaacagattccacgaaatctaatgcagaggattgtgaaccctgattagaactatttgaaaatgtacaacagcattcagtaagatagttaataatactttaataattttcagtaattaggttagtttgaaaatgtaagcatgtagtaatatagttaacaccaacattactactaataacacattgaagctcgcagtcagattgactagcagatttataaacacaatgaaatagataactcaggagactatcatttaggagatatacttaaaaactaatcataaccagctcacagagcattcgataactgaatcatttcttcatctcatcacaggcaaatagagaacagcaacattgcttctagaagatagttcactggtttcagaacacaagtaccaaaattttaaaagtgcaaacagatattatcaaagtctgcaagggttggattccacagtaacgtaacatcaaagcacataggcttaacgataacggcgaagagagacagtctggttgcgcttccaggtagccctgcgggacggcctggccttgtggtgagtgtgacccttgccgcgcagaccacggtacttcttgccagcagaggtgagaccacggagctcacggtgcttgtgcacaggcttgcagagccagttgatccttgggtcattgcggatagcactgtgagcaacatccacaaggatgatctcaaagtacttgtaggtggagtcctgcattaaaccaaagaaaaccaagtcattaatggaaggcagatacattgttgataatcatctttgaaagatctcagtaaagtgaaatgtacctcgttcacccagtaggagttgagcaccctgagtccgcccaacttgcgcccagctctctcctcagcaactgacctcttgttcctctggaacttgagctgggtgataccctggtgcttgggcttgccgtagacaatacccttgggcactggcctcttcctgccaccacgcctcacacggacacggtaaaccacataaccctgaggaaaggtaacgacaaatagttaagcacaatattttgattacaggacaaaatattcaaatgtgattatataaattggtaaataaatgggagcacccgtacaaaattttgctcagagtatcaatgacaaacaatgcaatttaagttcaactacggcagcaaactgcttttgcagtaagtaacgcaccaaacaacattacctatgccaattacaagaaaaggtctcaagggatgatactacaatggcaagcatctaccatccaatcgaatctaatggagaacacaagacaagtgatactgtccaagaaagcactaaaaacagattaactcaatgttctactaacagttaacaaatggcagtaacaggttccaacaaatcaacagcacagtcgttgaacctaaatcagcagaacgataacctagcagagtctagatctagacaaaaaagtaagcctccatttctacaggacagatcaatacttcaaacattaacaccatcatcaaccgcgggcacaagagaacatctggaggaggggaggtaacctgcttggccttgtagccgaggcggcgggccttgtcggggcgggtggggcgggtgaggcggacgatggccggctgctgcctgtactcccagcaccgcacgcgctgcacgaacctcatcacgtccgactgcttcctcctccatagctccgacacgtacttgtacgcacctgtgcacagcaaaacgacggaggacggatcaggagagagatggaggtggaggggtgggaaactggagacgagagtgatggagggaggcggcgtcggaggaggagctcacccatggcggcggcggcggcggcggcgagcggcgagaggcggcggcggggaggtggagcgggagaggagactagggttcgtgcggaggcgcgtggcgagaggctatatagaaggaggcgggggcgcggtggccgtcagatggggctagggtttttctcgtgcggttggatgttgcccggggaaggaatggatgggttactgatgatgggcttggcttgggccttattaagtgcagtggtgccgcacaagactcagcccaggagccagcctgctgctctttctcagcctgattaaaaaaatagagaatctattctatttattccactgagttggttcgagttcatgatttgccatcaacattatcactttctataatatactggtgaatttatcaattgttatacaatacgctattaggctgggacttgttttaaaaagtacccaaaatacccttatacacaaacaaggttaacaattgatttatcttattagaagtttcaaaaaaaaaaataaaaacttttatgtggcatccttacacaacatggatatttatatacaagtttcaattttttttatttttttagaaaaatatataacttatttgttatatgatacataaaatacttttttattgttgtttttaatataaatcatctttcatacactatataagataattttttgctattatttcttctataaaaaaattattttgcatacaccacataaaaatattttttctaaaaactaaatataccagaaaaaaattgaaacatgtatacaaaattgcatgttgtgtaaagaggacacataaaaattttcatattttttgaaacttctgatgagataaattaattgttaatcttgtatgtctcaaaggtattttgggtatttttgaaaataaggcccaacccaatgacatattgtagaacaattgataaagtcgctggtatattatagaaagagataatgtcgatggcaaatcgttgaactcgaacaaactcagtggtatagaatagattctctctaaaaaaataaatgatactagtagtttgttattattctttattatttattacggtcttggagatacaactttgaccccaaattatataagtgtataaaattacttcggaagttacatctaagaatatcatttttatgttttcaaactaattattttattaaaattcattgatacatattgatatgatcttatccaaagcatcatataatttccagtgaaaagactaaccacgaaattagtatgagtaatagaatgtgttggaacagcaataaaatgaaatagacaatcaatatattaataaattcagaacaccttgttgttcacataaaaattgcttgatcactccaacaattcatctcctaaatttaagccttttaatcgtatacatggtggatattgagctagcttagcttgggttgttattctaacgagataaaaggttgggtcgacttgatctgtttgctaactcaagctggcaacacattggcgttggctggacctcataaaaacggcaggctccatagcaccagagctagtcaacgaggacttttgtgatggtgccaaagctcgtcaatttttcattggagcatggagtcaaacgaggcgtcggagctcgtcaatatgactgctcagcaatcggtgaaggggatggcaactggaggaggagagttagaaacggatccaaggagctagcatttgggcgggcaacggtgaactaggggtcactagtgctagcactgccatggctaagcaaggacttaaccatttggcaacaggctaggattaatggtgttggcactgctacggacagccaagaagagcgaactggtgactagagaaggggatcatctggtgttggcgctgctatgaatgggtgggcgacaaatgaaagtgatgacgacaactagggtgcgaggcagagatgattgagtcatatatagaggtggatatcgagctagctcgattcagttcctataggaaccggtattgttcatccattcaagaaaaagggaggaaactttcctaccatgctaatttggtagaaaactgcgtgaaaaaaaatcgagtgcaacatctttttctgttcccattgcataggatcgaggcaaatgaagtcttgatgccactaatgcaaggattaagcatcatcaagcttttctactttttattatttagtactgttatttagagataagaagctaactctctaatcaactttgcatgtaccgttgcttcctatgtttttcctatggtttatctagtgcatttctaacctattcttatgtgttctttctattcatgtgtttttttactctacattccaaatgagctcttaatagttagccactaaatttgcatttctatgtttcggcaacatgtctttataaaaccacagctaaaacacagggggagaactcgggagaaaatcggtgttcaggacaaagtgctacgtttctcagaagagaaaaaaaaagggggcacagacgcacagtgcgttgctgctcctctggcgcttatagggcctttggggcttcttgggccatttggttggtcgttttggttgcccagcccaacatgatggtgttgtgcagcagcagtcaagttaggatagttttaagttgggcaagtcaaaaatggtccaactctttacatatcctcttgcagttacaactttctaccataaccaattcaacttatcaacaacaacaacaacaacacaaggtcagataccttggtcgaaattattacagaagagcaaagatgagaccttttacagaagcaagaaagatgagaccttttacttttacagcaagggcaaggtgcaactggagcagccgtaattttcacaggagccaaaaaaaaaaaagccggtgcgtgcatacacttaggacatgtattttcttcacagcgttctcaatttttcatggctatatacagctgttaaaaatgtagaatattatcatcatcagattacaatagattcaagtacctaccgtgtagcaaccatatatcagcaactcttattctttcctgcaaaccagcttttattctattttgcacatgctttaagtaacctataagtgtttcccacacgcacaatcattgagccccatcttttgcagcaacatcaaaagcccttgtgaatgcatttggaggctggccgccgctgagctgaaatttcccatttatctggaaagtaaagaaaaaaaaacacagtagtttgaattatcatggacaagtatccagtcactgaccaagtgataagataaaaagtgcaagagatgatagatatgatcatttaattagtcctcataccacaaagtgaggaacaccagaaattccagaggaatatttgttgagttcttccttgaccttttatccccaaaagaaatgttaggatatttgattcgattgcatctgtcacaaaaagatggtcactagaagtgaacatcggtggaaatgtacctcatcgactcctttgttagaatcttgaagaagttcttctgctccttctatgcccacctttcttgcagcatccagcagaacttgccttcaagcatttggaaattattcacaagattgaataatattgtataaaatcacttattgtcaacataaaaatatatatagggaagcaggatgggtagctaagttggcaggtggacatgtttgctgaagcaaatcaagaagataaagggtacttttcttgcccaaacatcaaaactcctacaaaaatttatcattgatagatagcatggaatcatttctgactgcaactttgcataaagaaaaggtgcctaaaaagggacatctaggaaaaaacttcagcagtatagtaaatgctgagaaactattcacaacccttacgcaccagaacaaagaaattggttggttattttcatttgccaatactgaagcagcacatgtaacaatggaaaatgcacaacgtgctatctgctttggtttaacattctaaataactcgcatccatagtagaatgtgataatctagataacgattccaatatgaaaaggtctgacatattccttttcggaatttcatcagtcattcttcattttagcaacataaaatgagtatgtttattacgagtttgtctcaaggagtaatatagcacagaaaagaaaaatgcacgcccttcaatgtaccactaccaacaggaaagatgtattatgcatcttgctgaaagcctcatacatagaaaaacgattaagtatggctgatttatgtgatttctcatgttgtcccatttctgacatgttctaaatcaataatagtttgtcacaaatatatatgaccgaatatgcagaattgacaaagaaaaataaagtgcaataagattataaatccattcctacaatcttgaatacatactcaccgatcaccaataaactttccatggcaaaagtaactttggaataattcttcaacaagagcactttgtttgtcataaccttggtgcccagcaagagttatgagcctatggctgtccattgtatttccactgtattaagtatttgtatcagcgaactagccaatgatgcatgctaaaaaaaaattcaagactatagcttacgtcaacccagacatgtcatattccatcccaagtcctctaaatatctgcaaaaagagcaaataaaaggctgaatatgatatatatgatgtgaacaaactctgcctttgcattgttcaaatgtattaacctctgtcatacgagcagttgcatgctcaaactgaatagggccaaacttcatccggtagtaatcagatttcttgatgccttccttaggtgcattcggatttaaaaagaatggatgccagcggacctaatcagcaaaaagacacgctagttttacgctgtatgaccatgaagttggacaacaataattttgaagaagtgaaacctcgaaatcaaacttgtccttgttttgctccatagctttctcgaggttctttttcccgacaaagcaccatgggcacaccgtatcagagctcacatcgatctgaatgagcttcttgccagcgtttgaagccatgtaaatcctgcatgtgtataattcacaaagaagctaatcagaaatcggatcaaggcgcctcatggatccggaaagcaaggactgaaaacaagtaaatattttgaatggttgctggtacaggccaagatcctaacacctgtcaagctagtgatccgaatttttcatcgaacacacaagctagtgatctgcagatggcctcaaaacacggtttatttgctatgcgatctgcaactagaaacagcaaagacatttgatcttcaactgtgtgggagaaaatcaccaaccagagtggctgtcagaaaattaaaagagttggggatgtggaagaccatctcaatgaagttctcatatacagttggcatatgtgggaggaacatgatatgaggacctttcaaaatgaggagcttgaggcccatgcggtgtcattcttattaacgagaacattgataagtggaagtgagcaatgtaacagtttggtgtaatttggtgacttaattattcgatgttatatcgtcctcccatagcctcgtaatggccctagcattttcttttggtttttggccatggctactagctgcttatccaagtgtttgtaacctaaattctattacatattaatctttaagagagaatcccttatatgccactagaatttgaccagttcccttatatgccactcaaaattggcttctcccttatatgtcactagtttaagtttttccacccttttatgccactcccaccactatagtgttagttgactgttagtcaaaggttagtttttttcgtaaatgaccaatatgccctctcaactaaaaaatgtgtaaacttcaaaaaatcataactaatttattttaaatcctttttgagtaaacaaaattttatcagaaccagtgaaaatgctctttatattaaaaatattattggaaaactgcatatttcatgcttacattgaaaatttatttgtgatggtaatggctaaaattgcatgtgatgcaaaaaaaaatcaattttcatatattgtatccagtagctatattagtactaaaatacatattattggttgtatactaattctcaaggacaaatgcgtctttttacaatgaagttaacggtcaactagcggtggactggcggcaatggcataaaagggatgagaaacttgaaccggtggcataaaaaggagaagccaatttgaagtggtatataagggagccggttaatttggagtggcatataagggattctctctaatctataacagggttccttcctttctttgaaaatagaaattggctgaaagtttcctctgcaaaaaaaaaaggctgtacaaactgtgattatgactccatggttttgttatcactaagctctacgccaaacaaacaaaaagcaaaattggttttagaaaacaaataaaaaggaaaaataaatttaaaataactgaaaattgacttaggtgcagaattggggattaacatggcttgtagaaaatgaaaatggtagttcatcttctcctatctttgctcacttgctctaatttttctcaccaatgtattaatctagccaaccggttggcaatatcaatgataaatcgatgatcatcagtctttggaagaaaatgtcttgtggcatggcatcagcataaatagcaagaaacagcgcctgttctctgctatgcctagtataaaggagaactatgaaacacagaaaggtagtaactatcaaagtatcaattgatcaatcaattaattaaagatcagtttcctattgaaatatagtaattggcaagttcccctgttggtttagtaaagaaaaaaaaacacacagtaaagatcagtttcttgcatccctagagagcaggaaacaactaacaactgtactggaagaaattagaaccgcctgttttcttgggatgaacagaagagcagacaagagtatatgcaagtatgcatcgatggtttcattcaaaggggagagggagaggataggattgagctggagggttgatccgaacctggtccagttgtggggaggggatgcggcttgcgcgaggagacgactccaagaagaggaggggagggagacctctgccacggaattttggttaactttgatttggggatttgatttgatttgattcatgtccacgtctcggtggcggtggccggggacggggaggtaggtgaagctgcccggtggtagaggaagaggggaggtgggcgttggtgagcttggtctatggagaccacacgcttgaatcacctcaccgatcggtgcgtcctggacgcggtccacaggacggcagtgtgggttggaataaatggcccaggcccaatttaactcaattaaaatctcaagagcccataagtaatgttagagacaacaatactgtcttgcaaatctaggtggaagaatctcaacttaaatagggtgatattagagattccttgttgaccggttgaggtgatggttgtactgccacacgcgcgcgcgcgccgattcggcctcggccgtgggcatggcgaggcgaggcggccgactgaagctgagcctgcttgctgctctttcgttatgtaacagacgagaataaagtcaccattaacaaatgagagattcattgtgatgtaaccttcacgacaaatgagatttattttgtggtaaccttcacaacaaatgagatttatttgtgtggtaatggagatctttctctatatataatgcaaggcaaaggctctcaaagaacatgtcttcctcctgctattgttccttggtgatactctccttctgttcctgcgatgtctctctatttccccagttctgttcatcccgcgcgcacgggtgatcgaaacgagcaggtgcctccgaaactccgtccgcttgagaacctgcacgggtaggcgggcgatcaagtttttgggtaacgcttcaagcgcaactgctccgcatcatcttcaccaatatgttgacaaccagcgacaacaacaacactggagacttggggagcctcccgtcaacaccaacggaggcaatactgcctcaaactccagtgaagggccattctcgaggtataatgtttcacaattactgtttgttcttcgtttcctacaactgtcagtcacaatattattgcgttctcttgtctatgttaatgcttattctatattaagcatgctcatgttgtacacatctagcactgtcactagatctactcaaattacaaatgtcatatttattgtcttaatattttggattaaaatatgctgcattatgaccaaatttcgattaaaatatgccgaattatgaccaaattttgattaaaatataccgaattatgaccaaatttccaacagtgtggatgtgcgccgctgcacatggcttgccgctgtgttcagttccccactcacaccaacggcacgccccgccccgccctcgacttccaggccgcctgtagccatctccagccctatcatttcgggtataagctatacggtatatttgcaaagaatagataacttgtaaataaaatttttataagcgaaaagatgagtccggattcttcgccgttcctgcaaagtccgcatcgacgccgctacccgctatctccgtggctttagcttttttctttttttttataagaaaatcatgttctctccatcggattttcgtttgctccgttttgggttctggcttcttcactgtacactccatacacaaagaagctgcgctgatatgtggacctgtgaactatgaagcttacatgtaaaccactcgaatcaaactcaaaatcaaaggacagtaaataagaggatttggttcctccatacagccatgttctttctccaatagaagttggataaagttttggatactcgtggcacgcttttcaaactgctaaacagtgtattttgtgcgaaaactttctatatgaaaattgttgtaaaatataatatcaatccattttttaagtttgtaataattaaaacttaattaatcacatgttattaccacttcgttttgtgtaaaacacttaatttttatcttcatcttcatcttgagattcaaacaccaccacaatattgacgacatatgtaacgagtttttttgggtggataaaaaggataaaaatgctaaactatatgggtatatgtgtagcttaattctcataggtagagtacgtagcaaggttgggcgccttcttttgaaataaaagaaataaaagtagcagtacacaatacgtgtatgatctacaccaagctaagatttggtgtaatggttgtcgtgaatagaataagaatgttgatcataacgctttattaacatcatagcttgtcttcagtcatttctttctgacttcgaaatttcctctatttatccatgtcaatgcatttgcacttagataaaaaaaaattctcttagtattgtaagaaagatccaatcttattgggcttcttcacagtgtccagctaagaaagtagttctaattacagtatacatgaccccaacgtaaaatagtttctccaaatgctactttggatagtgtacttacttttcttacaaaatgggagcctaaggctaatctaacctgcacgatggacctttacttttggacgacgatggtgccagagaatataactgttgtttgttttgcccttctacaataaaacatctgagcataggaacatttggaattgtcaccaactttggacagttgatcaatttcatttcttcaagcactggaattgtgaatacttctatcacctcatcttcttgccacttttccaagcttggcatatcacacaggataagactcttcaacctccagaagaatcgataatagctgacctcaatgttgtccatcgatacattgtcgcaaaaaagtgtgagactgtccattccttcaagatgtaggacctcaagtgatggaaaatactgcacaggaggaagcctcttacatcttgcgcaatctttgatggttagtttaaccagattagcaagagtttgacctggccaccaaattggaagtatgctaccagggtatcgccaaaccttgagtgtctgtacacacataggggttctaagagcctccatcacttcctcggcattgtatgcatttacctcgtcattcctaaacataccccaacacaacaacatattggacattcttgtttttagagataaatttgcggcctcggcttttgatttgtccctcacgttcttcagattatatatttcaagccgcccaccgagatccatgctcttgatctcttcaattccatacccatcaccattgcccactatgtaagttgtcagtgtttgaaggttctgcaattgtcccatatttgacggcatgttttctaatcggaagcagccatcgatataaatgtgccttaaattctccataaacctcatgttttctggaagttgctttaggtaaaaacaatcggagagcctcagagtttgcaggttatagatcatgaaaaagtcctctggaagcgacgttatccaacttcttgacagatcaaggtacctgagatgcttcatatcttggcaactaaatggaacactggcggacaagagaccatgcaggtctaacgctctcaaggagttggatttccaaaaatcaggattagacacacttattcgacatccttctccttgtgacaacagtgtgtggataccccatgcattgggtagaatcatatcaacatctaaccctgaaccaaccactgacaagtgatggagctctggcatcacttctgtaagttggtggccttgatgtaggattcggatctcttttccagcagctgacgttgctatgccatgaacaagagggtgcatcttatagattgttactccattgtaaggttgactgacatcttgaagaaatgatcttgactgtagcctatctaacatccaagcccccataccttcagtatcgtaccataccatatcattagccatccacagctggatcagcatatcaccatccacttcaaaagcttcaggaaataaagcacagaatgcaaagcacctcttggtgtctggttgcaagtgctcatagctcatctgaagtgcgaccgaggctacacctgccgtcgtggtcagcatatcgctttctgcaagagccaaccattcattggcagcttctatgacactagaccattcattagaggttcccttctttctcagcaaatccccgagtgttacagcagctagaggaattccatgacacttttgcacgagggattgaccaacctggatgagctcgggtttgtcatctaggccacataacattcgctgcctcattatggaccatatctcatcatcactcattggtcccagctcaatgatgccagatgcaggtgcttctaaggttcttgcaacacaaagttcacgggtcgtcacaatgaccgtgctccctgatgctccagatgccagtgaggttctgagttcttcccagccattggtgttctcatcacaaacatcatctaagacgagcaaaaaccttctttcatgtaaaatgttctggaggtaggattgcaactccttctcttccttgtgatccatttgtgtctccaatggctcacaggttgcaacctcaataatccgttttgtgattctcattgcatcaaattggcgagatacattcacccatatgcacaatgagaaatattccttcacattgacttcatcaaagattaattgaaccaaggcagtttttcccactccttcaatgccaactacacataggaccttgaggccttcatgcttgtatctgtccagacagaatagtttttgctttatctcttgcttctcatgcacccttcccacaatattattttgcattaccaatggcacgtggttgatgaagccattgatctctgcacctagtgcattaagttggccggtgatcattttaagcttcctcttcatgcttcgaggaagaactaatggaatatacatgttgcgcatcatcctgttcctgtgcccgtcaaccaaagccttgttgtgctgagcctcccatctcaactcctccagtagatgctcaactttgaaggtgagtaacctcaactcagccattgaaaatcttagtgtcatatctttgttgttctgtcctgccaacgatgaccgttagccaaattagacatcattgagtacaaaaaaaaaactctagcttgacatattatcgtagacttgtcacttgtcacaagttaggcatattttaatatcaaaagcacatcggtccatgaataaatattaaaaaaatggcaacaaactcataaaaccatgatatgttctttaggtatatttgaagatagagagcacgtcagttcaaagataaattagaagaaaaaaaaggtttttatagagaggcaactgcattatcccccttattttcaactcaaatgatgattttacccctgcttttctaactttgtgattttgccctcatttttttgaactgaagcttgtgcttgcccccattccgtgtcatcttaacggtgtcaaaggaacgtatgctcttgcagatttgcacatacttttcttaatatttttgtgattttgcccttggtttgacatcaagcattttgacatgaatttttgcccggttttcacttgaattttcacatattcgatttgaaaagatgagggcaaacacaatcttcaaatgaattttgcccctgtttttatatgattttggacattgttaagaggagacaacaaaatggggataaagctcaagcattagttaaaaaaacagagacggcaaaatcacaaagttagaaaaagtagtggtggaatcaccattggagtttaaagtagcagtaagatcgcaattgctactttttaatggtataccaaatttgtcatattgtttctatttatccgagtgttaatgttgctttctcatgggtggtaaagttcatttatatctatcttaattattaaggaaaatggtatctattactacactatattaaggaaagaaacatgttttttttattattttagtatcaaaataactctctgaaaataagaaaaataatattataaaaagcaatattttctagtgtgtatatttacttggagtatcagaaaactttatgagtattataaaaataaaaaatctagcatttacatagatagcatggatattaacatagaaaggataactatgtcttgttactactttccctctttcgtggatgtatttgtggaagaaggcgataggtttttatttaggaaaaatcgtaaaaaaaatatggctgggattttgtgaaagctctagctcgagagagtagatgagtcacttaaaagaactaggaaaaaaaaggcagcaaatagagataacaaaataaaaacatgtaatgcattaatatgaaaacccttgtgtaagaagccatgggcacacaagtaaaagattggttacgaggcgataaataaaacaggggattaatgtacctttttatttatttaacattttcagatgtatcatttcatagcttcagcatttcatattcctaattgtcatgtgaaaatgacattaatagatctttcatgaacatcttattatatcatcaatttttatgaatgacaagtaaaagaacttcatatacactagttaaaaaacgattttcctggacgaggagctatttagattacagacggaccgttttcacgtccgcccgcaaaaatcagcctcccattttcacgtgcggacccttaagaggtctgcacgcgaaaatcgattttcgcgtgcgggcctcttaaaggcctacctacaagtctatccttactccttttttctctcctcaacactttaaaatttcatccttatccacccatcatgatccttatcctctctcactctctcacctctctctcactcccacactgtctcctctctctcactctctcactcagtcgcggctcgaggatggacgtggccaacggcatcatgcagctcagcgacaggcgcggtcagcggcaccgcacgactcggcagcgggcgcggtcgtcggcaccgtgcggcttggcggcgggctcggcagcgtgcgctcggcggctggcgaccaggagcggacgaccgccacccgctcggatccggcggaggcggctacccctttcccggatctggtggcagcggccgtcccccgcctggatccggcgggcgggcgggcttggacggtggggaggcggcggatccggctaccgcgacggcgacgatggagaccgcgacggcaatgatgatgacgaccgcgaggagggtagtggcgtcaactttagggttagggttttgtttttttggatttttttcggttttttatttttgcgtgcgggtgacatagccaccccgtagatttttgcgtccagatgcgccacctgtacgcaacaatagcgatttttacagatacttcgttacagacggttgaaagatccgcacgcgaaaatcgctttcaaccgcacataaaaatcgttattttactattattataccagtggcttctatggttagaaaagaaatagctgaagttgtttattgtaaatcatggtgatgtcctaaatgacaagtagaaaacaacacaaaaagtaaggctataactcgtttcttttctagattttgtttctgaaacttgccttttgttctcaaatactagatttcttatagggtttcaagcgctgtttttcccaaatgggccgctttcaaggaagtaagcactaaggacaagtcaggaggcttttaattgaattgattaataagcatcttatgttgcgctgaagtctaaacagcatcttaaaaataagatgtagagtatccttagatgcatattgtaatttgtaagaactattaatccagagtagccgaataagttggccgattaattatagcatattaataacgtgacactgtttcgcatgatgactaaggtggtgtgtttgcaaactactccctccgtccagaatgtaacaacctattcccattctaagacaatatatctgggtattgtcctaggttgctatgtacgttctgggacgaaggtagcagtagacttcagcaatctgctgctgcgcccttttttttttgcatttcattctttttcattttccagggggaaaaatgatatattattctctcaatgcatgcatatactacgggcatgtttgttacagctctaagttctaaatataactccagaagttgagtctagagtagagttgtggagctgcctaaacccagctccacaactctagtacattttgtgagagagctccacccaattccactcccagttttggtggagttgaaactgtttggctgagctccagctccaggaggggtggagctggagctggagctgtgccaatcagacccgtaccctctgtttttttaacatatgatgcccttgacttttttgacaaacatgtaaccattcatcttattcaaaatttttatacaaatataaagaatttaagttgtgcttaaagaacatttgatgataaatcaaatcataataaaataaataataattacctaaattattaaataagataaatagtcaaatgtatataaaaagtcaacagtgtcacatattaaaacagagagagagtacctgcttattggcttttcaacagtaccagaggcaacctggttcatgaagtttacatctgtaaactcaaaccctcgacaccccccaccctaaaaaaaatccaccaacaccaaatatatgcctacagtatcacagaataactatttgattgagccgcacagaaacacatgaatcagatgagaaagataagctcaaaagaaaagtttccaagaggttagagctcttgctaaatttcctctaaaatatttgtaggattgtccattctatgataatttcaaaggatataatgggacttaatcctgtttcaaagggttttatagaaaattttttctataagattaaaatcctccaatatccctacgtttttcctccaaattaaaggagccctaattgttgattgagccataggaaaaacacagaaattgaataagagaaatagggttaaagaaaaaaattttcaagaggttggagctataaaattatccatttcatataaatctatataatcctttgttttaaaactcctcgtagaaaattcttttatagcactaaaattctctgaaatttctattttttcccaacaaatcaaagaaccaggaggggtgcatacataccagttcttccagcggattcagccgcttgtcggagcatctgcagactttcgcacagggtggagtactcgcgggcgatcgtgaggacacccatgaaacctctaagaaatttgtcagatgccttctgtaccaggctgttgaggatggccgtcagctgtccgcccccgtcgttgtcgtcgtcgtcgccgccgctggcggccttcgtccgctgcttttccgggcgaaagccgcctctaaagcaactcgccatggatatttcccgtacgtgctcgacctcgttctcgtgcttactaggatgaatggcaggatgtgggaagaggcaaacagatagtagtagtacatgtgtactactcctatgtatagtactcctagctcttacgttggtgtttggatcagagacttaactttagtctttatatttagacactaatttagagtattaaatatacattacttataaaactaattatataaatgaaagcgagataatttttttaagcctaattaatccataattaaagaatgtttactgtaacctcacataggctaatcatgtattaattaggctcaatagattcatctcgcgaattagtccaagattatggatgacttttattaatagtctacgtttaatatttataattagtatccaaacattcgatgtgataggtactaaaagttttactcccattcaatgtgatagggacttaaagttttactcctatctaaacaggtctaattccttctcccaaatatcggagcagaaggcgaagaagatgcgaatgcatgtaccagtacgaatgaaggcaaatccaaaagtcaaattttgctacttagtgtttacacatactagtacgaacagaagtaaggcccgcggtttagttccctcgcaacaaattttataccctatcatatcgaacagttgaacacctatataaagtattaaatgtaggctaaaaaaataattaattgcacatattaggactaatttgcgagacgaatcttttaagcctaattgctccatgatttgataatatggtgctacagtaaatatttgctaatgacggattaattagatttaataaattcgtatcgcgatttactaacggactctgtaattagtttttttattagtgcccgaacaccctcgtgtgatattctatatagtaatacctgatgtgacaccggaaatttacatcctggatctaatttcgctaaatccaaaagtcaaatttcgctagctctaaaagtcaaatttacaccctggatctaatttttaaacacccctaaatccaaaagtcaaatttcgctagctgttggtaatcatcaccgacggagaccgaccggctatcgagaagagatatgattgcagcatttatttttctttcctttcattccttccaagatacttactccgtcccacgatataagagattttatctaatctagttgtttcacgatataagaaattttactatactacttgtcacatctatcaactctaattcaaatttttatccattttaaccatcaactacccactcaccaataagcaaatatcatttaataggggcattttagtatttttttttgttatccttaaactaccaaaaatgaataatcccttatattatgggatggagggagcattgctatcttcttcctccatttaaaataagacaacctattgaaggatatgacatctagaaagggataaatgattgtccagattcgttacatctctcttgtaggttgcttattttttttatgtagagagtacttcattcatcttagaatataagaatttaaaaccgaattatactaatattatagatctggagaaatagtttgttctaaacaaaagataaacccgcatgtcgttatactacccacggtttatttttctaagacggatagagtatacattactgctagtcaacttttgcatgcgcaatctccaaaatccttcaaactgcagcgatgtgatgtacacaagtgccaacttaaaagctactacctccgtagtgggctagtgtgtgctattggtcaacacacggatcacctggtcaagtagccagtgcaatatttgaagagcaaatttcttcggagagttcctttgacagctaatatatggtttaggtggtgtttagattcggggacttaactttagtccctttatttagatactaatttagattattaaatatagactacttacaaaactaattacataaatgaaaactaattcgcgagataaattttttaagcctaattaatctataatcagagaatatttactgtagcatcacataggctaatcatggattaattaggctcaatagattcgtctcatgaattagtccaagattataaatgggttttttactaatagtctatatttaatatttataattagtgtccaaacatttgatgtgatagggacttaaaagttttagtcacatctaaacagggtcttagttccctaaattttttttctcaaaaacgttatatgaaatctttagacacatacatagagtattaaatatatgccgggtttagttcccaactttttctttaaacttctaacttttccatcacatcaaaactttcttacgcacataaactttcaacttttttcttcaaactttcaattttagtcaaactttcaattttggcgtggaactaaacacacccatagattaaaaaaactaattgcacagttatggaggaaatcgcgagatgaatcttttgagcctaattagtccatgattagccataaatgctacagtaaccctcatgtgctaatgacagattaattagattcaatagattcgtctcgcgatttccaggcgagttatgaaattagttttttcattcgtgtctaaaaacctccttcgacatctggtcaaacatccgatgtggtatccaaaagttttcttttcacgaactaaacagcccctaaacaattgttcaaagaacacaagaaattttacaacatatgattgagatttgagaaaccgtacgtaggaattcttgttccatcatgagctttgattgtaggattgcctccaaaattcctactcccccattctaaaatataagcattttgaggacattgataagtcaaatatttttaactttgaccatttatggaaaaaaatcaatcatatttaattgacgccagacttgaaagcgcggattacagaagcatcggtgatttcggggatcgtatttttgcactcattaaagcgccgaatatagtccctcaatgactcgcccggattctgcgtcaacgcgtgtaggttgtcctcgatcgcgtggcgcttgtatgtttcttggaagttagtgacgaactgttgccacagttctgcccacgaagaaattgagtagggcagaaggtgaaccagccatgaacgtgcagatcccttcaacgcagccggcaagtagttcgccaatgcgttgttgtctactccggcagcatagagtactgtggaatagacatgaagaaattcttcagggtcggtgcttccgtcgtatttctctattgctcccggtcgaaacttctcaggccatcgaacatctcgcagagtacgagtgaaagccctgcacccgctgccaggggcagtaggttgtcggcgatcatacgctcgtcgcggatgtctgtccgatgaagatgacgaagatgatgatgatgatgatgagtcacttggttccggggcgcggtttcgaggacgacgctcgagtatgtgagccttgctgtcgcccatcgttgttgtcccggcgtcgatcttcgtcgtcgtcattgtcacggcgtcgacctcgactggtatcgcccggcacccgctgctcgcgattagtatgttcgcggcggttgtggcgatcatcacggtctcggttctcgctcggatgtcctccttgtttgccgttcttgcgatgtcacgaagagacgcgatgtcgggaatggttttcattatcttgagtgagtcgcgcttctcggcggccatttagatggttgcggagatcactggtgccgcaaggtggaggggtagcttgacgcagtggcgtccgctaatcaggctgttccccattagcgtcgccggtcgacgtttgttctggtggcgccctcacggcggcctctgcgaatgcgttactaaggttagccactgattcccgtagtcgttctgcccattgatcgagatcagcgttcaggacgggatcgaaggggctttcgctcaatatcgcattgagggttctgatatgttgggccagcgtcggcgtaaccgattgatcctccattcctgtgttgccgcctctagatgtgctggttccatcgatagcgtacacgtcgcgtggtgtacttgttgatgatgaggccaggtcttcgagtagatgtaggacagatggctcgtggggatcgatatcgattaccccgacgaatcgatctaaagtagtcgccgcaccttgttccttgtccgtatctctaggagagatttgtgattgctggaccttaggggatgacaccttcatggcgctgagaaggaccttgcagcttgagaggtcgtgagtctttgccttatagataggacaatagacatcacgagttggagaaatacgttgaattccacgctctttgcaggcacagatttcagcttgtacgctgaggaaaaccgagcaagcttgcaaggtgtgcttgctagtcctgtggagtggacaccaagctttagtcgccccggaagttgtccttgtaggctcgtgcttcttgtgggtaggacaagatttggccgcattaggatccttctcgggcttggatattgtcgacgttccgttctccgcttctgcgggaagatctttcgacatggagtcgaccggggtcgtaatcatgctgttctcactaccgataattgctgcgccagtcgagatcggcattgtggtgttgaccgggaagacgatttcacctacttgagtccacatcagcatcgtcgaagttgaaactccttggtcgatgccggtgttgacgttgtcgtcgagaaggcttgaagtcatagtagtagaaccttgagcaccaagtctccctacttggcgcgccactatcgacagtggatacccgtagatcggatatagagggtattggggtccgttggtaccaggatctacgtagtacgacatcaagcaaaaaaagacaaggattatactggttcaggccccttagtaggtaatagccctaatccagtggatatgggattatatgatggaaaccacagattacactgggaatagcagaactcaatgataccgacaagaccgtagtcaagttggtccgactagatctcacggcgacttggctcctgcacgctccaactccctagactgtggtgggtgtgttggcagtaatattcgatgccttaggtcctgcccaaggggtcccttatataccgcgggtcagttgatctccaagtaggactcggagatatcgaacccctcacgatatggtatagacccagtctcgtctgagtagaactccttccatccgtagattccgtctctatcacgtgatagatttccttaacgtatacggaaactatccgtatacgcgcgggtataccgtatcggtattcaacgtacatccaagaatagagggtataccttatccataaccctgacagaaggtaatatgtaattgccatatctcttgtatgcagcatacaagcatatttctatctcgcatatctcctccacaagtatgtaatcaattgtttccatcatgattatcttatagagcttcgtactacaaaagttataatgtaggtactaaaatttaagggttaatttgatatgtgccattataaatatgcatatccagataaatgtcattacaattcgtctatttatagtcgtgccactcaaattttataaaattgtaactatgccatcgccatcacgttttttatcttcttcatcatttgcacgtgggacccacccgtcagattcatcttcttcctttcaccctcccttatcatattcctcaccatctctctgtacggcggatgggaggagcggacgagcagcgaggtggcggccgtcattatcgccggaatgttggaataaatggctaggcccaatttaattcaattaaaatctcaagggcccacaagaaatgttagagacaataataccaccttagagattaaaagtggagtatctcaacttaaaaaatgagttgagattccctgttgaccggttgaggtgggggtcagacagcaacacgcgccgagcgaggctgagggcgtggcgaggcgagcggccgctgctctcttaagttttgcaatggttgggaattgaatccacctacgattatttctgtaacggacgaatcaattccttgattgattacgttgttactacagtaacggaagcaaaagtgaccgggattgattcttagcgatcgggattgattctcttccccttcccctcctgctctcgatctggtcgatttggttaaccacaccttcgcctgagtacctgcacgggtagatgattgattgcgttgttactacagtaatggaagcagaagcgatcgggattgattctcttccccttcccctcctgctcttgatctggtcgatttggttaaccacaccttcgcctgagtacctgcacgggcagacgggtgatcaggtttttgaggagtgcttccgcacgactactcgtgtttcttcctctgtttgtcggtgtaaacatcgtcttctgcttcggttgttcagcgaccatgtcaacggacaatgccaacggcagtgcgcctggagacggcaccaacggaggcaattctgcctcaaacatcagcggagggccattctcagggtataacactgctttcatcgtgtttatgttctttttttcatatgctactgttaggagcaatggtttcattgtattctattgagatgaatatctatgcttatcctttactaagcatgatcccaggtttacgtttattgatcactagtttactccctacaaatatcatacttattgtcttaatattttggattaaaatatatcaaattgtgaccatatttccaacacggaaagtttgaatcctcacctagacccatcattatcgtcaggggagggaaccgagactcggagagcatagctacagccatggcgccgactcatcacgatgcttctctcgcgcctccaccgtccaccctgctgtcgccgcaccgttccccatgccaccgtcgccatagatttgcctccaggaggtcttgcagccgaatttgcggcttgtttggtatctcgagggaaggggattgggagtttacacgagggaattgatgatgagattaagatgggaatttgattttttatcccaatatcttgtttggtggaggtgatggaattgatagggagtttagttggagattaggtcattaataaaaacggatggctgagatttgcttaaataaattaaaggaggaattccctcccaattacctgcccctacccaggtattgaaaagtagggagttctttccttgattttccatccccatcccaccaaaattcccatgtctcccaaccaaataaaacacttaatagcctcgtccctctaaactcccaatccctccttaaaaactttctccaaccaaatgggccgttggtgtctgggactgacgacagcaaaagattaggacaccctctctggtaggcctctctcttctttcacgggctggcctatcccttatccgagctcttctgtagccgcaacgctcaacatgatgacacgagaaaaaggtttgggtgatgcagtgttactctgatccactcgtttggtcttgtgcagatttttcctttcactgtttcatttttttttcatggtaactgattggcggaggatcttcgagtgtttcgtcgaaacaagaattcggcaataataaaaaggtagtacacaatacctaaaagtggatgaatacggagacaaagaatttaaacaggttcaggtactttcaatgagaggtaataccctactcctgtttggagatttgaatccaccgagtgtagtattgatctgactatatgaatcctctgccctagaggacctcctatccgtcttatataggatggagggcaggattacaagatagaaaccttaaccaatacggtatcggtttcctaaatctactttataatattatcaaaccaggactttaggtcgttccgtaatatacaaggaaatgtaatacctaagtcataatttgtacatttttcatagatataagttatcccctataactagtcggataaccatgccgtgtgggtatggggtacccataatctccacagtaacccccgagaccttcatagtcgaaaagataattttctctcgaactagattactccaaagccgagtgcttcaatcatcttcgccatggtctcccgagtacttttaccaaatctgaagactgtggagggctgaaaaataattaaatgtaaacttaggtgcatcgactagatgcacctaataggtgtagcccccaactatgtggttagttgaataaactaaacatatagtcaaggagtaaataatctaaccaaccgagtggttttgataattgtagtcaaccaagtgacttaatattaatggtcaaggcaaagcatgatcatgaagctggggtgtcgaagagcaaggagaagggggcacgttgctataagtgtcatgagtttggacatataaggaggaattgcccgttactgaacaagaggaaaagtgcgattgcaagtttagcagctcatggtgatgattcagatagcagtagtcatgagattctcacagtgtctaacgagaagtctgaagaagcgtggatgttagactcagctagttcctatcatgtgacatcgaagcgggagtggttctcgtcatacaaatatggtgattttggtgttgtttactagggcaatgacacgagttatcgtgttgttggagtgggcgatgttaagttcaagatgtatgatggaaacgaggtgctactttcggatgtgagacatgtgccgggactaaggaaaagtttgatttcacttgggagcctacatgagacaggttggttgtattaggtggattctgataggaagaccacgaatatcatgaaggacagcaagactgttatgactggtgagaggacaagctcatgttttgtacaagttataagggagtgatattgcaggtggagtcatggaagatggatatactggtgttgatgttcacaatcctaaaggcggcgagcctagcataggctcgtcgggcggctcggcgtgagcgatagaagaaccaactcaagtcctagtacacggaggttcaagcaagtaacagattcaagttggcgtggcatattcgtcaaggtggagtttgttagagtttgtgtcgaatatgtgtacataattggttacagtttagaacttagagttgtaataggcattaggactagagtatgagttggactctatcctaggatctctcataaatagagggacatgcctgttgtaactgcatgatgacttagcatagcgagagggagtggctgccggcaacgtctggccgtgagtcgttgtaactctcatacgctgtatatgatggatcggggaggagcgcccgtaataagtgccccagagatgtatactacggctgaactccattaccaaatatcgtgtctcggtgtcgtcatcatgtttggatctcctatgatgttttcttccgcgtttagctaccgatgtagatttcgggactggttttataacaatacggtctacggatatccccgccgataatggtattccctccgtttcatattgtaagccattctagcattgtcctcattcatatagattcatgccaaaaagtcttacattgtgaaacggagaaagtagtttttatgggatgagaatggtgaattgagggagaaacttcctcctattcaatatacacaccttctgtcccataaaaaactcaatcctaaccggtacggatatgaacacgtgggtgcctagattcgtagttatgattgaaaattttctaagaccaagggaatacttggtaggaggtgataattgagagaaaattattcctttacgtcgcctaaacagatcaagtctcaaccattcgtactccctccgtactcgtaaaggaagtcattttggacagcgacacagtcttcaaaacacaactttgacttcttgtttctataaaaatatttattgaaaagtgatattgtcagggttatggataccacatacataatagtagttgactaaatctcggcaggatccaccacatactatgtcttatacggaaactggcctcgagggagttccggataaggaaagacaatcagagttctacatagaaacgacaaggactactcggattgtatccatattggtttccctagttctacttagacaaggggacacctatggatataaatacaagatcccctaggaggagaggggagggggaccatggaagacacccatgacaatcaacgtacgcccaccagaagacacaacatacaagcctacatacgccaagacacgccgccggatatcgacttcagggataggcatggctattcccctacggtgtctccggataatgtcatgagatacgaaagcgctatctctgatctcgccggacacggattcgaggaggaaggctaccctgttgtcgactaaaagtcagaccttcagaccgccatgtcgacaatagttagataggctaccccacatattgtactggtgtgattatggtgaataaaaagcaacatcggctccgaccaacaggatgtagggctattacctgactgctcagggacccgaacctgtataaaaatccctgtccccatctcttttacctcagtctcgcatatatcctaacactaacgatccccatattgtccaaataccgtagtcgagacatcaaacgtcgacagtggtgcgccaggtagggggattttggtgctctaggatttcgacgagatgggtttaagaagatggactctccgacaacaagctactcgacgactttagctatgaggagatctaacccaaccggagtacgtccccgaatgagatcggaaccatcaacatcaacaattttgatctgttgagatcatccaaccttcaaagatgacgccgccgctgcggagggcatctgtacggtatttccgaccattgacgatcttgaggatgatgccggaagggtacaagacgccgacacctctagagaccgaaaccgactactacactcatcgggtttaagtgcggttttggtcagactcggagtaacaggccggatatacttcctccgtctcaaaataaagccattttgaggttggcacgggtattaagaaagtaggtgagaatgattggaggaagtgtgtgattggttgaaaagagaaagtaggtgaagaagaatagttgtgattggttgagaggaggaggtaggtgaagaaatagcttcattttgggacaagacactgtgctagaaatagctacattttgggacggatggagtaccactgtccgacatcaccacgtactgatcgcttctgacatgtgcacatgcatatgcacagactcaatacgtgcccaggcatgcattggtttgccgtcatatacatgcaccgaagacaattcaacggctactaaggctagttaaggtaattagtagattaattaatttaatcaatctactaattccatagatatatccggcatatatctacacaagtacgcaatattttatatgtaatttatcgtatctatccagatcatgcagcattgtcagatcaataatttattatgtttacctagagcatgttttttatataatgtccgttgtgcgagtacttccgacgataggccaactacggtctaacgctgggggctcgctctattttcttctgtataaatcatgcttgtttacggtttacataatgcctgatatttaatctgctcgttatatcctgataatactagaagatccatgcaattttttgagtacatactcgatattatctgctatatatcttgccttctagaaaatatttttcaggaacaattgagcactcgagtaggttatggtcgagtacactccattatcgagaatattctcgacaaatgtggagttatcgcacccaacctaccaacaaagaccgacgacctatctcatagcaccggccatggctggactactcgagaaaaggttgttaatagataattcctcgtgaacgccgtcggcttgatcacccgacatgattgcgaacggacatctggatatgctataagttgggtacgtgattcatgctggccacatgaaatacacttgcaataaaccaactctagcacttccattggtgtgcgagagataattccgctcgctcactggttctcgcactagtacgcagcaatctctcacaccgcaacgtccattggtgttcgagagataattccgctcgctcactggttctcgcaccagtacgcaacaatctctcacaccgcaacttccattggtgttcgagagataattccgcttgctcactggttctcgcaccagtacgcagcaatctctcacaccgcaacttccattgatgttcgagagataattctgctcgctcactggttctcgcaccagtacgtagcaatctctcgcaccttaacttcagatggtcaaggtacgactacggcagcgtagcggtcctcgcaccatgacttcagatggttgaggaacagctacgactggtcttcgaccggcagcgtagccgtcctcgtaccacgactccaaatgatcgagagacgcctattcactggttctcaaccagttgatcatagtgatctctcgtacatttgcttcaagtggtcgagttacgactactgcctggtcctcgaccagcgatgtagcgtctctctggctacttcgactttcagtggtcgagttacgactactgcctggttctcgaccagcgatgtagcatctctccggctacttccactttaagtggtcgagttacggctactgcctggtcctcgaccagcgatgtagcgtctctccggctacttccactttaagtggtcgagttacgactactgcctggttctcgaccagcggtgtagcgtttctcccactatttccacttatagtggtcgagttacgactactgtctggtccttgaccaacggtgtagcgatttctccccctacctctacttcaacaaagttggtagcaggtacacaatatcgccaagttttttacccagagatcccttaccacgacgacacctagcgttgaaacctatcctactgtccctttacgccgtcctgacaaggcctccgaggaacctaagggatcttcggctggagacgcccagagctgataagaccttgtcggatcctgtagagacaaaagaccatgtaagatctggtcgtgtaagagttctcgccgtgcgtattaaccaagccgtgtaatcggaaattgacttttccaacttcacggctgggggctaggatcagtgcttattcaaccaaggcaggtcaagggtccaagagccttatcatccgagaacgattatctgacgacaaggctgggggctagggagagtgcatgactctacaaactgactgatcgaagtcgttaagagagaagacgctcatacacaaaacattgatcggtaaaattaattcatttttagttttccatacatattataacatgtcaccctttgagcattcgctcgggggctatttctatttgatattcttttctgagtattgatttcaggaaaattctattcgacattgatgaagactccatgtctctatggttctacaccaagatcgactaaggcgagttcgacaaatgtcgacaaagctccgtcgcagactctacgccttctcgatcgcttgagaacggttgctggatctcgacaaggaatacggaatgaagaaatggtgtacccgccgagataaaatttcttgacttcaatccaaattctcgattacagcaagacgagagacttagtcgtacgctctgtactttctcggtcgacatcagagattgacttagacaaaccctttcggtgcccgcacgaggctgataaaggaagtctaacgttatctctaaactcactgagaacggtcacgtgagctcgataacagttcctccgaagtctgcggttgagaatatgaactcgttcatttgcatcgaagtcgggggctactgtcaaggttatggataccacatacctaatagtagttgactaaatctcggcaggatccaccacataccatgtcttatacagaaactggcctcgagggagttccggataaggaaagacaaccagagttctacatggaaacgacaaggactactcggattgtattcatattgatttccctagttctacttgaacaaggggccacctatggatataaatacaagaccccctaggaggagaggggagggggaccatggaagacacccatgacaatcaacgtacgcccaccagaagccacaacatacaagctacatacgccaagacacgccgccggatatcgacttcagggataggcatagctattcccctacggtgtctccggatactgtcacgagatacgaaagcgctatctctgatctcgccggacacggattcaaggaggaaggctaccctgttgtcgactataagtcagaccttcagactaaaaaataagagagagcaagactaaaaattatagccccatattaatcacatcatcaattttctcgtccaaactttcactcctcttgccaaacaatccgtaaatagttcctaatcgaatggatttctcgataaggccgatggtcgcattttgaaagcttgctcagtttcgatcgcctccgtcgtcttcttcccttctccagatgccctgggcgtcgcaccgccatgagctgagcttgggacaccgccgcttgtcgacgaaccggagcttaccgaacgtgctcctcagctgccgccactcacagtccagacgctccaggaacctcacccgcaacgtctccacgacgtcccacgtcacgtcgtcgccgaacgcgcggagcctcccgccccggacgcacagcttcctcaggccgccgccgcgcgccgggtgcacgacctcctgcagctcctccgccggcacgcgccgcaggtcgagcttcgcgaggcgggggaggagggacagatccatcctcccgccgccgccggcgtgggctgcggcggcgccccaccgcacgctcagcgactccaatgccgcgaacccgtgcagccgcggcagctcgtcgtcgggcgccacgggaagctggcgccccgtgctgacgctcagcttccgtagcagcggcagtgccgcgaggtcggcgaggcggcacggggggatcttcttgccaccggcggcgctggcgaccacgaagccctttaggacctggagccggtggagcttgcagacgccgtggggcatttggtcgagcaggtagcactcggacgcgtcaaggtactcgagcttccccagcgacgccatggacgccggcagggtctcgaggttgtggcacgccctcaagtcgagcacgacgaggtcgcggaggtcgccgatggactccgggagcgactcgacgagcgagatgccccggaggctaaggtacctgaggttccggcacgccgccgccgccgcggcgcccaggacaccatccggccggaccatctcgacgtggtgctccggtgacgtctgccaccgcccgagctggagagtccccatcccccgctgctcgcccagccacgcctcgtccatctccaagtatcgctggctcaggttgtacaccgtgacatactcgccgccgccgccgccatggcggctactaccacgggtcctgcacagagtgacgcgccgtgtcgtgccggggaggcactcgtcggtgggttcgccgtctcggtcgaaggcgaagtagctgaagctccgcgcggccgcgacgaggaggtcccggaccgacgggtggaccctgcagtagtgcgccgtgtggcagtgtgggcggagcatcgccggctggaggaggccccgggagaggaggtcctggaagcacgccttcccggcggcggccgaccgcacgatgccctcgccgatccaccagtggatgagcagcctcctcttgatcgccttgccgctcgggaacacggcgaggcaaagggcgcactgcttcagctgcgggtccagggactccaagacgctcttcaggtggccggagccggaagggaacgcctcgtcgccgccgccgtcgtcgtcttcgccgccgcgggtgttggtcgtcatccgcatcaccttctcctgcagagctgctcgcaccagctgcacggctgatttgatctgctccatgaaggagcagagctcgatgtggtccagatcaagaacgtcatcctcatcttcgccgtcgccgtgaccatcgtcatcaccgtcgccgccgtacctgtgcaaggtccgaagatccatttgcatctcttcgaccatcgtgtcaatcttctgcagccggtgttggatagcagagaaaacatcgattggttcccggcgagctaacatggttgagtgtagacacgaaggggaaaatgaggcaacctgaattgtgctatgcacctaccacgacccctatcaccctatgatgtttatagtctttcaaaattttgcaaaggttggagtagtagatgtttattagtgttctgattttttttttaaaaaaacacacacaaaatttgggatgttgttgccgcggtgctaagaaaggtccatgggcgtgggggacgagcgagtccaggatggctccatagaggttaccagatagcaggttgagcccacgttcctcgtctatcctagcgagaatggggtcatcactgctgctgctgtgcctggaaaggatgggatcaccatcgccattatcgcgccgagggaggacgaagtaagtcgcagtcattgtgctgagggacgacgggtagcgtcggcaccggtgctattgagtgagtatgagaaaggtcgttgccgttacactgagaggcattcatggagaccacccttgtcactgtcagggaggaaggggagcattgccaccgtctccagacgaggaaggaagggggtcagggaaatgacactaccaatgggaaatggtacggtggaacaaatatccacgtcatttttgcattttcaatctgttgcctttgtcagggcgtctctaaaaattggaatttttaaagtaggcaaggggctgccgtgaaatactgatgacatgtgtgatgccttcactcttcaacctagacgaatcaagagacatgacgagaggcaaataaggaaatgaacatatcgttttgattgtctgaattaggagcttagcaactcactagtcaatactcaggatgatcagcctcacgctaatgcccaaacgtgtggtggcgaagctgcacttgggtgctagccagatgaaccgtcgagacgtcagtgcagggcatatgcatacagtcaatgaaccacatagtcacataggggtgttaccgtatcagatgggtatgatttgtgaaggcagcgccttagcactcatcaagctgggccgatgggttttgctctcttcgattttgggcccccaaaatttctaggggccctattccatcgctcagttggctcaccctcttcgacgaccatgatctttatagatattatgaaatcggtatttgggtatcatatttggatcgtggagtgtcggcttacaccgacaaggtatggtgtgcagatggatacctgatcttatctaatattgtgataccatataaatcctaaactacacacgttgagagatattttctctgtcctaaaatataagtattcttagaatagtgacaagttaaatatttttaactttgactattaattaaaaaataaaaaagatcaatcatataaaattgatgtaactagatttatcatcaaacaaactactatcatactccctccgtaaaaaaaactcaatctaagatgggataagacatattctagtacacagaatatgttacatcccatcgtaggttaggtttttttatagagggagtagtatgcaattattttcatttaaaatgttttattattatagatattgttggtcaaaataacatctcgaagatcgtgtcgaagtctaaaattggttatattttaggacggagagatcatgaacgactctcattttctcgtgtgtttcacgcctggctaaaaattaaaaaaaaatctactcctagcttggcacgtgacctatgcgtgatccgcaaccgctctcaacctccaagagctcgtgagtcgagaaatttccggcgtggtcggtgcccattttggtcagaatcgcacgagcaaagcaacaccccccaccccgcctgagaaatccccacgtcaacggcagcaaccctcccccctcgatctccgcctgtaatcttcgattcgtcgccggcaaccgccgcccgccgccccccgtcgatctccaaccgcagccttcgccgtcccgctaagttggagagcagcacaagtgctgctgggagccgcttgggggaagccggttcgggcgactgaacgccggggagcgccgccgccactcgctagctccggcctccgggggcaacgccgccgagccacgtcgccggtcaggtatatttcggtttttctgaatacggaaattccatcaacaccagtatccaagcttaagttaggcctcgcaaatatttcaatccagggatttgtgtgccgcatgataacctattagtattattaaaccatccttccattgctctaaaatttgagctctgtattggtcgatgattccacgaaagctcattggagcccccccaatgacccatgttaaatccacccctgattttagttcatatgctccgctttatcatttttagctaaagatgcatcatatggtagttcgttcgcactgtaatgttgcttcgcctgcttgtttgattgagtggctcttcctgtatgcatgtcctaaacaaacaggcaatggatatggatgatatgctcggtggcctgcgtgttgccggagtgccgaccaagagcgcaatttacttatgggggtataaccacagtgggcagacggcacggaagggcaaggagtgccacttaaggatccccaaaagcctccctccaaagctattcaaatggcaggatggcaagaacctcaggtggattgatgttgcctgcggtcgcgggcacactgctgcggtcgcttctgatggatcgctctacacctggggtaggtcctttatttttccttctgttctttaaatcagactcgaataatttgctaggtgaatggatgaaacttcaaatgaatttattaataccattattgtttatactgaactttgatagtttacttattatgtctcgtgtattttttcctcaatgttatgtcagcacaggcatttgcgtcagtgataaaaatactattatgtctgctcacactatttataagtcgtatcagtgttacaactttctgttttctgacataaccatgttgtatgtgtagtttagttaaaatagctatatagtttctaaaaggatcacagtactccccaagtgtacctaattcaatactaggatataaagtgcttagtttagtgagggttagtttgcaaagtcattttatcaattatagcgcttgagcgccagagctaagatgagttaattctgttgcacccataacagtggttttacttgttcctgaagaaaatcactcacatccaacttaaaaatatgtaggggcgaatgattttggccagttgggagacgggacagaggagagtgcaaaggaaccccaaaaggtgaaggcactggagactgaatttgtgaaatcagtgtcctgtggagcacattgtacagctgctgttgctgaacctcgagaaaacaatggcactatatcaagaagtaggctctgggtctggggacaaaatcaggtttgcccctcatatgattactgtccaatatgtgtgatcagcaatttatttaataaaatattcagcacttgcggtatccatgcagggctcagattaccctcgcctattctggggagcttttgcaccaaatacggtaaatttggattgcactgatctgttgttctttttgtgtgtttctagtagatatttatgagatctaaagtttttacctagtcagacattgcaggtcatcgatgctagtatttttcaaactcatcatatttaagtaatcacccatagtcttcatttcctatttatgtgttaatcttttatccctgtttgctgttgatacctgttatgccatggccacaatgcttagatagcagttcaaatagatgaactcttaattagttgtgtcatgtgtatgttgatgtaccttgggttaactgttacagaggttgtgtacatgcatgcatccaggagtccaaattccatagctgttactattcctagagttggttagtgccttaagataattaggaataagagataagattctaattaggaatatatatcatttgagttaatagaggcaagtgaagattataatatttctatatccttcttcatgttgttcctgactttctatatgtgacatccctgttgatgtagttccctgcaaccagctgctgggaagaacacgtccattgatctattgctactagcttataacagctaccttctcacattgaccacaaagtaaacacaataatgtatacccgcagtctgcattaagataaacctgtttagatttcaattggatttactctggcatattggcatcgtataccattgcctttatggtttgagtaaatatgatctaatccacaaggtaatgtatttgaggaaatagaatccaaatttcctcacgaaaattggttctataccatggaagatctatcttcaaatttaaccaccgaagttcactagtacactttaataccataaaaaattacaatctatttattgttgtttaccattccttcatattgcaaggatagaactgttaaaagctgacatttacccttaaatacaccctcacttaaccactttatctgtgcacgcatgagttttggaatcatctgtcttcattagctaaattggcagtgcacaaatgtattcaggtgtacaaaaccaatcatccaacagtaacaatcacaattatatgtgagattgcactggatggatgcacataggcatcgggtgcaacagagcagtcaaccatcacctgcgcttccagccagttcctcagccttcgctgcttgagccttgaggtatcccttccactatgattcccctcccagtacctcctaatccacatccctcccccatctcccttccctcccgctcattgcagccatggcaacctcaatctcgatccctctgcaatcatccagcaattccccatttccaaactttcaccctcttctccttcctctcctcccatcccttgttcctgcaggccaagtagggactgccccttagactaggtgcagcgctgtattgactggcagagagaggtggcattaaatgcaggagcagcgccatagtcagggcagcaaaggaggatttgatgctatggacagatcgaaacaggaggggaaaaggcggtattctcattattgaatttgataaaagaaaacaaaacaaacattagtcctaacagaataaggtgaaacgatatgaataaatctaaaaattaggaactttggatggcattaaaatgtaccggtgaactttgatggtaaaaatctaaaaccaggatctttcaatggtttagaaacaatttatcaaattccttaatgcctttgatgattctaaaccccatttgaagctgaagtgctcaacactgagagggttaaacataatggccatgtttcttttgcactagaatgcagccgttgctgccacagctgcagacacgtaatactgttcgggttggctgcactgcatctgaaataagtgcagctgaacagggccaaagtctttggagttacatttgcttattgaccaagaactatcctgtctgtgcccccaatatcctaataagctagtaaaaactcccggcatttgttaaataaaacaacaagcaaaagtggatgtgccttttttgtgcattctaggttctgcattctatgtgtgcatgcatctcatgtttctctgttattctaatgtgtacctgaaagtgtatttttggtcatttttcacttgtcttcgtttcagccacaaacttgttcattcattaatgaaaagtagatgcatatgcttgtttcttggctctacagtctgcatctacatgtatctcctagcattataagctgatctctaaagaaactgattggaagtagaaaatcaaaattgtgtcaggtgcacatctacagttggtttaagagaagtgaacaggttgctatgtgtgcttagaatgccatttatttcactatttgatatttttgtacttatgaattgcaattacttgttattttcttaacttgagatttgtgtcatgaattcattcttaaagatactggttggatgtacttaatatcttccatatgtacacaggtgatccatcaggtttcctgtggagctgttcatgtcatggccctatctgaagatggcctgctgcaggcatggggtaatgtgcaaaactaaaactcatttccatcctctatacacgtttttaaattgtgaactttttatgcaactgtgacactttgttaatctgatggataattggtcaatcagtagtgctagatcgttaggctaatgggatagctggttacgtgatgatatttcttgcaacaccacacaaacaagaggatataccccccaacttttttagttgttttatttctagctattaacaagatacatgcaacttttcttactaaccaggctataatgagtatggtcagcttggcagaggttgtacttctgaagggctacagggagctcgtgtattaaatgcttatgcaaggttccttgacgaagcccctgagctagtgaagattgttagagtatcatgtggagagtaccatacagcagctatatcagaaaatggggaggtgtaagtcatctcaaaggatgctgatctctgctgttggtgacagttatgtggtttctcagctgaaaaaaaaaggattgatttatagtggccgaactatatagtgctaactgtaaaaataaacaggcaaatcgtctctctttctgtccttttttttggaacatggcacagcagaggaagcccctgcagttagcttttcattaataaaaaagatactaatttacaaagtagaagtaaaagaaattgaagttacagggtcataatacagttcaaaagttgatctctcaaagtatcattaatcctaaaaaaagaagataacaatcctccttgaaaagcattgacaagtcaaaccaacttttttttttcaactgatgacttccttcacactccctttgctgctttattaagatcactatgtacgacataatatatgtgattttctaattatgtagacaccttctcaccttctgtgaacagaaaatgtgtcatatgcttataacagttaaatcatggtattacagaaaataattatgtagacaccttctcaccttctgtgaacagaaaatgtgtcatatgcttataacagttaaatcatggtattactgtacttaaatggcttgtcaggtggttttgcgaattatttgatttgctagtctattttttttatcatatgctcgctttgtttccaactagatgtcagatgtcaatttataatgcatgctaccaaacctttaaaactttgattagtaaaatatacaaaaaaaaaggatccattacatggtaattgtattagtagacctgttaaaattaatttcacaccattgcattgtctatacttttacaatttttactaatgtatagctataaaagaacgatcaagctgtgtccatgtaattttctaaaaaaactattgggaacagagtgcgcgttacaagtattttgagaattttgttcaaatccttcatgtgggttgtaacagcttattttatgccttctattgtggaacatatgtctaatagactaacaggaacatgattgtttctttttaatttttttaaatatcacctaattttgcagatatacttggggactgggaagcatgggacagcttgggcattgctctcttcagtctggagataaggagctgatcccaaggcgtgttgttgctcttgacagaacagtaatcagggatgtgtcttgtggtggggtccactcttgtgctgtaactgaagatggagccctttatgcttggggtggaggacatgtgggacaactgggcctaggacctcagagcggtttcttttcttgtgctcttaatggatctgatatgcttcttcgcaacattccagtcctggtcataccatcaggagttcagcttgttacttgtggtcattctcacacccttgtatctatgaaagacagccgcatatatggttggggctataatagttatggccaagccgctaatgaaaaatctacttatgcttggttcccctctccagttgattggtatgactctcagagtaatattctttcatctgtattgctatttttggtagttaattacagtatgaactttgaactttgcacatttcgcaatcctcagtcttaacctgttctttttaataatataggtgtgttggagaggtaaggagacttgctgcaggtggtggccattcagctgttttaactgatgcatgttctctaaaagaactgtgtgagttcaagctagcagagacagttaacatgtccaatgctcttctaatagaagatgttgcatcgcggactggtggtgatgccttggcacgtctgtgtgagaaattgaggtatgtacactgaaatttggagtcactaatgtttcttgtgtttcatatggtcaagtcctcatgcaatctgttttccaggccagtgagaaacattggtaacataaatcatcattagtgtgatcttagttccatgtgagagtttccatgtatctcggatatgcattctgcatagttgtctcaattattgaacgagcataaaatccacagtacatactaactttgctttcgctgttttcattcattacattagcctattagtttctcctctctgctactgattttggcatatttacagggagcatttggttgagcaaggagagtgtgagctgttggaaaatcaaatgattgaagaggtggaggctaaagcctaaatactctagtgattcatcgctccttcgtaggcattgattgaagcattaatcgtcttgttgcacttcatatgaagtgtgattgtagtgtctggactgaaggctctaattaattgtctattggactgtgaagtcccattggtgtctccaatgtgtatcaaagaaatggggactacatgtatgttgtatgtatcatgagtgactgttgttgtagagaaccaaataacctttggcaacttgagagctgtgctttgtcactgaaactaactgtaagattgagagttgccaggtcatagtagtgtgattcatgtctggtctcttttgttaactgtacacgttggaacgctagactccggttcatgttctcggctatgctgtggtttggtcctccgaatattaagcttttcactaaactctctaacaacaaagtcgttgtagtatagtggtgagtattcccgcctgtcacgcgggtgacccgggttcgatccccggcaacggcgatttctttttccctttctttgtttttttggctgctggcaacggcgatttctttcctttcccttgagattaacccacgcatttcagtttcactacttctgtagtcatcttttttattaagttatttgaaattgggattaatccgcatttcaatttgatttttgtagttcatctgtgctcttttacaatgcttttcaatggagtgttggttagtcgtgtgatttctgtctctcctgaggatttggaggaggccgtttggtttgtgacccaaagtgaaccatgcttaaaacaaatgtcttcgggaaaagaaaaaaggcattgttaaattgccactccttctgtcgtagaatatagcgatctaccattggacaggacatattctatattacatgataatatattaacctgtcaatatcggtagtttttataatacgtccaattatagattgttatattatgggaaggagggagtgtgccatattctctcgcatttcttactgtcaaacacgcagctttgccaaaattttgatctctttacagctcaccaaataatagcttagctaatctcaccaaaatattggtaacagcctagccagtctcaccaaacttttgacaacaatccaaacgaacacattttaccaaaggtgcccattcgctatgagttttttaacacacccgattttgcaaattccagttccagctagatgttccaattgcagagacgtgtaggcatttcaatgctgctgctcagagccccattggttttcctaataaatcaaagcaaaaatttaaatttaagtttggagttgatcttaaaatatgttcacttttaagtcgctaaaaatacaatttttttgtttataaactattgttattctctaataaacagttttgacttgttagaaaatgcaggcaaccaatgagggccttgaccattcgtccataatgcctacgaaatgatttagaaatataatatggtagtgcatacaattctcagaacaaccaacaggtatagtgatttgcaaaggttattaaatacaataacaccatttagcaaccaaagcacgactatcaaaattacatgataaaattattattgtcttgaattatgtaaacgatgataacaaatccttttccagctacaaaagaaccagcataacaacaaagaattataaagttgcttaagtaatctctcccttcatctcaaaaagagctatatctagggggcctaggccacagcaacactttcacttaaagggtactttccatcctgcgacacacaagctcccaggatcaatctacttggccttgccgttctcgacagcagcagtcgaggggttcagctcatcccaggcctcgatccaggtgaccatggcatcggcaagcttgacgaagtaggggtcgatcttgccgagcttctccctgacctgctcggcgagggagaggtagcacttctggacggtgtcgcactccttggggatggtggcgttctggaagaaggggatgatgtcctcctgccagaagatgcccttgtattccttcttcaagttcacgaaggggttgctagccttgctgtgccagatgtacggcagtccagtcttcactcccaggctcaggtggtcacagatgacctaaagtttcaagaattaatattaattattattttgtgaatggaatgttcaactgtgcaatgagaaaagacatatcatgtaatagattcatggtaatgacttataacttttcgacagaaacacaaaccttcatgcaccatccagcccacatgtcgtcgtagcgaccaataggctggccatcacccatgagaccaaagtacattgcaggaccgatgagatcacggtcaaaagcaaggttcatgccacacatggggaacaaggttcccttgggcacagtcatgacagcatcaacatacctgaacaaaacaaaaaaaaacaggggtcagtaaaacttattgatgcaagagaattgctgctgaatatcagatcagtcaaagaacatgcagtacctggagttcctctcacgaggcttgaccatctgagtaggagcatcatagtcagggatgttaagccacaggccgtgagagacagcagtcttggctccctccctgaggctgaaggggtaaccacggacaaagtcagcgccttcgcggtagggatcatacaaggtgttgaagaagaacggggtggacgggctgaggaggttcttgatgtgctgctcaagagcattgatgtccttgccagatgggtccttggcaacctacaatgccaagtcattcagttggtatgagatctataatgcaatgctaccaattgaaacattattacatcaagctaagctattaccattaccaatagaatgaattcgatcgcaacattactagaaaatgctacataagctttgaacttgaatggaagatcaaactggttcttaatatatttgattaagaaaatgttgtggatctcgcacaggagagagagccaaaatcacatcattatgtcaatttcatcagaaaagtaaaaaagcctgaaattgacctcaaatgcaccctcaacttggatcagatctgaagcaattatcccagatctagcgataccaaagcactctgataccgtttggttaatacttgacaaactgaacttgtcacatgtgaagcagacaagaccgcgtaagataagacgaactcccctaaccaaaatgaaaaggacccatctaatgacaatcatttaactaaccaactaactggcaagatctaacatcaactagagaaattgaggcatgcgtaattatcatatactaataattttaacaacacataaagccagaaaccaaacaaaagtactaatccttttcgaacactgcacctacctaccaaccaaccaaccaatgtgatctaccacactagctgatgctcacgctcaggtgaagcaagggatcaagatccgccgatgcgagatccagatctgatcaggccagatctggccaattccgaacgaaccggacccagatcccgggcttcccccaccagatccacgcggaattccgcaccaaaacaaacacagagagatcgagatcgagatcgagaggggaacttacgaagcagtcgtcgtcgatggtgaagacgtacttcttcttggagaccatgtagccgaagcagcggcatgcggagtccttgaaggagatgcaggaggccttggggccgaggatccggttgatgtcgttgcggttgtagagctcgtagtcgaagccctcggggacgcggatggtcttggtcgggtcgccgtcctgcacgatgatgaggtggtagggctggaagaagggccgccacatctccaggaagtccaggttgcggatcgtcgggatcacgatgtccagctcgtccttgagcagcggcgtcgacggcaccgacgccgacggcaccgtcaccgtccccgccatgatctctccctctccctctccctggatctcgcgcgcgcggaggaagaggaggaggaggaggaggtgatggtggtgaggtgtgaggtgtgtgtgggtttgggtgggtggggaggaggaagcgatttatagagcgggagctccgggaggacgacgactttgttattcgtttccttctttgctttgcttcgcttgccttgctttttttttaaaaaaaattgtgtataattaattagataggagtattatattattttgtgcctattttgttttggtttgcgtcatatgtttgccgaattttgggatgcgtccaaatttattttgggttggatctgggagagacctgtcggtgcatggaaagagagaacgtgtgtaccagtgtagaaggtttgaatttttattttttttggtttgttccaagcggtggataaaagataggggtatcttaatatcgtttttattggagataaggggtaaaagtgttaaatcaaatgaaatgcacaatagtggcagtggtttaaagctctgcttatctcaaaatcaatggaaagaaacggccgtttcctaaaatagaaacaaacaaatactccatccatttcaggttataagatgttttgactttggtcaaagttaaactgttttaaatttgactaagtttatagacaaatatagtaatatttacattaccaaattagttttattaaaataataattaaatatatttttataataaatttatcttggatattactattttttctataaacttgattaaacttgaagaagtttgattttgaccaaagccaaaacattttataacttgaaactgagagagtaagagtaagaaacttattttgtctatataatatcacttccaatagatgtttttttaaagcttgcagtttcaattggttacagtttctcaaaggttaaaattcctacttttatattaggtccgaggcattacgcaatgtttgtcttgataaaactagatatactctctactatatcttaagccgctacaagcgactcaacatttacaatcatgagaacctaaaccactattaacgcctcgtcatttactgttatggagaacatgattactattttatgaacaattgttactaaaatgacaacatatttatagttgcgagatatacttacaatctttgtgaggatacattttactattttgtatgaatacatttatgctcacgagggaagaatggtactattaccttgagctctactaagcacttactatttgcttatttgtttgagtatggaataaaatcgggtgcaatagctatggtgactgtaactttgatggtcacaagtgcatgcaaaatgaatccaataaccaactttccgtctcatgcgagaaggtgaatagcgtcgtcaatgatgacttcaccagcacccgtaacttccatctctctaccagtgtcgaccacctccaccgctaccacgttcaacacggagcacatctccacaaccaccgaagtatctccccgtcgaattccaagttctttgtttcgtcgtggagattgctaacttttcacgctcatgtaatcatttgcaccaaacattgcaattaatcgagctttaaaaaatcgggtgcagtagctatggcgactgcaattttggccaatcactatgatatagagcatgcaaaatgaatcaatgttattttttaaagcccgcagtttcaattggttacaattttttttaaggtttaacttcccaattttattttatgtctgaggcattacgctacatttgtcatgttaaaattagatctaatctctagaccttaagccgctacaagtgcaccaagatttacaatcatcggaacctaaatcactactaacgccctgatatttaggatgacctaatctaatctctgtcggcttggcggcatgaatctctcactcgcagtcttcggctagcatagtgatgtgaccatcaagtatatgcatacaaacaagcatgagaaatataaaacaatgccaaagaatacatcggatgaatggaggatctacaagatatttgagtctaatgagttttggaatccagttcgacctccaaagacaacactgacttcaaacagacctagcgccttcatgtcaactccgatttgggtgatcttagacttgatggaaagcttatctcatcgcctttcaaatgtatccggtttcatatccaaattcatctcgagtcaacaggaatcgtaaaaacaagacattattgttgctgaaaccaaacttgggccttctaatagactagctaggcccatctcggaagtgtctccctccacctccacgaattagcacttaactctagatctattttcctctgtaaatgtctatgtacaccctctggaacaattgggtttttttagttgaattttggcaagtgccattcaccttgtctctagtgctcgctcgattaatcagcgagtatagatttagagcccccaatagtgggtgtgttgatttgccgggttgattagatctatcacttcaatcgcaactattactttgtacttaatcacctattcgcaatatttagattgcatcttatcttgttcttgcagtgttctctcgtttgcattgcagggatcatcaaccacgcgccgcggttggtacgacatcatttgtagtgtagcgattgcacagtgtcctggatttgttctggttggtagccacgtgttaacagcgaaatttggtaatcggcaaagacgtcatcggcttagaatcattatcggctgcagcatctcggaatcagccgatggaagttatcaagtcgccaatagtcggattcctgctatattcggttaaggaaatcaatctactaaaggaagcttatccctaggtgaccgagtttaaagaggatgtggcatggcagtttatctattaattaggaatagtttgttagtttccttttatctttaggaaagtgtgtttagtgtccgataaggactttatatttcccttttatctttaggttagtttctttcttgtccgacaaggacttgtatcgacccatgggtataaatatgtacacccggggtctatgtaatttatcttcacgatcaatacaattcggcgcatcgccaccttttaccttttctactttattttatcgtccggcgggacttggcacctgacgcggggctgcatcggtgttcgatctccggcgaaggggtaagtccaatgttccgtcggcccaggcaattgtatcgtttacgttggcgtcgttcaaggctgcatcagtacattcgatctcttggattactctggtttggatgatatatttgcctacctatttatcatatgtctatgttaatctagtcttaacatatcaatttagctctatcggttgcttctcgttttagggtttctgccggtatcggctaaatcgtgttgctagattagattagcttagacatctaccaccctgaaaattcagtcaacggcttgattgtctagatattatgtttctttttatacttagtgctgcatcagttaagtttgatctactaagtcgtgcttagaactataatctctagcctgcctcttgattgccaataagggtttcatcggggtttcagccggtgagttatctggacgttgcatcggctcataaggattgcatatacatataagttggattttagccgatgacaacaaaggtttcactgtttaatctaatcttatggatttcatgatatcggacctccagccgatgtgtgctttaaccctcggatcgatgcttatttattatatcttgtttctagccgattggtttctacaagactatattgttattttattatatcatcatcagccgattgcctttatatcattatctacattggacatatagccgattgcttaaaccctatcgctatcggctggtatcggcatcggctgttatcggctatcggctggaactactccatcggcttgtcagccgatcggctgttttgatctactatttgcatatcttgtcagttgcaggatcaaactgactggcacgcccgcatctaatcaatctttggacctgcacaggagctaagcagatctctcaggccggtgtgttcgattttttcgtcaacaccacgtcacaaacatcgcactcgatcaaagcgagagttatcccctttaccggaagatcgggccacgagagagtgtcatcacatagtcttcttcctcgaacatgaactcaacgagattagaggtagttctagatccctcgtgtcagcctatgttgctcctacattgggtttatctagatctgtattggctcgtcttccattggcgcagctagatctgtctagatgtgttggcgcgttgcctttgctccctcctcctagggggccttgtatttataccctcggatgtcctcttgcccaagtaaaactagtgagacaaatatggatacgatccgagtagttcttgtaatgctagagtagaaccctgcttctcctttccttatccggaacacctttctactcgatataaataccacttaattttcctccttgcgatggctcccaaagcatagtgtaacctattgctgctttcttctaatggaatggcgtgttgcgtgcaaccttttatgtatttgtgaaaaaatgtccttgctataaaaatatcacctgtaaatgaatccataatccatcgaggttatcgatcacattaggattgtgttctcccccttctttcccaactcatctccctctttttacgcacacatgctttttaaacggctaaacggtacattttttaatgttttatatagaaaagttactttaaaaataatattaatctatttctcattttttttaatacttaattaataacgtgttaatgggtaacactgtattccgtgcggtaaggtggagtttccataatgggcagcactgtttttcgcatggacggtgttgctgtttaagattcacacagaagggaagggaagggaagggaaggaggtgggcttggggttctcatcaaagaagatatgacgtgaatgaaagcaacggtaagctggagcacaattaatatatgctcatatactccgtatgtatatggcatattccgttggaatctcttcgtacataacttaacagggtgaaattggatgcgttgggatgaaatcagatggatggtaacaacagggtgaaagggcagggccggatcggatcggagctggtgctcatgattttggtgagcagtggaattcaattgagagcaacaaggtttgccgtactcagcccggtgagacgtgagtagcaaagaagcgcgcagctagcgtggaatttgatttgacccagcttagctactactactagactactccactgcctgcctcgccttcacctcacctgtgtgatttgtgaatgtgctaccgtgaccgtgatgaagggaagcagtgagaggttggcctggtcagtggtcagcacgtcggccacgggccgccagctagctagcgcccagatctgttgggtttctgtacctacccggtaattggtgcgccgcccgctccgctcggttgggtcgcactcgcgcacgcggttaggcgtgccgtatataccatacacacacgtaggtggagtacgcggttaggcggcagcaagcgagaccggggtgtggatcgatcacatcgcgcgcgatggaatcttggaatcggcaaggggtcaggtcaaccaaccatgcgcctgcggtagagagacttgttccactccactctacgactcgacttttccactcaagccggtgtttctttttcatcctatcataggaacgaccacatgtacagattattgtaggcacgcatagcacactcgaacaaacgaagacactcgctacttttttttttctcttgcagtctcactaatttcctactaataataataaataggaaaaaaaccaaattacccgtgaactatcgggtgattacgaattactccctagacccgacaatcggtcatatttcatcttcaactattattaatacaaaatgaaaaaaccctcaattttacggacggttttggttctatgtggcattacaatcaaaatttacttttagaaaaaaaaatgatgggatgaacatgtcatattctacctactatctgctctttcccctccgacggtcccacctctctatctctctctatccctggccgaggagccgtggcagttgcgagcctcctctcgcacgtgctggtggcgcctacggggctccttgcacatgcaccgacagaggccgaggaggagaggcgcgagctgacggaggccgaggaggagcagcggtgaaagctacgagccttttcacgtacgtaccggcggaggttgaggaggagcggtggcggctactgggctcctcgtaacgtgctggcggaggccgaggaggagcggtggcggctccgagcatccttgaccgcgagaaagctcgaggcaacagcgggctcgtcgccgcttgcacgcaatgtcctactccactgatgttgcaatccatgccgccttctatggccccatcggcaccatcctcatgaacgaggtcgacggtgcgagcgatggctctacacaaatcacgccaccgccactggcaacgaccgccgctgcataaagcatgattttgtcccggctgctccaatctccacccacgatgacggtggcatcgatgtcctcgaggcggagcttcagcaccggcagagctgtgcctccaccacagacacacacatagagagagagagagagtacgctgggagggagattggctcgtgggagatagataacaagtgtaccgtacaattattattattttctttgttgactggatttccatgttgacgtcatttgtgcaacatcatggtcaaacccgcccaaaacagtgttagtggtaatttatccgatattaataattgatggtataaaatgtccggtatttaagttaagagggtaattcatactcattcaatagttttaatagggtaattcatacttttttattattataaataatagaatcaacgatttaattctttctatgaactaaaattgggttgttcagctgtgctgcacattgctgcgtcacaggttgatataattaatagtgtgtgtctaatgtataaatacgtgtgcataggacatgtttaatggtatacggagtacaagattattaagaccgcgcgtttttagatgagatgataaaaacttaactattaaaaaataacactctaattactattatttcatttttctttttcatcatcatacaatggttgtttccattttatagaggcaagaatcgagccgttgttaagcataacaaggatgttttgtctcaattctatctctttctttcatgtcaacaaatcccttctttctataaagttaaggctaaaagctcaaacctcgtgcttccacgtcatcatcaaattgtgaaccgttggatgaatacattagatcacttctcagatgttatatggaatgcagcataaagcccaacccattagttaccaggtaagtctcttcgcctcctcaatgctaaatgtagcctacatgaacacattggcccatctctatacacatctacatgtatccaacccgtcaatccgtataaaagagctttatggctgaatgtttcttcagttgacatgtgctacctaaattatctataaattttggatagggctgttaaaaaaaatttctctaagaaagctatttgtttcttcttgagattgtacctcatatctaataaattgatgttaactaagtcccgcagcaacgcgtggggtatcatctactatttctaataagcaagactaacaaccctttattaatgatcattgtacatttacttagcacccacacaaagccttcgccctctgaaagttttgaactttccacataactttttacatatgtgtattttcaatagaactttgagaggaaggctttaataggaattatggctagaaacttaaagtcttccaatgtacaaaacttggttataaaaatgaaaagttcctcctgttcatgggcatcgtaattatagagtaattatatgaaagttatactatagttatatttgaaagatttattctgatactccctccgttttatattacatgtcgtttgattttttcgtagggaaaattctttatgtttggccaagattataaaaaaaattagcaatatctacaacaccaaattttcatgaaatctaacgttaaatatgtttgattttgtattgaaaatgtaagcataatttttataaatttgatcaaatttaaataactttgattacgaaaaaagtcaaacgatttataatatgaaataatatggagtagtagattattcatgagaaagactatcaccagatttttagatatatcctataaaaaaaatcttgcatgattttggtgcctaattgtacaacctttccaaactaccttgactctgcctcaccggacctaactacaacataaatatccctttgactcattgccaagcccacgacgtattgtgttctctctctttaaacccaaatgaacatccctgaccattttaacccaaacactacatcatgaaccatcattatcgatcagagaagaagtgggacgtggccgtggactttgtggtgtggagatgaagaaatcctattgaaatgagaagtggaggccgtcgaggacatgaaggaatattaaggcacgcacgtcgtccgggagagccggagaggtggtaatgaactatactccctccgtcccaattttgagtttttatttacaatgtttgaccactcgtcttattcaaaaaatttgtgcaaatataaaaaatgaaaaattatgcttaaagtacattggataataaagtaagtcacaaagaaaataaataataattgtaaaattcttttgaataagacgaatggacaaacaatacaagcgaaaacttaaaatcccttatattataggacggagggagtaactaacaaggtcacaaggtgcaatatcaaattataggacttgcagctaattaagcttgcttctagtttagccgactgattgatcatgcatcagtaagtcggtattagtaccgtgtggtccgctaatcatcatcatcatcatcatcatcagcatcaacaacaaccttgtacggagctgaatttatgcataccagtagtagcttgttgactctagctcgatcgatcaccaattcggtctaattatttgattttttttgttaataatagtagttttattaaacccagctaaatatattgttctaataacacttctagcctctccaccgtaacagtgcaaacaaccaaacacatatccacacactaagaagataaagtcaatagaaaatcaagagccatctattcgtaggctagatcatcacctatgtgttggggtaaaaaaaaaacttgtttacatgcttcaattgtagacaaggcgtaatgacaaaaccctatagctgggttctcaagaataacccatgactggaggcaatgtgtaattagaaaataatctacaaaggaaaataagcattttttctttaaaaaaactcattatttctcgagagccaattgcaccaatgagttgttgccaccacaattagaataagagatctaagctcttgagtttgtcaccaagcctaaatatacgtggcacattacttggcgaacaaaatgttcaatgcaaccaagattaaagatcaaaccaaccgggctaaacaacattaaaaaacaaatgttttattatttctttcttatgataattcttattacctttctaatgttttattgatatattttcttgatgtaagtaccacaaaaagttctcattttgagagaggctttaacttacatatatttctgttaacattaggaacacgcgtatgtaccaacacacgctaatgagatttagctgagaatctcctattggttgttagtttctatttaaattcatcttgctcatgaaacaaaacttattagcgatgcaggtaaagagatgattatgtactaccaacttagagccatcaatatctcaatgccaagtgaagttaaaagggattgtttggaaaacatttgagatggtcacatgtttatgtcttacaaccatgtagatatgagggtactgttctcataaagttgtattacctaatcatttatcttccaaaaaatcgaacttgagtgctatccttacccgtagaagaatcgaacttgcaaacattagatttggtccaaaagcatgaatcctcatgtttccattatacttgaaatagagtttgtgatcccatatatttgttgcgcaatatttattgtcacacttcattagttgtaagtaacttaaaaaccatttgaagaagggctatatttttaagttctaaatcatgaatatccaaaaccccttaatctttaggacgacacaaaatgtcccatcttgccaattgttggtatttgttattgtcacagataaatccataaacatatggataccactacaacacttcgcctcggagtattccaagggtatcgaatcatagggaacgtgtgtatatctaagaatataatccaatccaaggacaacaactaatgataggcttaggttagagaggattcatatggtttaattaactagacataagttaaaggtaaaaccctatcgattgctttgggcaccagctctcctctggtctgtcaagctgagtcagcctgtagctatgtacccgaacatgtggagggatacaaagaacggacatagctattaccacctgccgcctacttcattttccgtggatcacacaacaaatgaatgtaaccgctaacctagacatcatgcctaagttattgattacaactcttgtctcgctcaggaacttcttctttatccaaattcctagtactagagcacttaatataaatactaagtgacgaacccgcaatgatgagaatatatctcacttaagaaaataaattaaataccaacaggaaatctcaaacacttactttattaaataagcattcgtcgaggtacaagaggagaatgttgatagcttcggcactctttcaaacctttcccccactattctacttattttctctacactactaaagtgatgtctaaaatataaaagtgagttatactctactttattgtgtgttgtgaaatggcttgagctccttcttttatatgtccatatgacggttggaatggcagttgtgaaggccagtgcacccacaaccatcattaggaggtgcacctggccatccacgttgaaggtggagatgaggggcccatatgtcagcccctagaggaaagcggtggagacaggtagggcccacattttcgatcgaaccttagtttttctttgttatgatgcctcttagtttttccttttgttttctcccttccctccttggatcaggctcctctaccttcaaaatcatttaactttctcatataaagacacgatgcatttaaagacagaggatctcgatccctctcgtgacggtcgacaaatctagacccgcaaagataaacacactgttgagtttactagtccaccgtgctagctagctaggtgtcgcgttcaactacttgtgatgtctctggagatcatatcgctaactgatcagtactaactacagtattaaccaatagctgctactctgtccttttcatacttttcatattataagtcgcttaaacttttttctaagcaaccgatcaaatttataaaaaaaattagtaacatctacaccactaaatataacatgtttcattaaacataacattgaatagatatattttgttttgtattacaaatttgatacatttttataagcttgattaaaatttaaatatatgataaagctacttataatacgaaacagacgagtaattaattacgatatatacatactccctccgttctataatacaagagtttttgaagggatgtgatattttctagtgctacgaatctagacagcctctttgtccaaattcgtgatactaagaaatgtcacgtctttttaaaatcttttatattttgggataaatggtgtagtacatatatagtagtgtaggtgcaagttacattttcggttgagacaaatatttgctgggatacgtacactagtagtgctccttctatatattttatattcatcatcacgtaagtataaaaatgtctttttaattgatccttatataacctgacccggtccttcacttaacatgcagtattattatatctatacatacatgtaattggggtattagttaagaactcgttccttgtatataggagagttaaagtctgcttgtttcttatactcacatcaaatgaaatacatggaagaagttaatagccctatcgtttcgcttattagtggaataagtcaaatggcatacttataaacaaaaagtaatatgtgaataaaacttttatatacgttttcttagcgttttaaaagcaaatgctgaaaaataaacttcgatgaaaaaaccttaaaatcagccttaagcataaatgaaaagatgaggccttatgttttaagaaaactttgttactaaatatatagttttgcgatacttcactttaaatctatagttatgtgataaatttggtgctaaatatatattttttgatacatctctataaatatatagttttgtgataatttggttaacgtatatgtagttttatgaaatttattgtaatgataaatagtatataatagagaggcagtagtatgctaaggggagaagctatattgtgttttgacgggtgcacatgaacccttcaaatttataatttcacttaaaatcactaaaatatatagtgttgtactgaaattttctagattttcaatgacagtgcaccctcttgttttaatactagcttcgtccttatgcaaccagcaggctgaatgacgcagccgttgaaagtcaaaatttaaagcctcgtaccccagtacaagcagccacgcaggcatcgagcagcgacacatgcaagtgcatcgcgttttccccggcctttttccagcacatccagcctgtgcgcgcgcgtccctttgcgtgccccatcggccatcgccagcccaccaccatcagctgcctgtgcccaagaaaaaaaaagaagtttgcacgactaaactcgatggattgataaaggaagagtattagcttttctttccctttttttctcgcctaagtgtacttattatatctactggtaatagtagtacgtacgatcgctagcctaactaatttggttctactaattaagatcgttcggtcgcagattttgtcatgtagcgcgcgcatcctgtttactgctttgtgacccatgtacagggaattaacgtacagatctgcacacagtcatggattcccgcggccaaactattcctcctcttattaatagtcacatgatttcccggatgcccacccgccacccgcacgctcgaagaaatcccgtcagaatatatactccccctgtactttcataaatgacgccattgactttttaaccaacgtttgaccactcgtcttattcaaaaattttatgcaaatataaaaatacttatatcatgcttaaataacattttgatgataaatcaagtcacaataaaataaattataattacataaattttttgaataacacgaaagatcaaacgtttgtaaaaaagtcaacggcgtcatacattaaaatacggagggagtatatttctattcttttctcataattagttaggcacaaaattttagagcgatttttcaattattaataaatggaaacttacaaacttaaagtgaggagaattttttttgagaaacacggtataatcatagacgcttacaacacgtgcacgctcatatctttatgaacacatatatacactttatccctataaacatctcccaaagactaaaccggtatgtcatgagattgatgaagtcattatggatgtctcgttgttgacaggtacatcgtctaccaccgaaagaataattagccataaatacgagcaccggtgtcaagtatagaacttgagaattttgattacatgaaagacgcgcagagttacacttgcgaatgtggagtgctcctccttaatacgcgctcgaagagacgaaggctagcacaaaaactttagcttacaaaaatactattaaaagcatgcaaacatgtattagtaattgtaagtatcacctactccctctgtttcaggctataagactttctagcattatccatattcatatagatgttaataaatctaaacacacatatatgtctagattttttttggaataatcaccggaggggagagtttccccacctgaatccactactagaaaaatcatttgttggtacgaaaaaaatcgtggcatcaatactaaaattgtggcaatagatgcatgttgccacaattttaaaatcgttgctagccgtggtaataaatagcgtggtaataggttattgcaacgatttttttttgtggtaataaatttagatgttgccacggaatggatatggcaaaaagtcatattgcaacacttcacatcgttgtaataaaaattattgccaccactccatatgtggcattagttttatataccaaactaaaagttcaaatattaatctatcatcctatctattttatctatttattttttttgatattgtgtcttggctaggattcgaacccaagacctatccttcacgcatgctctcctttaccaactcacctacgcatcaattctgttgaaaatgcatatcgttccatttgagcctacgtaactgagatttgaatcatagatttgaatatctaaaagatttcaaatgaaaaggttattacctataaaattatagatctcgtcgagagctataatttccatataaaatttgtctcaatccgtgttcatatgaaaaaattaagttaaattatgagacgataatttttttattgcaacgaatttgttgatcgtggcaacaaaaaatagtgaaaagtaccatgtactatgtaaattgccacaaaaaataaaattgtggcgatagaacatgtttttttgcaacaatacgattttttgtggcgatatctcattttctattgcaacaaaactactaaataaaacaacgattgtatatcgttgtaataaaatataattatttaccacggaaaaattatcattgcaatagtacaatatattgctacgaattattttttgtagtaataatttggtggcaatagctcaattatcttgtagtgatcttccattgctaaagaaagatagttctgagttacagagattgggctataccagcggcgagccattacagattaaacagaagaaggggggaggagaaactgagaataagagaggccaccaccttccccaaagagacaacaaattgatgttaggcacctgcaaaaaacccaaccaaaagccagagcaacctaatgctagcacccaagctcatcaacaaacatttccttatgcagacttggaaacaccagtactcctcgtcgaagggcctttctgccacaaggtcagcttggtttaatagcgaccaaaagactgtggaagtcaaaaaccacccgcatcaagccatcaagaatccaacttaaacttgttgctgcttgtatcagtgcatgccgacgccctttgggggaaggaagccccattggagggagggccactgaaggttgcggccataggccgctcgcatcgagttttctttaatccggctataacaatttcttgcaagttccacgccctccaacgcccttttagggaaggaagcctcaaaggaggaagggtcgctgaacaatgtggttgaggacatgccaaggaaaagagaggagacgaatagggagctagacaagagagaagtggtagatgggggaatccaatagatggaattccaacaactgcggcagcagggaagggctcaagatcagatgctaagccagccgaaagagaaccaccagctctaacaacaagacaagccatcaagcaaggagcaagcctaaaagagatccagagagaggtgaggcacgagcaacacctagatgatggatgagagccaagctggtcagggcaaggagtagcacaggttcggtggctaaagagacatcacagttatagagcgcctcaaagaggagggaggacaggggagggaagatgttgctgggcaaggtcacatttatagagcatcgtagaccacagccgttgaggccacagcccgccgccggcgccacagagccgaccacgagccgcgggtcggcgcaccgccagccggaaccagctacggtgcacaagccgtcgaggccaaagcctccaccgccagccgcagggggtggggggggagacgaggcccgctgccgggcgccacagccccggccatcgcaacctccgcccccgcggcctccgctgtcagccttcgccactgctacctccgccgccggtcgccactgcgtcttccgcgcgcgccgacctcctgtgccggctgccgccagccgccgagtcgccagacgctgccacctccgcctcccattgacgccgcacaggagtagcttgctccggccagatccggcgtggaggcgccagatccacccgtggggaggctggatccaccgcctccaccccgcgtcatcggactctcctccgcgcgccggcccgtcttccacgcacagagatgggacgccatcgagtgttggcctcgctgccgccatcctggctggccgcacggaactccgacggcgcgctccggcggcggcgagggaagggagaggaggagaaagtggcggcggtggcgctaggtttcccccgagtcgcccgcgcgtgggcgacgcgtggggcaagaatcataaggttctgtacgtttccaggtaccatatatgtctagattcatccatatatgtctagattcattcgcatatatatgaatatggacaatgttagaaaatcttataacctgaaacggaggaagtatatatttttgaacttgggatgaagtttaacgaggccacgacagagacggctccaccactgctacatttcccaaaaccggataacttaaaattatatttaatttatgtttcaaactgttgcaagactatcattttgttccattcaaaacttaattttgcagaattttcatactaactatgaattctatacaagtttactgttttaaactaggtattttaaagtcgaactttactgttccattgactcgttttaccatatttgagcaaaggcaacacaagtgtctatcgacgtcatgacgtgacctccacggatctggtgttgatcgatggactggatgaggtagagccagagagctcgctatggagctggcgattcgagggagagtaacttgttactagggttggagtggtaaatggtttaaccttttagcgtataaaatttgaggattggatctaaaatttataacctattcatttgtaacctaaaaattattttagtgctagacagggttgtgaaaaaaaatccatggaccttaacccattactaaccatggaggcacaacttttctggtttctgctgagactatccgttacagttagagcttatttggaacgtaggattttcaaaacatagctagggatatgaaaaatgtgggatcaagtgtgtcatctcaaatcctttgtatgaaaaattacaggaaaattgcacgaataaccatttggatggagcacagaaaaaatacgggaataaaaaatagagatagattacaaatgaatttttttcgaggggtagaacctcatgttaagaattctccaaaatctcctatgatttgaggcactcctaaggaatttcaaaagaatttagggaagccatttgtttgttccaaatgaccatatagcaattttttccttgaaaaaacaaaccctctaaaattgatttgttccaagagagcccttagggaagtcaatggcatcactgtatcgtgttgattgatgctaattatccagtagctgcgtgaggatgaagggtcaaaggctgaggtatatggttcatggaaagatacaataagttaaaaaaaagatagtggctaacaagtaggccatgttttaatatatatatatacaattttctatttgtatgggtcggactgtaaattaagttattcgtactaatatactccatccatttctaaatatttaaagccattgacttttttaaatatatttaaccattcgtgttattcaaaaaatttaagtaattattaattattttcctatcatttgattcatttttaaatatacttatatgtatacatatagttttacatattttacaaaatattttgaataagacgaatagtcaaacatgtgctaaaaagtcaacggtgtcaaatatttagaaacggagggagtatgacacaggctaaaagcgaaaaaaatgaagtgctaacctgtaaaatttacatgggcccattagaatcacgttagcatttaaaaacacagtattctttcatggttgattcgtttgcttttgcctacgtagaggaagggcaataccgctcgaggctttcctgcgttgtaaatgcctgagtgcctacccagcttcctcctcctcctcctcctcctcctcttcgtcgtcgtcttcttcttcttcttcttcttcttcttcttcttctcctctctctctctctctgggttgtcaagagagtgtagtttgggctaccgtttgttggaaggccctagcggtttagctctttttaaaaagttctaccctacatgtaagtgagatgatcactaacaaccgtcatatagaaagcacaaccgccggggagaaaatgatctcaggatcggagccctgtgaacctttttctgacgtacgtcactgactcaagagattaaagaaaagacactgattcaatagtaaactcctatatatatatactctttttttcttaaaaaaaattacactcgtacgcttgctcggtggtaaaggcacaagtccttaaacttgtcttgactctatcatctatatatattcttgaactctcaaatatattttgggtttccgaacttttcggggtgccatcataagtccaaatggatatcaacccactatgcgtattaacatggcatgccacgctggatcctcctcctctgcggggacttggtgctaacatatggatccaacgtaaaaggaggaaccgactgacaagtgtcgctcacaaacttattttttcttctcctattcttttctttttccttgtcttcctatagttcgccaaagagcagatgctgttgttgacgatgagtgaaggacggaagtgagagatcgatgccctccattgacgtactgaggagccgcgggacagaaccagcggcgaccgcaaccgtgaactcattggttacgagggagggagagaaagaagggcgagtgacatggacatgctagccatgggcacagagtacggtgccagggatttcacctcaccatctgcaagtcgtcaagccaaagagatgggggacaacctccaccaccgccagccctcggaggcaccatcctcctccacacctctctccctcactcatctgtgccaccgtcttctaggagggcgataggatgggcgtgtccctccgcgtcggtagcacatcgcctatgttgttcaagatcgaacagatggtgcatgctcgatgcaatcggcgatgccgatgagctctgtgccaagcacctccgcacctccactccctctcctattgatgcctccatgaatctctatgcctttctcctcatgtttttaactccatcacaacattccagttgaccacaagtggaaaggcgctcacgtctaggctattgtcgggcaacatctccttcttgtcaaagctaatagctagggcgccgacttttgtcgggcgagatatcgcctggcaggggcttgagtcccaaggacaccaccaagctggaacttgaggacgggaggcgggtcctcaccaaggtgtgttctcgaatgtgagtgcgatggcatgagggagggggagagagaggcgtgagggagagactgacatgtgaagtctacccttgcgtgggatccacatattatgaccaagtccacaagcatcagcgtggtatgccacgttggcgcacagagcaggttgagatctatttggacttgtgacggtgtccaggactgtcacacctggagttttcccttcccttaggttccaaa

SEQ ID NO: 9571 - DNA, 10056 bp, Oryza sativa
  unsure (1)..(10056): unsure at all n locations
aaagatccctcaccataacttgttcgccgtaattctttacaaactctgatgactcgttagcttcagtattgccagttaaatcatcactactagatactgttccattagaaacagcagcatgctgccatattgtgatgtgagcagcagaattaacattaataatgtgtttaaaaattaaaaagagagagagatcaataggaaacatcatacagttacctcagttgggatgatttgtgcaatagacactgtatcacttatggtaggagttggcttgcaaaatggatctgctggcccagaaacctgaccatatttctccaatattacaccagtgccattccatacaggaaaggcagcagggattggacctgttcgatgttcagaatcctggccatttgcccccaacaatccttcaccggcactgtgtataggaaaggcagcagggcaaggatctgtgtgaggttcagaagcctgaccatttgcccccaacaatccttcaccgccactgtgtataggaaaggcagcagggcaaggatctgtgtgaagttcagaagcctgaccatttgcccccaacagtccttcaccgccactgtgtataggaaaggcagcagggcaagaatctgtgtgaggttcagaagcctggccatttggccccaataatccttgaccaccatcgtgtataggaagagcagcagggcatggacctgtgtgaggttcagaagactggccacttgcccccaacaatccttcgccaccattatgtataggaaaggcagaagagcaaggacctgagtgagcttcagatgcctggccatttgcccccagcaatccttcaccaccattgtgtataggaagagcagcagggcatggacctatgtgaggttcagaagactggccatttctccccaacaaaccatccccaacaccatatgtgcacaaggcagcaggggcatctttcctggaatcagtaagtgcatcatcagtttctagttgatgctcctgtagctgcttctcatacaacttctgattgaaacttgcattgtgaagaacagaaacatcagcttgtgctggagatgttatttcccttcgattgtctggagctgtttgctctgttttcatgggcaagttaacagcagctgtatctggacgtatgcaagaagctttctgtgttgaagctgggtcattgtttggggatgctgcagcttcaagcacttcagtgttgctatgactttttgaacactggtcctgtggagcattgctaatattgctagattgaccattttctgagttctgtttcttcaagttcacatcttctttgacaagtgagggaactctcagtgttttcgtttccactgtatcttttttaattgaaccattcatacatgtgatcttctcggagatcattttatttactgataaattaacagtacaattatcactgtacatcactgagctccttgttctgtcgcgcacataaaatagcatgtatgctttctgcctcagcacatctgcctcacgaacttggtaaacctgggtgtattaatgtatatcaacaaaacaaacttcaaaataaaaaaaaagagaggaagaaactgaataaagaatgccaggagtgcagatgagaaagtactgaattaacataagatcagctcaactacaacttggtgtaccaatcccaccaacagaaaatgaacacataaacaggccaaagaaaaggattaccctccatccctcaaagtgaacacattccccatatcctcccttaagttgactgtagaccactacataatatagtgcacgaagaaggtgcctgacaaaacaagttctctagcattcataaagtactagtactattttaagaagacatattacaaggtgaactcttgtgagcagagagtgagggacataagtatagactatagagttggtcgacttcaccattgaatgtttttggatataacatggtgtattttggctggtatttgttattacacaggacaagacatggttgatggaggcaaaagaaaaaaaagagtaactttaaaaaagcaatatggcacaatacaaggatgtgacttgcattaatgtaaaaaagggttgtgtcaatgataaacagtaagaataaattcatcacaacataaaaaagaataaccttgttatcatcaagattgtgccatatgccactagaagtccgaacaaagcaataatagtgacctgactgtgtattccaaccagcatgaaccaaaacaccataaaggctgtatttgaactccataccctacacacataaactaaggactatgagcatgaaagagaatcttattaaaaacatgtccaaacttatgttaaaaaaaaaagaacaccattaaaaattacatacctcaggattgctgacatatggctttaaatttaaagttggttgaaactgcacttttttgtcgatcttgtgacgagggttgaaaggactaaagcgctttagatgaattgtcaacacagagggagccttctcaatcataaacctcttcttggctactactttctgcctgcagtgctcgcagttgtactgcttttccccaccatccagtagctcttccgcagtaaagtgttgaagtgcttttaccagagtagcagcattggcaatttcaaggctgagatccaggaaaggatcaaatttgttggaacagtgtgagcaagttgtgcatctcacctgtcatgcatatagatatagtcagccagtggccatatgggtaaagttttacttgctattatactagtaataagttaattaagcatttggcaatttacctgacttcttaagagaccaccaaatattctgtgaactaggctcttctcataagcacttggcgacccacttggtacaccagaaggtaaacaacatttgtgcatggactcaagcaagctaaccattagctcatgtgcgtcttcctgccttgagatgcggaaactacgagaaatgcctaccttgcagttaaagattgcacaagggttgaataaaattatagatagatacggtatttcaaaataaagtggatcaattattttgcaatagcatatgaaaggatacatcttaaatttctgacaatgtgcacaggtctcaatatcttcccagttgactgtagagcagaatttacatgtctttgaagagcacataaagcacagaatccgatagtccgaccttaaaaaataataaagtgatattataagtaactacagaaacagggcttgccaagaaaacagaaaatgttattatattgttctctggagaaatgatacagccgcaaaaaacagaggttgctccagaacaggtgatgagacatagtacattggtcaaggcatgtaaactaaaatttatatctgtttcgttcaatccaaatagataagaagcagctctagctctagatgcctcgagactgattatagagagaggaaatatatttgataaccaccaccatagaacatccgataagaaaatgcagagtgctcacagacagcaacaaaggatggttcactactctcgactttcattgacaacatcatcatatcatgcagagtatctgaattgctgatcgcgaccagacgcaatgaacttacatgaggacatgtgctccccactctgcaagtaggccacgaacggctcggtatacgtcaagcattgcagaaccgagttgaggtagcaggtattgccaaaattttgcaagccagctccctgttttacatagatagggcaatagggcatctttagtgaagtattcacttgcaaagcctcgtgtttcaggtgaatgagcagattactccagtaaaaaggaccttcaatacgcggatgcaaatttttgcgcataactattccaaaatgtattctaaacaaaacataatacagttaaacgtgaatatatttttttcattacagaacaacaaaccagcatttctgaaggaaaattcataaaatgtatcttataattactgattctattcgtaaaccaaaacccctctaataatctgaactgcaacaactaaaaccacctaccctacatgtatatactatgctacctagattcaacaaaatgtgaaacgaaaaattgcaggcttacacactcacaattctccgcaagtacatcctcgcgacgcgaagctccgggtcgatcccacccccgctaccctcccccttctccaaccccctgaccagcccctcgctcctcgccgccgccaccaccgccgccttatcggcatccgggctcaggatctccacccaaaacctccctcccgccccctccaccgcacgcggcggcctcctcgccgcgtggaactcaatcctcctgtgcatcagcccctcctccgcctcccccatcatagggttttcgcgctcgcacggatcggaggatcaccggattttcggggcaatttctcggattaaaacctgcggcttcgatcgattttgggattggatagtgtgatttttcgcctcggcatttggtgggcgagagagagagagagaggcgaagaggtgagagtgggaggtggtggggtttataaccgacgtggcttgtacggatggacggctgggattgaacggattgggttatggactgatatgggccgttggattggtttcggttttggaagctctccccccacgatggcggccggagctcaaccgcagcgccgccgcggcggcggccggagtgtcgccggagaaagcgacggttgagagggagacaaaatagtctagtgtccagatgggttggggttggggattcgtccaacctgacgcatcaacccatgttggcaacgctggattggagcgcgaccttgtcgttctcggtggagacagagatagtcaggcaatcagctccgattttgtacgcgctgcccatgaagaagaagaagaagaaggtgagcgattctgcagtcgtaatcgtctcctcgcatcagctaatgccaaaaattaatttttaaaatctaattttaaagttgattttttaatcgaagtttattttccaacaatgacatttgaatcgctaacaacacatatataaaaaatttacttataaattactattattgtgtattattagtatttggcgaaacgatgcagttcttgaagagtttttcatccgctctcgttagccaaaatttaaatttaaaggtgattttgaagatttttattattttctatttttttcatataggcttttaaaccacaaatgatacatacgtaaaatattacctacagaattattcttgcttgctctgtagtcacggtttaatcggtcatactagctgggagcaatagtaaaccgtaggtgactagtctgaagaaaagaaacaatctgatcctgaatttctgaatcttcgatgcattcttgcatcactgcatgcatgtcccttttgatggtggacgccggcgactcgccgtcgacttgtcggtgactgctggccacgggaaaccaaacaactctgatgcaggtagcaatcagcaaccacaaagaaacaaattacatatatgcttttttcctgtgctagtacggagtagtagtaggaagcttgagaagatgccaaaggaaaaaagaaatccattgcagattgcagacaggtgacgtgcttccaacccctttgggcgcagcacaagcttactgaagcaggctacaattagttaatactaataactactctcaagtctcatgatcattgttgctgtcatacaccggccaccggccatcttaagctccagctcccagctgccttgataaagattactgtcaaagtgtcaatgcttcctaatatgagtcaagatcaagatccagcacatgaaaactatctcactgcagagtttaggatcagagattttcttttttcttttgctaggagatacaaagattctgtaaagctctctctttttttaaatctaatctcttgcagctcggttgaaaccttcaggtgaatttggtttttacaggattactagtacaagctcagggtgaaggactgaagagcatgtggcttgttctgaaattggcggcagatgctaactaccaaccgccgcccccacccggatcccccaaatcaccgtgactcactctctaatcatcttccttttctgttaacaaaatcatcctagtcacgttaattggcgtagaaattagagaacccttaaaaaagaaattagagaacccagcagccagcacaaaaaagccaaaaacgaaatctgaaagggaacaattgcgaaagcaacggatgcttagcttgctctccccaggaggatgaaactgactttttttttctaataactaatgttacaattaaaacaaacagtaagcagatttatcatgcaaaaccttcctaaaatgtaatttactgcaccattatatttgctttttttttaaaaaaaaagttcaagattttttggacaagcacattgaccatcagtaaagattgtcaggttgggtaggttttccatgaagttgacctaaaatacttattttgaaaccaagcacaatttttttcattgacaagccaaataaaaaaatgggagaaataataataataaattcttagaagaaaggggtagagtaaagagcagattaacagctgcgcctaaaaataattaaatttagtcaaacgcccaatgcttcgtcttcctgcttccttgagtttcttctcctcttcctcctcctcctgtcgccatttcccatatcgccacctagaatcaacaaaagcgaccaccttttctccgtgcgcttcgattccaaggccctaatctaattaggagctcaccgcaacaagattgctcggagctttcgagcgtttcttttttttttttgtttccttccgcgatatttatattctaatgctgcaactagctgcccgaatcctcaaaggcggagcattttctaaagtggagttctcaaaaaaagcgtcttcttggggtggattgcaagttggtgacccaaatccgtcgctacgggtcgggagttcttggatttcccgctgattggttcgcagattggagctcttgatttggttgcgccatggcgctgttccggaagttcttcttcaagaaaccgcccgatgggttgcttctaatcacggacaacatatacggtaatggaagtatttccttttgcactgccatgacttatgttgcttgccaagtttaccatggacagattcatccaacctagcttctcttttgaaaaggtttcagcttgattgatatggataggctgctaatttaagcatagttgaattaagatttggcacttctgaagtgttggtagtatagtgtatcacaatatggattagagacttttagggccatgagagttatacgtaatgtagtggtggaagatttgtgtttttgtctgtttattgcaatttgaatggttaatcgtttcagttatgttatattctccctaaaaagttgtgttatattccaaaagaactgtttcatactttcgttatctgttcattagttaactgtgtgaagataaaagaactcaaaatagagccgaggtcctgaggatgcttgacacatgtagcttttatctatttcagtttttgatcattgcttctccatgaaagagatggaagaagaccattttgaagcccacataagaggtgttgcagcacatcttctagataattttggtgatcattcattcatgatctcgaatttcggcattcgagatgaagaaagccccatatatcacattttatctgagtatggtatgaccgtcctggactaccctggccactatgaggggtgtccacttctcaccatggaaatggtccactgcatcttgaagtcgagcgaaagctggctctctttgggtcagcgtaactttctgataatgcactgtgaacaaggatgctggcctattctggctttcatgttagctgctctcctgatatacctgggacagtattctgatgagcagaaaacactggatatgctttacaagcaatcgccagtagagctcttggagatgttttcacctctgaatcccatgccgtcgcaattgagatacttgcgctatgtttcgatgaggaatgtcgtgcctgagtggcctccagctgatagagccctgacgttagattctgtgattttgaggatggttccagattttcatggtcaaggtggtttccgtccaatattcaggatatatggcccagatccgcttatgcctactgatcagactcctaaagttcttttttcgactccaaagagaagcaacgttgtccgtttctattcacaggtaattgccttgtcttttccctggtcttgcattgtggttgttttgaagtggacgcgttgtgacgtacgttgcagcattcgtatagctaaaactacttcgctgtatcattaatagggttctatgttgattatatttgaagtttgtacaatttctggtctaaccttcatgaaattgaactaaccatttatgatcttaggcagatgaactggtgaaaataaaccttcaatgtcatgtccaaggggatgttgtcctagaatgtatcaatctgtatgaggatctggatcgtgaggacatggtattccggatcatgttcaatacaggtttcatcaggtcaaacatattgatgcttaatcgtgaccaaatagacattttatggaacacacaagaccaattccctaaagattttcgagctgaggcaagtgttttataccaagtggcaaactagcatatttctgtttatacatggatttttaaatacaccttctattatgttaggttattttctctgatatggatgcaactacttcacacatcacaacagagccggttagtcatcaagagaaacaaggacttggtattgaagagtttgctaaggtgcttgatatattcaaccatttagactggttggatgggaagaaggatacttcgcttcacatacctcaacgaaaagcatcatccacttctcaaggaaatatagatgaatctcctgctgatgggtccgagactttcttcgatactaaagaagaacttgactttgatagtctctctggtgaaagctcgtcttcgcttgttttgaagttaacagatgactatgttatggttggttgcactgaacttcaacaagatcccctacattcaacctcagctgaagttccatccaaaatacaaacaatagaagtagctccttcacgaacaaggcctccatcggtgctgttgtcacctactaaggttaagatgccaaagaccagtgcttcatcaatggcactaccttcaagcacggtaataccccaagcaccgtcctcaccagttcagccacagggactgatagattctgcagtgcaaattgcaccagcacagtcagcgtcaaaatcagctgagaactctggttcacaaactccagtaaaccaagaaccttcacctcttaccgtaaataattcagcatcgaccgcatccttgatagctttgtgaacacntccgcttcttcttcctccgccgcccactgtttcattagcccctgtttcccccattttacccataaatactagtacaagtataatcagcgtttcccttagatcgatcatgccctccccttcacaacctccagaatcatcagcctctccactagctcttgcaagaaatgaagagctagttaaatctcaagaaccttcctgtgaaaaccttgagaagtttccacctgaattttatagagcttccagtgtcactgcattgtcatcagattctctattgtccatagaaaaggaatctagcagtacaagaacatatgtcccagaagctttgcctgcaatgcctctgacttcagacactcggacctcattaatttcaatttcaactgcagcatccccacccctgccgccgccactgccaccccctctaaaaccatctactgtgatgtttcctttgtcatatggtaaagaggtagcaagcactaaagaaaaggctgcaccaactcagcctccactcccaccacctccaccgccaatacaaccaacattgatttcaaactcgatatattcatctacttcatctgtggtttctgcaccactaa

SEQ ID NO: 9572 - DNA, 32367 bp, Oryza sativa
ggaacagcgacaacctgatcgagatggagagataccactacttcgcgtcgagctgccgggacttcgggtcgccgtgggagtgcacgcactccctgtcggagcggggcgtggacgagagcgagcgcgccgcggcactgcgcgtcctgcggcgagtccacgcgggcttcttcgccggcggcggcggcagcttcgtcgcggacgtcagggaggtgatcaggcggacgcggcgcgaggtgctgctcgggtgcacggtggcgttcacccgggcgatcgccagcgacgaccaccactccgtgtggaggagaaccgagcagctcggcgccacctgcgcagacgacgtcggcccggaggtcacccatgtcgtcgccacgaacccgacgacgttcaaggcggtgtgggcgcaggtgttcggcaagttgctcgtcaacccagagtggatcaacgccgcgcatttccggtggagcaagcccaaggaggaacacttccccgtccgttggtaaaccggatcgaagttgagattgtcagttacctcgccaccagcattttccagtgttgcacgtactggtatgccaatttcattgcatcgagcagtatcgtttgacagaaaaccccccttacaaatcttgcaaattttgaaccatccgattgctttaagattcatgcaggcaaccaaactctaaaaatcctctcgcctctctctctcccgattcatcacgcgccgccgctcctccgccctagcgcgccgccgcccggcctcgccggctggccgaatggtgtcaacggcgctcgcgaggcccccccgaccggccccctccctctccctctcctctcctttgcctcaagccggtggcgacgagctgtccgtcgtcttccccgtcgccggcggcggggcgccaccaccggccgcctcctccccactctttccgctttgcccccgccgccgtcctccagccccgcggcttcagcggcgccgccgccgcccgcctgatccgccgggctgccgcctcccacggccatccctctaaagccggcgaactcccccttcttccccctccccctcccccccacccccaccccaccctgggaccctaattcgtcagccctctaccggagtttgggtttgccggcgccggagaagaagaggtggtcgccggagttggagaagaaaagcacgaatcgtgaagcacatctagtgatccaaaatttgcaagatttgaggtaggattttctgtcgacagagctttagcaattccgtaaaactaaactttgtggaagtatctatatattgtcattctttgagactcttatcttagcgacatgcatgcatgcatctagaaaaagtggttgtgccttatattatggaatggagggagtatatactttggtggaacaggaaactatagctaatgatgtattttgtaaggtgcaataacctaagttttgtattggaaataacgggatttatgtctacatatatacatatggcacacaacaccatacatctcatctagtttctttaattatcagcactgagctcctttattagtgggcttgctggaggctagagcccaagcagttaggctgaggaagtgaggatggtgctcgctggctagtctgatatgtatacgggggctaaggacatgatatgtgctccctccgttttacaatataacactttttagcattgcctatgtacatatagatgttaataaatttaaacacatacatatgtctaaatttattaacatctaaatgaatgtggacaatgctacaaaatcttacattgtgaaacggaggaagtatatgcgatgcgtcggctacatcagagtttcatctcgttgagtctgggttttgatcttgcaccttatctaacgttttaaaactttgaccttttggtttctgcaaacaaattaaagacttatgggccttagcctataggtttagacaatgtaggccaagttattgaattgcctacaagtatgaaagtaccaaattacctataagtgcaaaaggctcgttctgtctacaatctaaccttgtcggtggtgtaattatgggcaattagtgtcacccatcgaactgctattggtcggtcaagtgggccatgaatgtgtcatttttttctttccagctaaactcacataatcgtatatatcatgcctctagataggggccacgtaatcatggtaactcaccgtaccatggtaccgaggaggtaccaatgataattttaggtatcacaaatattttattgttgcattatagagatagtgatatagtaagagtatgatgatatatccatggcacccactacttagaatgtattctctatacctatctatacctatctagttcatccccacttagtgtaattgctaccatttaccatttatatgtattctcatgcttccatatcacataaattgatttggacctgcgttagcgaaaaaaaaaagattcaaaccattaattagatcagagcagtgtggtcagatcgatactaaacatcatggtcatgactagacatagctaaaattagaggtagtaaccacttccactataaaacttgctcttagcaagctgtctgtaaggcttttcgggccatatcgtaagaggtttgtagagtatgaagtcaattaaaatggtttggctaaattttggtggagtaaggaatatgttcatgtccttatatattttcacactagacaatgtatgaaacatgggaatttcgctatcgtcacgtcatgatacaataacatctcttgtaaatatatgtccttttattttttggggaaacatgttggcattgcctcagatgttcaggtttggttggcaagagaagagacaagagggtgaagaagccgacatgtgggttccacgctgactcagtcaggttgaccactatcaagttgtcatgtgagccaaaaccggaaactatactgccctagaaccagtggcggagctaggtttggaggaggagggggctcagccttcttcttcctcctccagccccctctctccccccattttcttcttcctctccctcttttccctcctctcctccctcacatttccatggagtccagcagggtaggggggctcgagccccctccaccgctgcctaggatctcaggtacaccaatacacaattcaaacacgtcaaagacgaagggcttaaagtgaacttattccctcaacgcacgcacaacactgaattaagtgtggcgaaaacaacgggaaatcggcccatttcctatatcctggcccaatatcaatccatttttctagggaaaaagtgcgccgaaggtccctcaacttgtcatcgggatacaaaaacgtcctcgaaccgcaaaaccggatatacagggtcccttaactatataaaaccgatcacctgagatcctttggtggttttgaccccggtttttgtctacacggcggctgagtcggtgtgggacccacgtggaccccacatgtcagcgtgccacatcaccacccattacttcccctttcttttttctcttccttttgatacttctctttgccgtgagggagtagcacacggaacaggcagcagcgagccgggttgaccggcggtcgacgcaggtggcctacgagcgcgcggcggccggcgaagcggagaagagcggaggcgcggagtggcggtggcggcaggcgggcgagcgtggtggccggcgtcctcctcctcctccaccgccgcatcgacggtgtgtgccctgtttctctcggtggtcgtcggcgtcgccatggtagtcgtcggagtctgttagcaacccgatgcaccaagcaaatagcaacaatatctaaaccaatttgaggtgaaattgagcaagtagctgagtattacaagcttctagaaggttctatagagggagacaggaagggtgtagtggctggtaggaaggagtagtgagggagagagatcgacaaggttcctgcccaaacctggtcgccgctgccgccgtggccgaagccgccgattgccagttctgttctatttcccctcctctcctgtaagctgctgttgcccttgtattgtttcagcttgggcttgcttgggcttcttggcaacgggttgcctagcggcccatgtgtagcccagccgagaccctgacaatcccttcttcttgaaattcggcttgtccccaagtcgatgaagaaaacctcctggatcgaatgatgtttgaagttcctcttgtaaaacttgatgctcaagtacagcaaccataccaatctgtgtaggagcatcagataaccaggcgttgcatagcatgatcaaccatgcatatatcccagtcattaccaccatatgattgtcccttcttggattgaattcaagtaaaccggccatggagaatctggatagtactgcactaaatgtattccactccaccaccagtataacctcatgtatctcctctgatgcatgtactaatcttagcccactagaaagaaactgaggattgatagacaattcggtgagcacttgccatgcaactgtagctatcagttttgtatactgtagagagtatgtgtgtcgctcaataatctgatccactaaatgtgtttcagccacctgattaagcaagaaaggcaattgatttccatactttattccatagttatcggtgttctgttggctatacatgcattcttcaccttggatgacatttgcattagttggcaacaagcaatctaaagtattagccaagatgagcccttgagcaccactactgtgtaaagccagatctgggattttcttgagtgcatcactgtagatatcatccaagttttcttcaccttggaacttccatgcataaggtttcagataatcatttagctttgccggctggaacgaggccttcatcacctcccgcaccgccaccggctgcgcgcggtcgacgagcatggagaggagcagtgacaggttctgcttcagcgtgcggagcgccgggcggatgcgggcgtcagcgacaccgccgacatagagcccatcgtagaacgagtggtgcgagtcgaggaagatgaggcggtacgcggcgacctcggcgacgtgtccgaccgcggattgcgccgcggcgcgcgcgcggtcgaagtgggagcacggcgcgaggaggcgggcggtggcggcggacgacgacgacgagcacctgccgcgggagaagaaggagagcgacttgtcgagcgcgtggacgtggctgaggatgaagtggagcgtgttgagccggacgtagaggcgctacgtgccgcggctggtcgacgggcgcgggttctggccgccggacgccatgccgccctggccttggtggtgcccgtgggcgcgcgggctcgacacgggcacctggcacggcgtcgccaccttcttccacagcctgatgattatcgagtcctggttgcacctcgtcagcggcggcagcgacgggcacgcaccgtgtccttccattatcccagctacccgcgttctcacaatggaggcaccgtggagttcatgtctctcggccggagcaagaacgccatcgtcggcatcgaagaatggctacactacttattcatccaatcacagaatctccaatatgatatagtactactatttactagtataggaatgaatattcagggttagtcgtacactcataccataaactactacttgcatgctccatggctatcacaattgtatgacaaaatgaagatccactttcttgtctctcatgctcgtcctcaactgaaacaagacctccaaaaagcttcaggatcaaccaaaccattacatacacaacatacagactataaaccttcacaatcatcgatcacaggctataaacaatgacgaatcaagcaataaaaaggagatttttttaaaaaaatatcatattttcacggtgtctggtgtcgctagcggcgaagaacggcggcctgtacgtcatggagatgtatccccggggagacggccatgtcaccttcgaggtgctcgcctacggccgccacagccagccgccgcccgcctacgtcggcagcagcggctgggccagatgcagcatccaactcgaggactggcactggcgcgccctcccgcagcctccctacgtgcagtacccgggctacgaacgcgacgaggcgccgccgtgaaacacccttattacaatatcacggcgaccgcggtggtcggcgactcacgtctctggatatcgacggagggcgtccgcacgtccgcctttgacacggtgcgagatacctagagcaagcagggcgagtgggcgctgctgttcaggggcaacgccgagcacgtcgcggagcacgacctctggttcggcctctcgcgccacggcgacaagctgtgcgccctgcggcagcacccaccaccctttgaccgcttgacgcggagctccccgccggcctcctcccctccccacccgccggtggtctgcagagagagagagagagagagagaggaggaagggagagaagatgggaaataaagggtggtgacatggcacactgacatgtggggtcccacgctgattcagccgtcacgtagaccaaaatcgggatcaaaaccaccgaatgatctcgggtgaccggttttatataattaagagataccgtatatctgtttttacggttcgaggacgtttttatatccgatgacaagttgagggaccttcagtgtactttttcctttttctagtgcacatgaaaaggacaatttcaaaattgagattttgcgagcaggggcgatctgtggccgtccattcgttgtggacgttaaatcgaccccgtcgatttgtgatagaggttacgccgcatctgcgcgacccgctaccacccacacatcttcccgtctcaaaacaaaaagaaacaaaagaaaaaaaaaatccccatttctctaaaaatctagaggcttcttctcttctcctctctctcgttccccttcgtttcgattcgtctcgcccaaatcttcaaatccaaatccgcagcggaggcggccggggcgcggcggccagatcctggaagagaatccattccgggaggggaatccgcgcatgccaatgtcggatcccacggcggcggtcatccccaagccggggggcatcggcgtcggcggcggaggcggcgacgacgaggagccggtggagatccgggaggtgtgggcggacaacctcgaggaggagttcgcgctgatccgcgacgtcgtcgacgagttccccttcgtcgccatggacacggagttccctggcatcgtgtgccgccccgtcggcgccttccgctccccggccgactacaactacgccacgctcaaggccaacgtcgacatgctccacctcatccagctcggcctcaccttctccagcccgcgcggcgagctccccgcgctcggcccaggccgccgccgatgcgtatggcagtttaatttccgcgagttcgacgacgcccgcgacatcttcgcctctgactccattgagctcctgcgccgtagcggcatcgacttccgccgcaactccgagcgcggcgttgacgctcgccggttcgcggagctgctcatgtcctctggcgtcgtgcttaacgattctgtatattgggtcaccttccacgcgggctacgacttcgggtacctgcttaagatcctcacatgcagcagcctaccggacacgcaagccggcttctttaagctcatgaagatatatttccccaccgtgtatgacatcaagcacctcatgaagttctgcaatagcctgcacggtgggctgaacaagctcgccgagctccttgacgtggagcgcgtcggagagtcccaccaggccggttcagatagcttggtcacttcatgcgcgttctggaagctcaaggattcgttcttcgctggctctaccgagaaatatgctggagtgctgtatgggctcaatgcggagaatgttgtcagtgcgcattgatggatggtactcctctttgaattttagctttgtgaatggattgatttaggacagaaaatgtgacaaatgatcaagatgatgttatgtaggtcaagtttgtctcactccatttgggtttaatgtgatcctagtgttcttcagttattcgcgatgaaatagtgaactgtatttatgttaagttgttctgtccgctttcattttctcctacctggtttagttagataggaaagaaaaatcacctttaaggattaggagatggtaaaatgaatatattttgttgctgttttgtcattgatatgtatagcatggaagctggttgtttccaaagagtggggtgcgggtacatcaaagtgctcaaacatgtaacttgataacattacaatacaatacacagagcgcgacctctcttcacatgggtattttagatgctgttattttaatttcccagaataattagttactctaatatgtatccttctagagaataacacaatgcaatattgagaataagggcatctctctatttcgactttgtgctgcagtttttggtaatctgaggtaatgctatctggtctacattggaagcctggaaacatttacggttttcagccaaagttttctactatttgttcatcaattcaattatccagtaagcctactgcctagcgaatagttctgggcttctggccaatgttcactaggcaaaacctctgtactccatggagtaaaactacagtgaaatcctgcaaatatgcaaattctgcagatttgctaacaaaatattagatacgcatctagctatatgtgtctcttgatccagcaattaagtcacaatgatgcacagagcatgaatactagcagtttactttttccataataggttgtgggttacagtaacaaatatgcatgtcttgagacagtgatgctgatactatttcccttgccttcctgcaacacttggattgaatttctacttatccaacttatattctagatacaacattgatccatttacattctttgtgaaaaacttatcataactagatgagctttgaccacaagttacatcattccctgcaatttaatagcatcagattatttcattgctggatgtaccggaccactcttttttgctttgcaactagaatattagttcctttggcactaacatgtcctcaaatgttgcatgtggagatgaaatctagggcatttaattaagttactaacgagtttatttacaggttctgttggaacccaatttagagaagaatctagttagctacatcttctcgttttattaagactcaacttggacactaccttaatcccggttgattgccattgtccagtttatttaaattcatgtatataatcggtccttcttaagttcggacattgttggagagctattctgaataaaggtaatggtggctaacaagaaacaaggtaaggattgttagaaactggagaagtttgggtgccaaaaagcttcaaaagtattgaaattgtctaatgtttcatattttgcaggtaaacctgataatactttcctagtgtatcattttttaacgggatgcatttctggtgttaaaatgtggtactcgtcatgccaacttgtgcatgggttcaatttgaagactgagaagccttgtgcacgcatgaactttcttcatcacagattgatggcagcagcagcctatctcaattccccaaatctccagggatgagatcaaaccatctgcattgcacaagcttcctcccatggataatgcaaatgtgtaatgcttatgcaattgtaatgtgtagtgttaaacagttgtggtcatttttgtgagatctgaatactgattccataaatcggggctggccagaaacaagtgcttattgcatccagagaacatgttttcagtttgcctcacaatttcactaaaaatatcagtacagatttgttaacctccaaaaagggaacacagaaggcgagctaatatgcaagtttacatcatgcaaagaaatggcctgaagtttacattagaaagaattaacatttttcctgtcaagtctctattgacaatgaaaatcttaagcaggcaggagtcgttctatcatccctggcttaccgtcaagatctttttctcaaaacaccgtaattggatcaaaagttcaaaacagttgccatcttaagtaatgcagcgcagtgcactgttcaccctctaatctgcaggttcttagtgtaattctgcgttttttggctgcaaccacaaagacagtcgggtgagttatatttgccgtgtgtgctcataagcagcaactgttcatagcctacccatttacttttcacgtgatgtctatcttgctggcacgtatgatcaattggtccatttcttcgtccatatctatttgatctcctgctatcatctgaggaatattttgtggcacaatgtcagcattaatatatgccccaagcaatgacttgtacaggggcaagcttgtcaagttgaacttttgaagaacctttatgaatctatctgcatcctccacactgccttgctcctcgaaatactttgcaatggcctccaacagctcaagtggaggtctccagtggcaagtcttcaacagagataagcccttcttcatggcattgacagctttatccatctgcttactctgaacaaatccctccatcagtatctcccaagtcttgtaattcggatgcgcacctttctctagcatgtggagatgaagcctctcagccttttcgatccatccattcctcacataagcaccaaggagaacatttgaaacccgcacatcgtgcttcttgctttctgcttcccagcttccaaaggtccactcggcccgaccaatgtcgccaacttttatcaagcataccatagcagacatgtagtttgcagcagggattctacctggaacaattttactagcctcccacagcctaataaccccatctctgtcattcagggctgcataacatgtcataatgaaagagtaccctaaacgccctgttgatgacaactttgtttcagccgttctaaggcaagcaagagctttactgctctgtccatacttcttgaagatgttagctaatgtacagtatgtgctccaaccaacctcaaccatgtcatcattcagcatctccttgaatgctgattgtactgaggctaagccagagacctcagcacatgcattcatccaaatgttgtaggacagaacatttcttggaatgttgttccgtttcatcagataaattacactaaggaccttctcatactggcacgttgcaacatatagtttcataatttcattgaaagaatgaggatcgacaggcagtccatatctctgcagctcagccatgaaggtttcagctttctgcacatttctttctgtaacatagcaatggagaagcgggaatgacgcggccttcttggaagcagcagtacttagttttctgtagtactcctcagcttgagaagtaccatgaacttttgcaatcaaatccagtctaaccatatgatctgagggcgatagtctaaaatcattgtgcgagtccatccatgataaaatctgcagcataataaaattccgtttaggtagtgccccttgcatcgccactgcgcgatatagattggaacagcaataaacattcagctgagctgtgcaagtgtgtcaataaatcatataacaaagagtgaaacaatgttcactttgcagcataacattataaggaattattaagaagtttgaatcaaattgttgcaaaggtgaaaaagactcctatgtcctatctgtatcagatttttctcggttcaaattcgttcatcaggtagagctgtttggagtgtgctcacctccagggcttgctcgtagcggcgcgcgcggcgaagccggacgacgtcacggcggagctccggcggcgagacgcggccgcgctcccgagcccatctctcgacggcggcggccgcggcggcgcgcccgctcttcctcgggatccggaggaggcaccgcgacagtaggtcgccgccgtcgccgtcctcgcgagcagtcgccggaggagcggaggaggaggaggaggagcagcagaagggtctagggtttgggcgggaggcgccgacgaggagggcgagaaggcgcgagcggcgcacgacggcggccatgggcccaaacaatccatgggcttgcttgctttaagaaagtttaccttcttctcaatccctttttttaaaaaaaaaattagtaaatttcagaaaactgcaactatagtcataaaactgtagtgtgctgcaacattagtgatctatttcagtttgctgtaataataacgtggaaaattatcacaaaattacaacttttacgtgatatgcgtagaagttacagtttcgtgataatttatcacgctattgttctagcaaactggtagttttgtgactataattgcagttttttaaaatttactcaaaaagaaatgaagtgatagcataaatttgtatctcaattatagtggatgaaaatttagacatgtttttaaaaggctaactcatacgtgagacctaaccggattctacaacttcagtttcgctcccaattattttagataatagattaaaccggcctctgcatccaaacatatatgcacagccaagaagctccccaaatatatgtcctaaaatgtaaatccagccgcgccacggctgtctgtgccaaaccaggacgaggaagaagaaactgacagtaagctcaggtttatacaagccatcaatgtctctctttctaggtcgagttggcaacccatctcgtcctccagattactactacaatacatatattgacatagatacacaggcctagactagattacatcacaaactaacactgctagctagtacacagcatacaatggggggacatgtacacagatgcagacgagagatctgtcatatgcaagctccaagggagtagaaatcgccgcaccccaggtcgtcgctgaaggtaacatcatccttctcctgcatggaaatcgagtgtcagatagcgaaacagcgccgtcaacaagatgactattgcttctgatggtcttatcatcagcgaaaatggttcaataagtttgctggtatgtgtcacttttgtgtaatcttaatatggatgtcatggtaaaaaaaattaggtgaaggaaaaaatccttaccactttgactatggaattgagaaggccgtcgaagctgcagctgctagagctaagttcgctctgaagtttcgggatgctcaaatcggaggcgttcttcggcatcgccatatctcccgaaacgaggaaatctgtcttcatttgtgggataactgttgaaccacttgaggttgcttgcccaatcattctggcaccaatattgctactgttactactgctattgttccatctttggctcatagcatgatgagccccaatgttgcttgccaattgagagctcggtacagaactccatacgaacttgagatcaaacagactgtctgcagtcctatcatcgaacttctgtttcaaaccgtttccacctccaaaattcaagtacttttgctctgtatctggaggtaaaagcatcgcgccaccaaaagagctagctccaccttttgtgtctcttgctaccataaggtcatttgaagagcgagcaggtgcacacgatgaagatgtaccacccaatttgtttgcacaggtattgttaaacgaaccatggattagcaacccgttggcggaaaatcctgataaaggaatagtactctgctgggatacacgagattcaagcagaccagatgaaactccaacggcgccttcaatatgttctgaacttacagaggaagttcgaattgatggctgactgacaattttggcttgtgtgcactcggctagttcttgaggcagcaaaggactgcttgtgacactttggagtgtgccagacataccattagataggccattcccagaaaggatggtggacagatcatcggtttcttcatggatccacttctgttgcatttgggtctgcccaagcgatgttgccaaaccttgtcccaagtttcctttctggtttcctggtaagctaaggtggtacttatttgcatcattaatggaatggctcaatgtatggcttccgctcatagtctgaatcgattttgaagcaggtaccccctgagttccaagagctgctggattgtttctaggactgtttaacaatccatgtggagtaaaagatgatagagctgcggaagaggtaaaagcttgataaccctgtagtccttcaaatccacccatgtgcagaaaggggtctctacctcccaaagcagcaacgatgctaacttgttgcgacgccacagcgcttagccgtttgagatagagcctgtacttctgcgtggtacacaaagcttgagattagactctgcaaacaagttgtagtgtttatctgtgaacaatttgcttttagtgtctcagcatgagtcacagaatagcaccggaacttgtttttggttcaccatatatgtggttgctaaatctgctagaaggtttagagaagtgctgaaaaatgtacggccttttcctcaacttaaaggccactcatttaattgttacagaatctgctcttggaagcagaggggcaaagtacacaagactcaagttagaataggccttaaatgtgtaatagctctgtgttgataaaggatgccacagtgactttctatcagccatatttaatacagtattgtaaaacagtcagcgcacaattcattggtattgaagaacttctgaattcggttaatatttcttcagggccttagtaaagttgaaagatggtctatcttaagctatagtttcctctgaacagtaaaaacttgtagtgcaattaattacaatagctgctagctgtggtacagatttgttctattcaaattacatcattaccagtacatgctaataaatagaagatagtgaaatgagttccttgcctgtaggtgacttgcaacattttcccttgtgagtttctcaacattcatgagctcaagtatcctttttggcacagcctctgcataaatagaaaaaaattataatctcatcttttcacttatgcttatgcttattagccaaaaattgaattttcaaccttaaatttggagttgattttggggtttttttcatcgtagtttattttttagcctttgcttttagatcgttaagaacacgtatataaaagttttattcacaaattatttttcatttgcaaatatgtcgtttagttttttcctccaatatgccaaacgatggggccgtttctctctctctctctccaaaaaggaaaagattagggtgtaacatgagtcaccataaaaaaattgtgaacagcaaaatggaggcagtggtgagaacatactgtcaattccaagctggttgacagcagcgacaaatttccggtgtagttcaactgaccaaacaactctcggcttctttggagccgagggatcatcaatatcttgagtattgacctcaccctcatcctcctcttcactacagtactccttcctcttcttgctgggcctcccactttgatcaggtgatccacatgtaacatggccatgcacatggtctgaatccgcatttggtggcttgttgcactcttcatagaaatcgagattagcacggtcgcgagtactgaatttcctcctgataacatgctgccagatattcctgagctcttcgattcgaacaggttttaggagatagtcgcaggcaccatgggttatccccttcaatacagttttggtctctccattcacagataacactgcaaggaaattactaattggttaacatcaacatttccccctacccgtcatagaaggaaataagtacagtacagtgctcaggatttgctgaataaactgaaattgaattgatgctctgcagatacaagaaaaatcttcactcacagtggctattactatcaagaacagttgaactggattattggatagctctgagaagggataagattcatgacttactgatgacagggaggtccatttcaagccccacaagctcaagaagcttaaagccgtccatgtctggcatatggacgtcgctgataactagatcaaacatgtccctgttttcccgcagcattttcagcgcgatagcagcctgatttgttgtcgtcactggaaaaacaaaacaaaaattactctttcaagtgaatagctgttgaagatacaggaaggcatctgcgacaacaacaattcaccctaaacccccccccccaaaaaaaaaaaaaattgcagcatgcatttcttttatcaacaatgacaccataaatccagatcatgtaaacaatttacaactagacatctctgtagctgcatgcagcatatatagtatacgataacttcatgaaatattttattgaataaacataaagcattaggcaaaattctgaagaacatacatatagacatctaacaataaaatttgtaagaattgatattgctgttccaagacaaaaaaaaaaaccaagactgaactgcaaaaagaaaagaagaagtatttaccatgatactggcagcgcagcagcagggtctcgagcaccttgagacacaccgggtcgtcgtcgacggcgaggacacgcataccgacggggaactggtccctcctcctcgccgccggcaccacacccttcctctcctccgccgccctcatggcaacaaaaaacctcccaatccaattcacagcacaaaacccaagaacagcaagaaacctcccaatcgatgaagcaaatcaagaacaaaaaccaaccaccttataaccaaagttgcaggatgctgggaagcagatgtgggcaggggaagattgggattcagcttcaaggcaggcctcccaatccccagcaagaaagcaaaggcaaagagcccaaaggtacaaaaccaacaacctactactactgctcctgctgctgctgctgctccccaactagaacaggaaaagagaaagggagaagcaaaatggaaagaaagaagctggtggtggatttggacagggagaggagagagctggagagagtgggcatggagcttcaggaccaaacccaccaccatctccaccaccccatcattattgaggcaaagaggtgggaaagcaaaagggagggagttggagaagaaagcagagttctctctctctctctctctctctctgcagccaaaaaaataaactaaaaaaatgggaggaaaaaagcagagacactgactgttccagatggccaagcaagcaagcaaccaacctcagcttcagctcacacacatgtgaactactcctagctcagcagcagcagccaccacaactcccagcaagaaaacaagaggagattggagcaagaacagcaagaacatctcaagggagaagaagatgagggagagaatgtaagtagactgtccatctgtctgaattttaaggggtcaaaaatggtggagggcaacagaaattggggcccatttcatccacaagctccaaccgatcgctacagacgaaacgccatccctctgtagtctgtagtatgtactaccccgcaccggcgaaattcttgcgtctgtaaattttgtattgtatctcatgtatcaattggacggggcaaaaaataattttccatgaacatgttaaattggtactagtagtaatgtttttttttctgaggccttaaattagtagaaaatgggcattccatatgacaattccgtatctcatttttaactttttttaaaaaaaatatcattatttttttgagaatttttttggaacaaattttctgattaaaatgatccaaacttttaagagttgtggaaacggatgagacacatctcgatcacacaagtgaatatagcattgcaagctagtagtatcaacttgccacgcacaaatgaatagtatcgcacagtgactgtactcctacattgagggccttttgatttggagaaaaaaaaatataagagtaggagtttaggatgattccaaccctataagaaaatttcctaggaaaccctttaaaataaaggattgaatcatattgtatgctttaaaattcctatagaatgaataatcctagaaagattttgtgaagaaaatttagcaagagtttcaacctcttagaaattttcctttgaatctatccctttataagattattgtgtttttcctgtgattcaatgaaatggttattcttgtgtttctcctatattttataatcctctgttttgtacatgcaattgttattagaattatacgttttttttctatttcttcccttttttttcattggcccctacggagtaccaccaaacagtataataccatatacatatttactgcttgtataaaaatactgtagtaattatagagaagcgtacacgaacagaagacatatgcttgccttaacaactttagattcttcacacggtataccactactgcagctgggccccaaattataatcatccaatggagcaaacaaagacgacctgatctctggatctacaagtagttaatggtaaaacaccattaaccccaaagtaaaactccccttaaatgcgtgcctttaattgacgccatttactaacgcttttaataaccatccattaaagctttggatgattgattggaagggggcaccactccctcgcacacgaacgagattacgagatgaagattgtcacgaaaatgcccgaccgaccgagcgtgcttttttgtacggtctcattttctaaaacatgatataaacgaagacgctcataaacacacatcatatccttattagcatctttaaaatcctaatttaattactccctctatccaaaaatataatgtacaatcatgttttttcatgcctcataatataaaacatatgcgtatatatattaactagcacctcgatcctctaaatttggtttgttttaaaccatcgagctcttcaattatattgcttgtatgcatgaatgcgatccaaccaatgagaatgattaagggccagtttgttttgaggcctaaattaggcttgccaatttttttggcaaccttaacaataattgtgtatgtttggattgaagccaaattttgacatgcctatataacataggccattttaatagccaaattagtttaatttggcttcaatccaaacacatgttggccttaccaaaaattggcatgccaaaacttgtcaaaattgccaaattttggtaaggccaacattggtcacaaaccaaactggccctaattttttttcttaatctttatgttacgagtggtgagcatttttttttatagatggagtagcatctttgaaagactggactaatataacttaggattgataaagtaacacgtgtatattgtcacacattgaaaaataataattagacgtaaatacaagcatctatatcaagtccaggacttgaactcatgtgaatcggtttctaatcaattgagttatgctcacttcaccatacgatattattctaaccctatataaaataataattctaaatcatttcaatcttgtattaccatctccactaaataattagaatgacaaaaacaatcgatcatcggttaaagtgatagtagttttagatattgtttccgaccgttttcacccctagcggcgcacacacaaatcacctctatttcccgtgctcgcgcgcgcgcgcgcgcacggtgggggcggccacacggggggtcgtgggggtgtcgatgcggtggtttttcgcgcgcagccagccccctttgtcgtctcgtctgccacccacgtccccatggcgctgctgctgctgctgctccttgctgcaacctgcaactctgcaaggccaacaagacaagcggaggcagcagtagcaggagggcatatgcctcgtttcccggactctccttccatctcatcccttggttgacccatgggtttgaccatctcaaccgttgattgatcccacatttttttaagcaaaaggtatagtcaatgagtactccctccatcctaaaatatattccatatctcaaaatatgaagaattttaaatagataggacattttctagtactatgaatctggacagactctctgtacaaatttatttaactatcaaatgttccatctgtttaaaatctcttatattttaggatggagaaaaagtaaatagtattgaataagaagaagagagtataaataaacaataattatgtgcgttaaaaaggaggttgtatacaataaacaatagttaattagtatttaataattgaacggttaaacatttaaagacactaaggcaaagatggtactacactaagcttagtatttgcaaatggattaattatgtggactaataagtgtttacactcatatactgccaggacatgagagaggagactgtaatttgtaaatagctgcatgtgtgggtttcttgtcattttgttcatctttctcgtgaagttttttgcgtgaaaaggggaaaactggacgtgccggtataaagtgagccagtactacaattcactgcctatatatgccacgtactcgatccaacctgctacgttgaaaacttttgcgtccatgactcactgcacgttgcttccggcgatgaactatcaagcgtcatatgcattcacgtaagctatatatatatatattattcccttctcctaaaatataaaatattttatataaatgtaatatatttaggatcataaatctgatttgactttctgttaagatttatagtcacacacccacctatttttttttcatattttagtacggatggagtatatgtattggcccacatcaatttaagtcagataatgcatcaggtgtttgcatgcttaattacgaccgttaattgtgacagcggggcatacatggctaccttcaatacgggtcaacatttactgttcacttctttttaaagcccgtttgaatgcgagaaattgtatgtgttcacttcacgtggaagtatgaaataaaatatactaggatacctcctctccggaacgcaaaacgatatttgcattaacatgtgattaattgaatattagctattttttaaaaaaaattgattaatatgattttttaagcaactttcgtatagaaacttttttttaaaaaacgtaccgtttaatagtttgaaaaacgtgcgcacggaaaaccatgatagggagttgggaactcccaacaaagaacgcaccctaattaagtactcttttatattcatcaccatataaagtactttcataaactatacacgaatttctattagtcaatgataaaaaaaattaactggcttaacaccaagtaatttaaacggaagtaatatatatgttttaacttttattaaaggtgactttttatactaatttaagaacgtgttcaacctataacctatacatatatgtatcgttagcaaactcctttttttatgccatacatgacttgtgtgtcgcataaacatccgcgagcacccaatagtacgatgataacactaaattaatattctccccgcttcaaaatttagcaatctatgaactaaattcatagtgttaggttggatctaatctcatacataaattgttatattttgagacgagtaataattaacatatttaaagtactcatctcacacttttcccccgcatgatgcaacgtttaccgacagtttatagcttccaacaaacaaatgagaagatggttgcatttaatttaattagcttgtgtgattggtgagtggtgaccaaacattatgtcatcgatcgatcccatgcatgcatccacgcccaattttttcatatacaccctccgtccctaaatatttaacgtcgttgacttttttatgatatgtttggccgttcgtcttattcaaaagatttaagtaattattaattctttttctatcatttgattaactgttaaattcacttttatgtatatatatatttcacaaaagtttttgaataagacgaatggtcaaatatacttaaaaaaaatcaacggtgtcaaatatttaaggatgaatggagtatatttttctccgatccatggagcacgcgtatagaagttcacaaaacatatggtaactaaaaaaatattcacagcatttttttctgcagggaaatattcacatcattttcacaggccacgtaagaaaagaataatattcgtcgtatgaagtcattataatcttcctttatggatatctagaaggcatatgcatgcatgcattctgcgatattaatatatatatgtaaccggcgctgccggccacgtggttaattagacagttaattagttgatgatgccaggtggtgtttaattactgtggaaaacttctactagacgtctgaatatcttgttgccctgatgataattagtatactgataaatggttttaattaactaggcatcttagtcagcttcacttaagtgcagatcttaaggtagctaggcccagtcatagttccaaactttttttttcaaacttacaacttttccataacataaaaacttttctatacacacataaacttctaacttttccattacatcgttacaatttcaatcaaactttcaattttaaccaaacttttaattttgacgtgaactaaacacagctctagtggggttttttttcttccaaatagctaaatgattgaataatgtatgtgatcactattcgagagcacaaacgaatggattaaacattatgaagttaaagaatagatctaaactagttttgtcgaaattcacatataaaagttttttttctcaaaaatcgtatagtttgggtgcacgtaaaacatgtggcatatattaatcgatcgattaatccttccttagaaaaatgttcaagggtcttccgactagttccacaaggtggtggctagactatctgggttcggagcctcaccccttttaattatttgatattaggttatttcctaatatttgccttttttttattaattcttcctttaaaaaaaagagtaggttgatttaatgctaattgcattgccatgtttatttttttttctttttgtgtggatgacgtcgcacgcgaacacgattcgaaccgaagtccatttttcctgcgcgtgtacatagtatatacgtacgcgtgtagtggacggttgcttttcatctgctttcttcagagaagctctatgtttattatgatacgcatgcacgtcgctcttatatatgtttctataatattatgcgatgattctcaatcatgcatgtttcaatattacctaaccatttcaaaattgaacgcgatctcaattatttaactacatatacgcatgcatgtgtgtatatatatacagtacgtacaccaccggctgcatgccggccaatgatcgatatgatctggacctgcttttgctagcttaatttactcgtatttataattttttttgactgaattatttataattgtttgtaaacactgctccctccattccaaattgatggtacaccaagaccaagaaaagctaataactctctcatattatatttactctagcaacaaacttgatgcatgcatcatccacactattttctagccaatagaaaatcaagatattgcatgtgggttataaatacttgtgtggatgcatgcatcaatgcccatttactccaatgcaccaataacgaatagacttaatgaataaacacaaatatatagatcatttaagaataaccttaaaaaaattatatgcagatcaattttgaatgaagggagtagtatacatgcctcttactacatatttttggatcgatcacttgagaatttatggatggagggcacaagctgcattcacgtacgacaaatgcgatctacacccaatctttgcgcgtaaatttctgatcgatctgcatttaattcactctccatcgaaagttcatttaagagctagctaggggccgaccatcgatccatcccagaagtaattactactctagttattgatctgggcccttcatgcaaggtcgaacccatcaacatgcacgtaatataagctgtgtttagttccacgctaaaattaaaagtttaaagaaattagaacaatacgatggaaaatttgtaaatttgtgtgtaggaaagtttgatatgacggaaaagttgaaagtttgaagaaaaaagttaaaatctaaacatggccatactctacatctaaaaataacacataagattaagtggtgagatgaaaaagagaaatgaggaaaaatatatgtatcacctttaatcatgtaaggggcaatcttcacacaactaaaaaaaagaaaaaaaagtgaattggacaaacaaataaaataaaattattggggttagtgtgctacagtacagaggtaatataaagatgatgtattgtatataccaccttttatagataaaattgaaggtgtcaactacctttgctataaaacttgttcctatattactcgtttaattataattagcatttaactgcgacgctaaaacgcacgcttgcatgcatggtacaatattggtactgcaggagtatatatatgtacgacgcgcatgctacctgcagtatgtacatgtccctcgtctgtgcgttgcacgcaccgttttagaacgcaaggtaatattggtttaactttgatcgatcatatataaacataattaaaaatataaatttcaggtatctgaagaaaaatggatgtatatatagtctaccataacgagagatttcttcatagtattacacttatgtaatttctaaaatttatatcgaagggctagatagtcaaatttttatccccgcaaaaaaaaaggatagtcaaatttatagagtataatgttaacttagaaaagtcacacacggcttgtttatgctaccagaggaaatagctgtataattaattaattaattaattaagcccgacttacgtacgtactctttctataaaagaaacttaattgcaagctattggtcaacaaattagtggtaagggtaggggccgggtgagcagaaaaaaaactgaaccgaaaagaccgagaccgagaaattcgatcctagacagtcaaagaccgatttttttcgatcaatttggttagtctcctcgggtaactgaataaactgaaaagactgaattaaaaaaatgtttaaatgcaacataaaatccactaagttcaataggactagactctaattttttcacatccctacttcttctaagcatgcaacctaacaagagtctttattcatatgtgcttacaatttctttttttgatttttgtgttggcatttttcactatttttttgcatatataaaaatgttgttgaatttcggtcaggaccgagaccgagaccgaatttgtcagtcctgacatttttgcgttgaaattcggtcttcacattccaaagaccgaaatgaccaaaagaccaagactgaaattttcggtcaggttgtatgcccacccctacgtaagggtaagtgcgcccctcacaaatacacataaacacatataccctacatcttaaattatatggtgcaattaacaccaatataaagaccaagaaagaattattatcacctttcgtttggataactccaataaatacaatgcatacacccaatgggattagagattttgagagggtggatgattttgaaaaagaaataattaaagaggagagagatgtgctagtttattgcatcatgcgtgctttatattatgaaacattgaaaaatatggttgtgtcttatattttgggatggagaaagtaagaaaagtaatattgcaaattggtagttaagggatactgagagcaagtactataaggatatatgtgttggtctaaaagtgtcgcataagataagtacttgatgagatctactccagaagaaaagtgatgagagagactatgagctagtcactagttatacaagaggcaatctacatatataatctccaaagaagagcacacaacgaatgtgagatagtgtgaaagtgaacataaggctgtcatgggttggcctaataatgttgattattttcatacagcttattaataaaaacttatttatgagcatcacttttatatatgtcatagcgactttaaaggcaatgcataaaaataaacttttcttttgagatggaaataataaatctcaatagcatcaaaatcaatttcaaaattaaattttacaattcaattttggtaacgatttataagctgtatgataaaagataggtatagtatatgacatggctaaaattaaggtagcacattcactataaaacttgctctcttaatttaggaacacaacttcttccattcccagatcgatcaaggatcaatatataagttgggacaaagttgcaaggctaattaaagtctttttagggtggaatagtaattttgaattttgatttggtggttgttttagttccaccaccagcttgtcataaactatatattccatgctgctagctagctagatttggcctagatcgatagctagcacttgcaaatttattaggtttggagctttgggatcctacgctgatcatagagagatcgatcacttatatataggcactcgctgtcgtgatagatcacatagtcctaacacatgagatcctgtaagattatggagtatcacacaggtcatgccaagttgtagaatcaattaattaacggcggccgtggcgtctgaagaaagaacagctagcagtggtaaaaaaaaaaaagaaatcaaagatatgtgcctgccatgtcatttatcacatgctacgtacaacgtgttggcacatacagtaactgatgagcaattcaagctatgcattagggtgcatttctttttagctaacgattacatgttatcacggacatgtttttttaaaaaagtttataataaacacggtactttttcaatggaatatgagcaatgctagcgcaataaatgaccacacatcaatctagccggaaaaaaaaataaagggtaaatagctaaagtggtcctccaagttttaattatctgaggctcagtttagtccttgacattttaatctatccatattagtccttcaagttttcgttttagttcaaaattatccttgaacttacttagaagccacatggctaaacataaccaacaactctcttgataaatgacacttatactcccctcattcacatatataagagaaaaaattgcatgcaatgatttttttatagataatgcatagtaatttatgtaaaacgaaaataaattatgtacttgcaggtgtatacgatagccattgtttaagtttcatgtgcatatgttgaaataatgggaaatacatctgcaatattgtttatttattttgattttcccttttctaatgtatagttgcatacaaattaagggcaaaacggacattttgcaatggaaatattgactacaaatatccatatggcatattaagtgggcccaaggatgattttaagccaaaacaaatacttagaggacctatgtggataaaataaaacctgaaggaccaaattgtgccttcggtgaaatttgcgggactaaattagctattcacccaaaaataaatgacaaagttacttctagtcaatgtattagtaaattactaatttacccttaataacaaacggatcatatcatttctatcgatagtataatactactagtagaaagcaccggagcatcactcaatattgaattcattcattcatgccatcaaataattgttatgaacaacgcaatttcacaaatcatccatagacactttagagtttagaacgcatcatatccttaggccagattaaccaaaagaacatcaataagcaggactatatatagcaagtactttctgagacgaatattattggtgatcccgggtacccgggtacgtacaaatcagggtgcatgaacgacatagcaaaggcaggactaacaaaaacggaaggcaaatatatatatatatatatatatatatatatatatatatatatatatatatatatatatatatatatatatatatatatatatatatatatatgcatgcatcagtgtgcattcagatcggaagtggtatataatgtggttgtacgtagggtaagaattaagcgtgcgtggcaataacatcatagctttgtgggcaattgttcgtctcttctcctcacatggaaattttgagagcagagatcgaatcgatcgtcgaagaacgtacggtcctcaaccaattaataagcacatatatatcgtcttgagatatcgatcgagctggcgactgactagctagtaaaattgtttgaatttttctagacaaactgtattaagtttgatcaagtttataataaaatttagcaacatctaaaatattaaataagtctcattaaatctaacattgaatatattttgacaatatatttattttgtgttgaaaatactactgtaattttattaaatcaaatattttttattagaaaaaagaaaaggtctaacgactttaaaggaaaggaagtactgtatattgttgtacgcatgctagcaagcaaatgcaaggggcagtctggcagtgcatatatgatagcgtaatgatgatttgttcctgcggctccctccgagcactggtgaccagtttaggttatgtttagttcacataaaaattagaaattcgattgaaattgaaacgatgtgacagaaaagttggaagtttgtgtgtatagaaaagtttcgatgggatgaaaaagttagaagttttaaaaaaaagttagaaactaaacaggccttaggagtacatgttggtcaggaggacgcattctgcatttctgcggcaaaatcaatcgtattttccgtcgtggtgacacgtcgcggctcgccggggccgggctacgagcgtgaggtccccgcccgttgcagactcagcccagcccggcacgtacttccaacttgcctcgccgtgcgcggagaagaatagtgggccggcccaacttgtcggtgcaccactgcacctgcacgttcgtgggtatcgcgttacggcccatactgctctcgggctgcctgtctacaatacatgggccaacatcgtcataccagtccacttctgacggtatgagcttttgccgtttctccttgcttcttgcatttcgatgacgacaacgtactctcttcgtctcctactttaatcatttgtcttgcttaaaatactaggcacaaatatatttaaaataagacggacaatcaaaaacttatggttgcacttaaaataggacggagggagtaaatgctgcttgaaacaatgttaaatctagaaagagtcgctcaaaggcatatggtacctgagtttctgcaatcaattcgaattaatcgattcccttcttttgcatttgcacatctgcagctaatagtacaaactgaataataataagtaagaaaacagaaccccagagggctcgtaaactgaactacagaacattgctactacatatctcctgcttccactaagctcccctcgattcagctcacggctaacactttctcatcgcatctccatttctccatccaagctgctacccacaagtatacatctgttctccaatctgatgaaactcacactgaccattcttgtgcagcatcagaattcagaacacactccttttccttcacataagctgtctcccttccctgtcagattcttcgtcttcttcttcttcctccatacgatcatggagcaacgacagctattgcacggttagtagattgtgacaagtgacaacggctaaaaacgatggaatcagctgctctccagtttcatctcttgccgaatctcaagcacttgttgtgttttacttcggtcatgttattgttcgaggacgacggcgccaactggggcgctttggctgtcttatccttggagagcttctccatcgcgttgatgaacttcctcagatgcctgatgtattcagggtacgtctccaggttgcagtggccgccacctttcacccataagggctcgtacttctccttcgcgagctcccatagccgcttgccgtgggagaaatcgacgatgtcgtctgctgtgccctgccattgtcattcagcaggtaagttctgagttctgatcacaccaaccggggaaaaaaaaaacagttgagagcagcaatgaactatctcagaacttaataaagtcttagcatgttttctgttgaactgtaactagtaattggacatgagatatatactgaaaagtaaatttgaagatgatttcagacttgaatatcaatgaaaagctaaggaggctttgaatcagaaatgaaaagggtacaagctactcacatgtataaccagcactggacagtcaacctgctttattttgtcgatgttctgcagacatgttagcagtaaccagattaggatggtaaatgacagtcgttttagaagcaaactgaaatcatggtccagagttccagacataccttgaagatatcaaaccaaagtgttacttttaccggatatagaacccgaatgcctgaaagtatagcactgtgaaggacaacccctcttaatttttccaagcgcgaggctaaatgcaatgttggtccacttccaactgattgtccatacaagattagatcctctggttcaatcccgtacaccttcgttaaacagtcataaacagcctctatgtcacagtatgtgttgtattctgatggcttttgaagcagaaaacatgataagaaaaggaacaaaattaggtatgtcttccacaaggcgaacaattacctagcttaattacttattgtaagttcgtagaaaggaaaacatttactatcgttcgttctgatcatcagaaagaattcgttaatcaacaaaaccatgtgccacatatgggaacaactgaacaagcacacatgccactttatgagctagtactacttaaccaagttcttcaagtagggatcgataatcaatcacctagaagttggggttgatggtcccttggtataacaactttgacaaaaggatgactaacagaacaaagttgccatcatggtcgagaatagcagaaagcatgtgtgactttttccgatattcataatgaaagtaaaattgaaaaaggctaaacagccatttgccaaagtcctattccagatgaggccaagaaagacagaatggctaataataattgctttgagaaaagctgcccatatacctatagaagaacaggatgttgattatgaaaaaagcaagggaaacaatccaatccaaagattgtcgcttgagtcattgatgaaaatatggcataaacatacaggagacatcatgatcacaaaaaagtttaggtgacaatctattcaaagaagacaagtttactgcaaattaacctaagaatcaagtttgagctcttaaaatcactgaggaattcagaatcttactttgcctgtagaggccccatatcctgaataatcatagctgcagaacgaaaccaagtaaaaagttcagtcacatgtaacacacaatattggtcatgtccatcaaaggaaaattgtcatgatattaatttgacacaattgtccatgttttatatatttattgatggaaataaatttcaaatcccatgaggatcaaatagcaacttttccagtaggggaaattctttcgttcttaaagttaaaaggcaggcatcaactggatccccaaaaggtgaaatagataccatttgaatgtgaagttcgacaggactccatccgaaataatttatagcagaattattcatgatacatttttactctatccacacagcaagactatatgcaaattatcaatccacgatccaaatgccacaaacagttataacagtattataagaataagatgccaagcactattctcttacaaaaatgatgctctgtaatccttgtatattttaagagaactgcaacaaacaatgccgtaaaatttttttaccccagttccccaatctagagaaatgccacaattctaacaaatgactagaatcgctgaaactgaattcgaaagcaatagcagcagatcacacacagcagcatgcatctgcattggagcagaatctgacagtataaagtacaatgaatcatccaaaaaaaagtacagtcttaacctcgtcggatggcaacctggcaagaactaaaatctaaaacggagggaagaaacgatctgtttttcaactcttccataattgtggtcaggccatcaggatatccaagaaactaaatctaaacataaaagcagaagtcaaagcatttattcaggaaaggagtggtcgtcatttaatcaaacgagcagttcgttcctaacattgaaggtg

SEQ ID NO: 9573 - DNA, 10495 bp, Oryza sativa
gatagaatatgatttggcttataaaccattgaaatctataaaaggccaaattgtatgtgattttatagttgactatcatatagatgttgcttatgagggagaggtttgcttagttgaagttataccttgggagatttattttgatggttcttcttgcaaagaaagtcaaggcataggggtagttttgttttcacctaatggcatgtgttatgaggcatcggttcgtttagaatattattgcacaaataatcaagccgaatacaatgctttattgttcggcttacaagttatgaagatggttggagctaaatatgtggaggcctttggtgattcgaaattggtggtgcaacaagtcgccggagtctacaaatgcttggacggatcactaaataggtacctcgattcatgtttagatattattgccaattttgataattttgctattagacatattgctaggcgtgataattctagagcaaatgacttggcacaacaagcatctggttataatgtgaaaaagggattatttctgatattagaagagccggtgcttgattttaaatctttgtgcgaaattggcaaaactggagactaggggcggtctgaccggcgttgcacggccggtctgatcggtgaccaggggcagtctgaccggccgtatgctgccggtctgaccggcgaccccgagcggtctgaccggccctgcgtggccggtctgaccggttttgggcagagcgctggggggcacgcttcaatcgatttggaggccgaattaattgagaattcggatatttgtgtccaggatacagaagaggattggagaattcctttgattcaatatctaaaagatctcacgcttaaggttgatcgaaaaattcggcggcaagcattcaaatatacattgcttgatggagatttgtatcgccgaaacatagatggtatcttgttgaagtgcttagatgaagatcaatctaaagtggctatgggagaggtacatgaaggaatttgtggaactcatcaatcggcccacaagatgaattggttgcttagaagagcgaggttttattagccgaggatgattgatgattgcttcaaatattatagaggatgtgaggcttgtcaacggttcggcaatgttcaattggcgcccgccgctgtgttgaaccctataatcaaaccatggccgttccgaggatgggctttggatttcattggtcaaatttatccttcgtcatcaaaggggcataggttcgtgctagttgctacggattacttcaccaagtgggccgaagccgtgcctttgaagaatatgactcatacagaggtaattgactttattttgaagcacattattcatagattcggtattccgcaaacattaactacggaccaaggtgcttcttttatgtctaaggaagtgaagagttttaccgaatcttatggcattaaattgttgagttcttctccttactacgctcaggctaatggacaagctgagtcgagtaataagacattgttaaagctagtgaaaaagaagattgaggaacacccgaagaggtcgcatgaggtgctttctgaagcattgtgggcgcataggatatataaacatggtgccactaaagtcactccttttgagttggtttatgatcaagaagccgttttaccggtagaggtaaatcttggttctcttcgttatatcaagcaagatgatttgtcaagtgaagattacaagatgttgatgggggacaaccttgatgaagtcatcgacaagcgcttgaaggcattggaagagatagagaaagagaagaagagggtggccaaggcgtacaacaagagggtgaaagcgaaattgtttcaagttggagacttggtttggaagacaattttgcctttgggtactcgatccaaggagttcggtaagtggtctcctagttgggagggtccttattgagtgtgcagcattgttcgagggaacgcatactttttggagacactacaaggggagcgttttcagtaagcaatcaacgggaaatacttgaagaaatacttcccgagcatttggcaagacgcttaggaggtactatggccggtaattgggttatcgtcctaaaaccaaaaacatgttctatgcttttagattcacgttgttcatcaaaaaggcagggggcatgtgtttacacccaaatttggcacctaggattaaaataggaaatattgccaaaatttggaagtctaccggtttcctccgaagtgggccggtctgaccgccgtgtgttgggcggtcagaccgctggttgagggccggtcagaccggcgatgtgtggtcggtctgaccggcaggtccgagtccgactctgtttcgtcgggtctcgaagtttccttgctcaggaagacatgtttcgggtttcctttggtttctaccccgagttgaacgtggaggagggcctgtagagggtaagaccaacccctatataagggacatggccggttcattgtaagaaaccaatctacaatcaatcaatcgaatcgtttttcatattgcttttagttttctcttagtttgtccatctttgtcggtttgcgccgtaaaccgtccgctgccgctgcgagagtgcgacatctctttgcaggtttgtcctgaaaaccttccgttttgcccacgagacgagtagctatctagaaatcggctccgctaggcggtttagttatcaaaactcatctaggtttagctctttgctagatcaaggtggttggtgactctaggatcaccacaaagcttaaagtgctgcgatcgtgcttatcaacttgttaaaaaagttgccaacacacttcttaccaccggacacaagacaccgcaaaaagaggcagcgcaaccagccaccgcacctctccccccctccgcgcgccgaccatgtcgtcgtcgcaagctcgccgcccgcgtttcccgaggggaccggcggccgccctcctgcgttaccagttcaagacagtgaggccaccgacgaaggacatcgtggagctcctgcccgagggagggtctcgcaccgtcccaaggagcgtgctgcacggaagcgcgcttgcggacgagaacaagttcaagtccctgagcaagatggagccggcgatcgtggcggccgcacaggaggatggcgatctggcggcggcggcggcggccgaggcggcgccggcgccggcggacgaggagtaggagaagcctgacggcgatgtggatctagctatcgtcaagttttttcatgtttcttagtatcttagttccatcggatcgagtaactgtactatgtttccatgttctggtatatctgtatgatgcatggaccagttatcgaaagatctttggcgctactgccttgttccaagcaaattaattctctatgcgtcatgaattgtgttcttggtgccgtctttgcataattaatttgtattcgttcgtggtcgccgcctttgcttgctcatccaatgtcatcgtcatcgacgtgtcctcgccgttgccggtgcgcgtgctcgccgtggaattggagccgtgtacatatcccaactgaattagcaggactagttaacccgtgcccttttcttgtcgatgtttccacaagtatttttttggataagttatataatttttttataaagtactacgaacagaacactttcttttgcaattaaaaaaatgcaaaaatatatgcagaattcaccactagtggtacattatctttttaactccaattacattcttatcttttaaattccatacgttgctttgcgccttgcatgttgcatgcgaaggagtacgtaccactggacggggcaggtcgatggcaggagagcggtgcaccaaatagaccaggaccatgatagttgcaagtgaaacgggcatggtggcccacatgtcgatcgtttaaccgcgtagaccgtgtccacgttgggatccaccagcagcagcaccggggggaccactagactcccagagcttcgtgtgatgtgaggcaacacaacgcggacaaaagcccaggtagactcattccaccagtgcatgatatcataggcaaaggagacctcacatatcagtagcacggtccacgaagagcagggcgtagggaggggagccgcggagcggcctctgacacgaccgggaatcccgggagaaaagcaatgcggtagggtgctaagggcggttagatggagatcgaacggccacggcgtggtagacaaccaaagccggctggtatcgcgggcgccagtgcgaaatgggtagtatttgaaattttcttttctttttcacaagtaacttttttcttcgtcctcctttcttattttttttgtaaatttgctcagacacaaaattccgatcctacgaaacaatattaagtcataggccaactgaatctaaacaaaacagaaggaacttaccttgatatatacgaaacgagagttgttcgagtttgctatcgacattatcgctttctataatataccgacgactttaacaattgtcctataatacaccattgggctataccttcttttcaaaaattcccaaaatactcttatgtacatacaaggttaacaattaatttatctaatttgaagtttcaaaaaaatatgaaaacttttgtgtggactccttacacaacatagaattttgtatagaagttttcaagttgtttatatttctattttttataaacaaaaatataacttatttgttaaatgctatatttttttgaaacttctgatgaaataaatcaattgttaatcttgtactccctcatctccaagatttgatttttttagggacgaagagagtatgtttctaagcatattttaggtatttttgagaagaaggtccagcccaatggcgtattgcacaataattgataaagtcgccggtatattatagaaagagacaatatcgatggcaaatcattgaactcgaacaaactcagtggtatagaatagattctctcatacgaaaagcagacaggtcacaaatattcataaccaacgacaccttaaaagaatactaatataacataagctaaaaccattgaaaaaagagtgcacagcaacaacatggtcaaaggcgatagtagagcaacggtgacggggaggtttgattctcgagacttgttatatctatccagaatttcttttctcttcttcaactcgaagtgtgatcttgtcaatgcttctttgagtggcatgtcgtacagacgactatgaactacaacatcacatatttttgtctgcggtgatatgtagaagagtccgcatttcaagcgacggtccttgtaccgtctgagcttgttgttgataacatctatcagatgatttataacatgtagctgcttcccgaaagctatccacctgaccaatcctaatttttgaagcttgcaatagtaatccaccattattatcttttgcacttgtagtattgcttcgcgtcccaatgacgttgtcttaaccatggtgcgatgctcactacaagcccatgtaccttgctcgtccctagcgcatagtctatacttcttttttctaatcttaaaccccttctttctttgtcctttcctgaagaaaaaaaaaacctggcgagtaagaggagaattaaacttcctaaaacataaacatgaaaaagctaaactggcgagtctaaacatgaaaagctaaattatggctacataaagaagaaagacgaatctaattgcaaattatgtaggaggaaaacatagatggatttgtaatttagctttgcatatgcacgtgtagcgacgactgacaaatacaattatactcagatgtcattgtgtgtttttattctcaaacatatttgcaaataatatttgcatatttgcgtggtcgtttggggattgaaagtctattgatacatacttgatgtgactgccgcaagttagattcttgtccattggctttgctttgagatgcaaacctgtgaatcccctgtcgatcgcggatgtcttttgttttttgatggctcgatcgtgaactgaacagtatatactagtagtatatatatcgtagtagatcatgacatcatgtatgtgtcctggttggtatccagaagctctttttgtcgtctgacattaaggtactacaaccgttcagttgtggggaacaaggggattcacagattaaactcgcttagttaaagataatctatctccaatctaccatatctttactattataaaaattaaaaatatttttattaaattttgtcacgtaatccgtgtttgagttggttttcgaagatggttcggccccttttgacgtttcgtccgtttctcgtcacgctggttccgtccgattaaattcatatcgatcaatctttttttttctttccaacgtcagcgttcgagtctgcatcggttgcgagcgaacgagaaaccgtgtagcttccggtatttttgaagcgagcgccgtcgttgtcagttcaactcctaaaaccatctcccctccgccaccgtcgcatcggcgccttgtctagtcgccgtcttcgtgctgcccgggagcagtaacaacagactgttggcccaaggaaattgggctaagctttcgctcggaaccccctaccgccgtggttcgtcgcctaatccgaaaccaccatctaaacatcagcggcacatggcttccgccacacccgaccgacgtccctccgccggccatcttccagtcctgccaacgacaagactgccaccacaccacaccgacgtcctgccatcggccgacttcattgaaccaccatccttgagagctggctcaggacccctccgttccaccacccgctgccctcctcaccagatctgaccgaaggagaacctgggactgggtggcattgcttcggcaacctgagcttctcccgctgacaagctaccacctcaatccagcctacaaacttcccgcaaagaaaaggaggagcaccaggaaggtcgagggtgccgaccaacaacgaaaaagatgacccaccaccgctagctcctgttgcactaccatctgggcctgcaccgacaccggaaacgctaccgctccggctctagcgccggcgccccctttgtccggcttccttgatccacctagccgcgccgcgccgcccacctagccgcagaaggcaccgtgacagcttcccagctgcccggccgctgaggcctggccacgccatctcgcgcctgcaccaggcctcgccgttgctagtcggaggaggcgtagggcggctgctcgtgctgggggcggaaaccgtaggtgggctacggaaggcttgtcggcggagtagtgtggggcatcgtaggaggtggagggagcggagcaagggtagccggactcgtcggagggtcggagcgggcggccatggggcggcaacgccgccgggcaggccacacccctgagccgccgcgcacctcgttcacatccacctccgcgtccagggcggccgcacaccttgctgccacgcaccaccgagccgccaccgccacccctagatggttgataatgtcacaacgtgtctttacaaatcactagctccatttttacctcctgtccactgtccacttcattctttcagtggagaaagatagcttcagatctccgtgattgctgtattttggaaccgagggagtgatgaccagagtttacattaccgtttccaacatgagaaccgttttcgataaaatgggccacgaagtatactcttgatctgggtctaaatttctatagtatcaccctcttaaagaccagtttaccattgttgacgagcccaacaaggcatatattaaccatcgaaagtagcccaattaagaaattgcggaaaaaataggcccagtccaattagcccattctatataatccccagccgcccacttcttccgcccttcacgcatctagggtttcgccgccgcctcttcgtccccgccgcgacgatggtacgctcctcgatctcgcgcccttctctcgtggaatccatgccggccggccgacgtttcgctgatgtgatcgcttgcttgtttcgtttcgccgcagccgtcccacaagaccttccgcatcaagaagaagctggcgaagaagatgcgccagaaccgccccatcccctactggatccgcatgcggaccgacaacaccatcaggtgatttgatttgcttgctcccctccttcttgctaagtcttttgctcctcccgcgttcgattcggcttaggcatatctgctgagatgtcgtggtttggtttgtgttgttcaggtataacgcgaagcgcaggcactggcgccgcaccaagcttgggttctgagcaggaggtggcaccggctgctgcctgcggattttgttttatggatgtttcagtgtttatgcaagcttaggatgtgattccatgatgctttttattaaggttttctgaaatgttaagggtagtagtactctggtttactgaggataccatgctatgctgtgctgagtaaaagaaccattctaatatatctgccttgttgaagttatttctcaggcttattctgtttcatttttaaatttgttattgcatagctggagaggtgaattgttctcaatatcgttgggagtatgattgctctattgttattctattgggctgttgttagagtagagtaggcacatcctaccaaaagctttccgtcacaaaatatagcaacctaggattggattagatgcggggtttgtctatatttgttggactaggacgtgtctaatccagttataggttggtatattttaggatggagtgggatccttatgcaggtcaagctgttggtataattcttctgtgtgtatggagtttatgtggattacgtggttttgcaatggtccttataggaaaacaaactaatgctgtgcatctaccattggtacaattctatgcaattgaagctaatgcaacttattttctgactgtaataatgttgcaaattgtgattgtctacgaattggcaaccatctttctcagatagttactagatctctttattgaacaatggcctcattgggactgcttgaaatatattattcccctgattatctacttgatcatagggataaattaaatatttttagaaacaaaatgaacaaatagtttagaacatgagggctacacaatgcagtagaaagtgtttgagaaagcatatttttagaagtgtggagcaaacactccacggccatatctgctggagtgtacatttttggtcgtacaacagtagtggaaccctttttttttttttgctgtgttctacttctatccatgttaaactgaaagtagtcaattcatgtgcttgttaataccaacatgagttctgtatcaatcatagaagactttggttatgtttgggctttatatttccatgctgtaatgcttgtgttctgctgtgaactatggtcatttgaccgagatatgcactaagggatcgtttatgcttgtttcattggtgtgctattctacatgagaatacatggatataatacatggcgaatcctcgccaactcgcgagcttcgtttgaacggcgagcttagggattctgatcccgcaattaaaaaaaataaaaataaaaaacaaagagagggagaaaagcttcggcctgaaaaggccgtggcctggtaacctgagttgggccctctcagcccatgggttgctgacgggaccggcccatataaggccacctatttcagccatcggcccatcatcatccatccaaagggcccaacaatggcaaaaaaaaaaaacacgtcggcagtgtagttttgtgaaattttaggaccataatatctaccacgtgccaaaatacatgtggttttgtatagcttgaacctaggatttattgaaattcaccttcctttttttaagggaaaactttgagcacccgcctcccccaggccgggcccacttatatctgatatctttcataggtcatagactgccctcacaggccaacacatgtcttttctgcacactttgtcctcactcgtgtgcacccgggaagaatttcccggtcggtcacccatcccaaattgctccaggccaagcacgcttaaccctggagttctttggagattggattccggaaaaaatgttgcaacttgttgatatgagtattctattaatcctattaagccctaggccgggatgttacaccctcaccccctcaagagagatcgacgcccccgtcgatcaaccctaggccagaaacgtcctctcttggccacgttcatgtgtccagtgccagcgcatgtgccatgctgtgtaaccactcccggtctacaccagccatgcgcaccatgcctgcgcaactgcgacacacacgctcgtgaaaccgcgagagtcggctctgataccattttgtaacgtcccgcctcccccaggccaggccctaggccgggatgttacaccctcaccccctcaagagagatcgacgcccccgtcgatcaacctaagtcaggaacgttctgttt

SEQ ID NO: 9574 - DNA, 26767 bp, Oryza sativa
aacctccttcatcagtaccagggttgcaagcatcgcctgttccaccaccgccgccacctccacctcttccaatgattccagggatgaaaacaccacccaccccaccgccacctcctccagcagctccagggcagcaagcaccagctgttccaccgccacctccacctccacctcctccaatggttccagggatgcaaacgcggcccattccaccaccacctcctccatctcaaactaactctttggtttcttcatttccatccacaagtaaaagaattccaccgccaccccctcctccatctcaaactagctcattggtttcttcattgccatcctcaaggaaaggaaatgatgtggcagcccctcgtcccccacctcccccaccactgtattccaggtcatctcatgtcacttctgcaccatcagcaccacctgcacccccattgcctcctccgaagctagttggggccagcaaaccttcacaagagcaaatgataacctggccaccaccacctccaccaggcccacctcctaagaattcctcgaactctttgccaagtaagggtaatgttgtcagttcatctcctcccccacctcctacattctcatttggcgcaaaggaccgtagcacagcccggtccagaagtcctagaagtttgcggcccaaccagtcatctaagagacaccattgaagccgttgcactgggtgaaagtgtcaagagctacacagggaagcttatgggctgaaacacagaagtctgatgaagcatcaaggtattccaaacattttatgccattattttccaggtaaatgctaatggtagcactataacatgttagtccatttatgtcttcaccagaaccccagagatagatatttcggaacttgaaagtcttttctcggtagccatgccaaacatggaggagaaacgggcacgccaacgtccttctgttgcagcgaaacaagaaaaagttcttttggtacttatacttcacattccttactgcaaatattcacaagcagtgagaaaattcaagtgaaaagtaaacaagattaaccttttcttctgcagattgaccttcagcgctcaaagaattgtgaaattatgctgagaaacattaagatgccattaccagatctgatggtaacgaactaaacaattttgttgaagggatatggctcttgaaaagtaaaagtaatctggcatagttgatgcatacccttgctgatagactagaatagctaatcttactaatgccacttcctaaacctggtttgggttatattagttacctattgttgcaactgttactgagcataaagtatttggcagctgtactgaactagtggtttctgttgataatagtggttccttttttttcagaactcagtgcttgcacttgacgattccattgttgatggtgatcaagtagattatctaataaagttctgtccaactaaggaagaaatggaactactcaaagtatatatctactcagcagattgctctttgaaatatcattggactcttgaaattcttactgcgtctgttccagtggaattttttctgtattctgctaattgattaaggtttttcctcctactttttcaggggtttacaggcaacaaagagaacctagggaaatgtgaacaggtcactaataatcttttctacttgatcttttgttggtgatgagctttgttttttcggtaactatgtaaataataatgaatttcatagttcatcccaagatatacacaatcttagtgggagatcatacaaccaactatctcacccagtcatgtttggatgtttcttggaagttatgtagtggagtagctaataagatgatcatttttttcagcattttcccggtgccatgttatgtatatatagcttgtttattgcttagcctgtaccagcagttatactattaattttttgcttaatctcatgcatgaacacaaaggcttgatctgacttgcttctgtaattgtagttcttcttggaaatgatgaaagtcccaagagtggagtcaaaactgagaatcttatcctttaagattaagtttcttacacaggtcagcagaatatttgcatcattttttccccagtgaacttgtgtaactgttctgatagataagtagagtttaatttttttgccgagtaattctgtgcattctttcaggttgcagatctgaaaaacagcttgaatactatcaattctgttgctgaagaggtacactgttatataatatgacctcaagtcctcaaccttttcccgtttgacgagtttaaacatgctgttatataatgttatttggacaggttaggaactctgttaagcttaagcgagtgatgcaaacaattctttcgttgggaaatgcattaaaccaaggaactgcaaggggtgagtaattaagtatgttctaagattgatatgtttacgatatgatttttgcaaattgatcttccaacatgaagaaatacagtgcacatggtttctcttttttttaaaaaaaaaaatcttgttctattttttccaataaatcatttttttcatatcatagaaaatgttggttaaaacaaaattcgagcatttaacaattgtcacgggtgaagatgtagctaggatttatggacaggaagaagaccttacaactgcaattcctgcgctcttatttcaaaacagcatgttcaatttcaccatagctattatgtcctgaaccatcatctctcttaaccacatgaaattgatagcgaactgttgattatatccttcatatttttctcacaaacacctgtttttcagggtcggctgttggatttagattggatagccttcttaaactcattgatattcgggcacgtaataataggatgactctcatgcattatttatgcaaggtatggcatttaatttcagtaatcccatcgttttttgtgttttgaagtgtcactgaaccacatagttatgaaagcattgctcgttttgcgggaatttactggtgcatagcaatagaagttccacatactaaatttcttatgagttagacctagagaagggatctatcaagggtatgtctaaatagtatcattgtgattgtattattgatggttgttcattacagtaggaagagaaagattatctaaaactaaaagctccctttttccatttagaaacagtacattgaccaactgcatacagtggtttctcattaaaaatttgcattcagctgtgagcaggacagcagtgactgtattgcccttttttttcatcttccctttattcccatgtttcaaatatcatatcagtctttctcaaaaaaagggaacaagagcatatgacgaaagtagatatgaatctgcgtctgtaagtttggactggttgcttttataaccagtatatttgcattgatattttgtcatgaagttgatacttttgtggcaagctcagataagtatgcactttcatgaactctttctcaaagtttattgcgctcgcaggttctttctgacaagcttcctgaagttcttgattttaacaaggacctcacatatttagaacctgcatcaaaggtaacttagatatattaattaacgctagatccacgttggctttgttttgcttgcttatagtgtggtggtgaatcacagattcaattgaaagagttggcggaagaaatgcaagcgataacaaagggactggaaaaggttgagcaggaattgacaacatctgaaaaggatggtccagggtctgagatattttacaaggtcggttgcctgagattttattgttagtcatatgagcagaaatttctcatttattttcgctgattacaatcgagaaaatggtgcatggtatttggttctccaacttcccccattgattctctgttgcctccttgtggatgtagttgttggaactggaaattataaatataatttcatgtttctcaaagtattcttcttatgtaaaactcatcatcaaagattccgagttacactacaatagggatagtgacaaaatgtgaaaagtaaaaggtgatcagagacctttgccatactaaagggaatgaacatgaatcaacaatttagtccttactgctccatttgtattattagattatggaaaccataacacttgattgcagttttgcagttttgtacttcatcagtacataggctttatagatactccctccgttccaaaatataagtatttctagggttcaaaatgtgtgcctcaatataagcattttatgggacactgattccatggaaatccatacatttttagccaatcaggtgcttaggagacgaatctaagcgattcaaaaatcaaaatttgaccactgaggtgactgaaagggaatcttttcccttaaccttggtatttgctaaaaaaacctagaaatgcttatattttggaattgagggagtatattctattaatagtttgcaaattgtcataaaaggatggataagaacaaacatgacgacacccataactgaaacagttagtcatttagttgactatcattgcacaatgttttgctgttagtatattattaactgtaatactaatactcaaaagagctttcgtttcagaaattgaaggaatttcttgctgatgctcaagctgaaggaagatcgttagcttttctttacagtactgcggtatgcaaagactataaatagtttcattaccttgctgcatacgtcttctaacatgtatttgtactaagtttttgttattttattttcaggggaaaagtgcagattctctagcacattattttggtgaagatccagtgcggtgtccatttgaacaaggtattttatttttatatataaggcttaattaatattcctaactactctacaaaatgtacaaatcaaagataagtgggtctgatacaaaagggaatgggaaacgtgtatttatatgcaaggcatgtgacgaaaggtgctatgataattgagttagtcatcatgtttcagacagagggcactgcattcctctttccatggtatgacctgtcacaattggataacttaggagtaattgagtattgccatttttggggttgtacaatcaaactaagaaggggcatacaattctgggggtccctggtggttttaccagaatcatccaaattgctgctgttctttgtgtgctttgttccttagtgaacttgtattgccatgatagatactagaattgttgcatccaccaaatcttcagattaataccagttagcttttggatatctgcagcagctatatgatttcctgacctttttatgtggacagttgtctctactttgctaagcttcgtgaaaacgttcgagcgtgcccatgccgagaacctcagacagatggagctggagaagaaaagggcccagatggaagcagaaaaggagaaagtgaaagcagcagctcacaaggaggatttgctggagccatgaattttggtctgatgagttggcaaagtatgcattgtcgttgatttcttgccgtttcatattgcggccttagcttcatgaccaaggacagtacggcagaaaattttgtagcggtttattcgaagcttctaaccatgtgaaattggaggtgaagaaaattagcacatatgacaggtacatcaatggaagttactccctatatgcttggactactattggttcttacagttttgccctgcagacagagggagaaagacaaatataagctcactatgtagtgctaatatgacagtttacttagcagatagactatacagcaatacagatacagcttcactggttcagtggttcttactgtacataggaaagtgcagctatgcaactcaccggttccctggtgctgaacaaattttgcaatgtttgtgcccgcaaaatatgtacatttgtagagatgcttttgtgcattacgatgtataacactgtaagtagaacaaataaaacaatatttttccaaatggaatgtgtggccatttgatcattcattcatctggctggagctgtggaacaggcagcttgtatcttgttttttcctccttgtctggaaggatagacaaatgctctgaaccttatcagttatgttgtcaggtgctatgaatcgatcataatccatcaaactgtgaatcacatgcttggtcggtactccctcctatttttaatgttcgacactgttaacttttgaattttaatcattcatcttatttattttttatgcaactataaaataaaaatataagtcatgcttaaaacatatttaataatagttatatatcattttaagagtaaattgtactttgtaccaggtagagtatatacaccttgtttgacttttcacccggtagagtaaaccttgttttatttcgcactaggtttaacacatattttcactttgtatcagagaatatcgaaatatgagtaaaacatatgaaacttcttaaatttaaactatgtttgacaacattgcttttagatattataaaatttcattattttttatggtttgatgatagtgtcaagtgaaatttatttcaagacaatgtagtgcaaagtgaaggtatatgttaaacctggtataaagtgaaacatggtgcgttttacctggtgcaaatacaatttactattttttaatagggaaaattgtaaaaccaccacagaagtctgaagtttgacattccacaccataagtcattttgttgcaaatgcccgcccactactcggttttgttgcaaaccacatcataagtcattttgttgcaaatgcccaccctctactcagttttgttgcaaaccaccacagtgcacacatgcataaccgaatcaatatgttttcataaattgtgagccgtcaatatgttttttttacataaaattaatacttataagagtatagttttaacactctttatgagattcgatatatagaatagctaatgggagctttaaaattgttgcactgagttttgctatatgccaaaaaaaagaaagaaatcaatgaaatatataagaataaatctaatgtaaatactatgacaagattgacctccgtaacctatggtggttctacatcagcgttaactgacttatttggttaagcatgtgtgcaatggggtggttttaccaataaaactaagtaggatgggtatttacaataaaatgtcttatggagtggaatatcaaacttcaagagatttttggggtgatttttgtaatttcccctttttagtaagacaaatagttaaacataactgtgtatatgcataaaactcatgagcactaggatttaaaccctgctagatgaagccatgcgcccactactctatcaccgtgatgctactaacatacgaatctcaaaggaaaaaaaaagaacaactactccatgtaaccttagaaacacatgttatttttccataaattcttatgttatgtgcaacttgcaaggagttataagctctcgtagctaacaaaatcaatgtgcgacttctaggggcaaagctagagtatatgaaggcgtgccaaggaaccagtaaagaaaatttttagttataactcatctattttcaatgtaaacttagacgttttcattagcttaaactcgatccaaagtaaaaaaaaaattaacggaaatgctaaacttctgttgacagaaaatagaacctcaaatcttgtaaattttggatcactggatgtgcttcatgattcatgctcttcttctccaactctggcgtccacctcttcttctcctgcgccagcgaacccaaaatccggcagagggccgacgaattagggtcctgcggtggggtgggggtgggagggagggaggggagggggaagagggggagttcaccggctttagagggatggctgtgggaggcagcagcccgacggtgggcggcggatcgagcgggcggcgaggcagcggcggcggcgccgtagctgctgggtcgggagcgggcggcgggggcaaaacggaaagagtggtaggaggaggcggctggtggtggcgccccgccggcgacagggaagacaacagacagctcgccgctgccggcttgaggcaaaggagaggagagggagggggagggtgaaggggccggcccggaggcctcgccgacgccgttgacacctttcggccagccggcgaggccgggcggtggcgtgctcaggcggcggtggcggtggcggtggcggaggcggggcggaagcgctgaggagcggcggcgtgaggaatcgggagaggagagaggatttttatggtttggttgcctgcacgaatcttaaagcaatcgggtggtctaaaatttgcaagatttgtaagggggtttcctgtcaaatgatctatagacaatcccataaattaaacaagagatattttcattcattttgttctaattatgtccttagtgactttcaagagggattaagctcatctaacttacttttctctaacttgtgtcactgacatgtggaccatatatctattggactcacatattagtgcatcaaagtcaggggaacctcttccctctcgagagtcccctttcttctcgcggctcagttcttcagtttgttctttgagcttggtccctccccgaatcgatcaccggatttccacactttcccgtaaaaccgaaccccaatcgataaattcaaacaaactctcatcatcctagagctctactctagttttcctttttttttaaaaaaaaaatactacggagtagagctctacgccaccgtacactacggtctcctcctcatccccgaaacccaagctactatcctcttatcgccaactgacaatgacaagagggcccctagccccctactcctccgggcaccacatgtcagtgggcgtaacagaaaacaagtgttgacctcggggtgcgtggagtttttcccggagtcgtatcctttcgggtgacgcatacaagggcggttcggatcggacggctagtatatatccacctccgcctccgcgtccatggccaccgccgcatccacctccgccgccgccgtcgccgccgcatcgcgcctcctcgtccgccgcgcgccgccgcgcctgctgcgccggttaccccgcgcggcgctcgccgcctctcgcccgtcgccgccgtcgtcgtcgtcgtacggtgcagcagccgtcgccctcggccggcagccgctcggccaccgcgctaggatgggacacaccgccgccgccgccgccgccgcgggccccgcgctcgggctcaccaagcccaacgccgtcgagccgccgcaggtgcgtgttcgggatggggttcgggttcaatttcaggttcagtcgcttgcttggtgcttaggattgttgcagattcctgaactccccatctgtgtggtaaaatgaagctgctatatttggttgacttgatcacgactcgttatcgaatctctcgagctgctagatcgagatcgaactagtgatctcctacgcaaactacgtttgcatctttgtttagatttgccgatgttgcaagtgagctcagtctcaatctgtgcactactgtttttttttcaggtttcatttgctgctaaagacgtcgaattctccgaatggaagggagacatcctcgcaatcgcagtgacagagaatgatctggtcaaaggatcagactccaaattcgagaatgcggtgttgaagaagctcgacggccagctcggcggcctcctgtcggaggcatcggcggaggaggatttcaccggcaaagccgggcaatcagtggtgctccgcctcccggggcagggtttcaagagggtgggtctgatcggccttgggcagaacgccccctccaccacaacggcttgcaagggcatcggcgaatccgtcgcgtcagttgccaagtctgctcaagctagcagcgcggctattgtttttgcttcagtgggtgggatccaggaagattttaagctgactgctgcggcagcaattgcttcaggtagtgtgatcttgatgctcctttcatggaattgttgtgatcttgtgggatgcattggcttgatgctgaattttatctgtatctggattgcaggaactgtgcttgggctgcacgaggacagcagatacaagtcggagtcgaagaaggtgcatcttaaacaagtagatcttatcggatttggttctggtccagaggttgaccagaaacttaagtatgccaatgatctctcctcgggtgtgatattcgggaaagaacttgtgaactcacctgcaaatgttcttactcctggtatatttcttttgttaaacgccaaacagtggatctcctccatagatgccattctgatgttttcttatttcactactcactcatctcctttatccagctgtgcttgccgaggaggcatcaaacattgcttctacatacagtgatgtattcactgcgacaatattagatgtggagaaatgtaaagagttaaagatgggctcctacttgggagttgctgcagcttctgcgaatcctccccacttcatccacttgtgctacaaaccacctggtgggaatgccaagagaaagctggccattgttgggaagggtctaacttttgacaggtttgtgaaacatatgcatattttgtgaactattgcagtaacatacatcattgtgtaacataaatatgccatcttttatatggataattgttggttcttacaattgattaaccgatttttttgcagtggtggctacaacattaagactggaccaggctgcagtattgagctgatgaagtttgacatgggaggctctgcagcagtttttggtgcagcaaaagctttgggccaaatcaagccccctggagtagaggttcattttattgttgctgcttgtgaaaacatgattagtggcacaggcatgagacctggtgacattgtgactgcttctaacgggaagactattgaggtatgtttgttgtgatacaatgcgtatgattgtagaagactaggaatcatgattcattaacataaatcagtgatagtgtgaaaaaatgcgtttgcttatgtattcatctgtatttatttttcttcaggtaaataacactgatgcggagggaaggcttacacttgctgatgctttggtgtacgcttgtaatcaaggtgttgacaaggtaatgacttttatggtgtcatgttctgtccatatgattaccaatctgattttttttaatgctttgatgatttctctataaattaaaccttagtgcaagatattttattggcattgttggttttagttataatgctgatactcagctcatcaccctagcatagttgtatgctatttatttctaggccctttttatggaaatgtgatttatcttatggcctgatgtccctcacgaatctagtttgaggtactgacttatctttaaatgtcaaatgtagattattgatctggcaacacttactggtgcatgtgtcgttgcacttgggcctagcattgctggtaagattaaccaatcacatatcacttgcaatcttctccattaagtgaatagattagtgtgttcctttgattgctgcttgcttaaatgaatattttgtgcaggaattttcacgccaagtgatgaactagctaaggaagttgctgcggcatctgagatatcaggagagaagttctggagaatgccactcgaggaaagctactgggagtcgatgaagtctggtgttgctgacatggttaacaccggtggccggcagggtggttctattactgctgcactcttcctgaaacaggtaaatttaccactttattatgaatgaaattcaagcaaaacacacagccacatgctctaggtaggcacatttgaataaagttgtaagcagtgacatgctaatggagcctcatgcttgtatttgcagtttgtggatgagaaggtgcagtggatgcacattgacatggccgggccagtgtggaacgacaagaagcgggcggccaccggattcggcgtctccaccctggttgagtgggttctcaagaactcatcttaaatcatttattcccttgcattctcatccccctgaggatgagatgacacgaggatttcggaggagtttggtggtggcaaagcggccagctagggccaatgatatacaaaagtttagtgggcaatttagaataagaaaactggtcatcgtcgtttccttttcagttggggtgtcgaattgtttggtgaaatcatcatcatcatcatcatcacattcacaagatgttttggccaggacaagtctgttcgtgccgtgtagctctctcccttttctcttttgtcaaatgtggaataacgctcttccttttgatttgtgccccgggataatctgagtcataaatatttcgacaatagcctgaatcgtaacgtttccgctgtgctagtgactgaacaggggaactttctgactgagaaatcgcgatgcttctgtcgagagcacagccatttctgtgtgtgtattgctatgatgtgtctacgtcaggagtgtaaggtgaacacgtatctgatgcctacttgttcatgttggccactgcggatgccaccacacaagtgtgtgtatacaaatgcagaggcgaacgactgcacgtcactggaggataggatactttcccagcgaggcccaaattcatagaaattttcgaaagattttattcctatagaatatttttttaaagccctttctatcgaagaaatgaatcctatcaaatcttatgaaattcctatgaaaagttttggagaaaatttggcatgaggtagaatctcatgggaagttttctttgaatctttatctttctttttttttcctgcggtccaatcaaataatcatttatgtgtttttacgttttttttctatttctctgtttttcctataccccgttctcttaattgacaattttaacggtgcccgtaaaactaaactgtcattatatttgtagtatactatttacaatattatatattactaaaaaaatatccatgtgttgcaacgggtaattgctattttaattttatcattgttatacggtttagctagggtaaaattcactgtgggaactcgcttggatatttttttagaaaatcatgagcttcaattaagagtatgtatttcatctcaagttagcatgcaagtttttcaaaagatctcttatacaactccttttatacttccaaaaggaaacaagcttaaaattccaactcaaatacagatatgtatttaaaaaatgaaagaacttaattaaaaaccgactctaatatggatgacgtaccaaaataccataaaaacatcttcaatttttataatagtagagatatgatgcggtgtgtagtcatttgatggacaaagaagcttctagaatatactaaaataatttatttcaattaatcaaatcaattttctatatatctcaatcaaccacaaccttccaccatccggagccattgtttctcttattcgcggaataaacgaaacggcatatttggaaactaaaattaatttgtgaataaaacttttatatacatattcttagcaatctagaagcaaaggctgaaaactaaacttcgatgaaaaaacctcaaaaccagctccaaatttatggttgaaaattcaaaatttggctgataagcataagtataagcgaaaagatgaggctagaggatttcactattttttttttattttctgaagaatatctagacatgattacattttagaaggggggaagtatatggttactattgcagggtaagataaactttgactcccatgcaatgtcaaagtcctatctcctaaaatataataacttaatactggataggatcgaaagaaagacgtctactatgaatctggatatgacacaaagaaaaaaatcttgaaaatactagtatagaaaaattggagggagtacctttttttttctctttttcacgcggcctcatttgtatggagcccaatatactagtattcgtcggcggaaaattagttgggccgggccgggccggaatctttccttcctttcttgagctgcaagaagaagaggaggaggaggccggccattagaagcggaggacacgcgcacggcggtcgccccgcaaacaaaaactcgccgcggttttacagccaacgaaggcgcagcaaagcaaacgcggcggcgcagcgctcgccgtcgccggacttcctccccccccccgctccgattccgtccaggcaagtgcttccctctccctccctcctctctctctctctctcttcggtggaagcggcgcggctcggtgtacgctcgcgtcgcgcctcctcctttcccctcctcctagtcgcgccgtggatcgcgccgccgggatgggggttttgatctctatgcggtaagaccattcggtggccgattaggatccaaccatgcctaactgtgatgattccggtggttgtttcggttacctgtgcagatgcgaagattttgttacctttaggattcagtgaaggtgcttgtaatgttaaatccgtaaatgtagtagcattatggactatctatgatgaagggattaagaattttcttgctattagttttcatgaaaataatggatttttcccccacacattatgtggtttgattgtgctatttatcttaagcaaacagcaaaattagaccttttgttgattattactacgcatgtcatagtgcaatcttattagtacttgagttcagcaatactgttccggaacatcctttttttttaaaaaaaatgcagagcatctaaaagtggagtgtaaaataaggacaaactgatcttttttttaataaaaacacatgtgccgagagaagcacatctcttactagctctacaactagtgctcagattgttctgcacatcagtagcatagcaggcattaattagtgctgaaattttactcttgggatgtttaggctttccttgatcttctgtttcatagctttgaaatgtttcttaccgcagtgtttagttcagatagatagctatattttcttattccgaaaagaaaaataaagataggtagctagctatacttttggaccgggggagtaatagatttacaagactatcagttgattcatagagagattgattatttgatatgttccctttgcccttttgcctcctcatttcattgtgcagatactgagtgaaaacctgctgctaagatgggtagcacagaacacccaattcctgcgcagtcacctgcttgcccaactgtgagcgaaggggggtcggctgctccagctcctgctactgattcaaagccaaagaagaagatatgctgtgcgtgccctgatacgaagaggctgagagacgagtgcatcgtcgagcatggggaatctgcgtgcaccaagtggatcgaagctcacaagcggtgcctccgagctgagggttttaatgtctgaattttctctagtcatctaaaggtattacatttacttttatagaagaagtgatagaatatccggtttgagacttgagatgcaaattggatccaagagattagctgccctgtttttgcatgttatcgaagtgatagaatatccggtttgtgaattgagatgcaaattgaatccagagattagctgccctgtttttgcatgttatccctgtatgtcagggaacttattttcatgataaataaaggtacttccgttactggtgacactatacatggctatattcagcaaattacttcatggctcccttttgcgttgaattgcgtacatgatatattctttttcgatgagataattgctcagggttccttcagagcacaggaattttataggattttcacaggaaatagttcagttcctctaaaattccagcgaaattcctccaatccaaatggaaccttagtggtaaacagagcggaaggcttcaagtttattagctccttgttgcgatgcccatggtttccatggcacaaccatccttattctcttattatccttttcccaacaccaatcaatcacactcctcacctatcaactacactgcacctctaccaagcatcttttacagatttctagactttgtagctagacatcagttgttggcaggaaaccatcaggattttggcaatggctcccctgccaagaacgactgaaacatcctgaatgctctccttggctgaaacagtggcacctcatgcccagcacctctcactgacgcaaatgtgagcccttcatacacctcagaccatcctccaacctgcacacacagatgcaccatttgcagatgaagttacagactttaaagtgacaagatttctgcttaaactgcatctgacaaacagcaatggagattgttcactacctgtccagctgagtaccaagggtaccagcggatcttcgtcttcagtccaagatggctaagcgcaaacctcgttgcagtaaccggaacgactgaatccgtgtcgccactgcattttcatcaagtgacaaatagctcatgatctctgaagaactagttccatgctgaaccaaaaggataaattcaccaattccaggtcctccagctcacctgaacacccatatcctcagcccggccttcatcagcaacttgtaagtcggcagcatggagaactctgaatctcgccacgtcttgatgagcacatcactgtcaaatccaacccaaatgcattgttaaactctcccaattccaacctcagtgatgccaagaaatatcaagaaaaaaaaatgtcagctgatgcatcaacctgcaggctgtccatctgtaaggaatcccagtgatgttggcatgcatggccttctgaacatccggccggttgtagtacttctcggcgtatgtctccgtgcaggggtcgtagccgaacgaccggcgccgtaggaaggtgtccttgaacctcagcacggcggccttgccgcggcggcggccggtggcgttggcggcggcggcggcggcgcaggacggcgtgtagatgctgtactggtcgatgtcgccgaactcgtggttcatggcgtagctcatggcgcggttgcagagcctggagacgttggcgctggtgaagttgcacgacgacatgatggccttgtaggtggtgtccgagatcatggcgtgcgtccaccagtaggtcaccgtgccgatgttgtcgtagtagttgtcagtcaccccattgcccacctggtaaaatcaggatcaccatcactcacacggttaatttcagtctgaaactcgtgttctgatatactagaacatatggattggttttgtttgagttcacttggttattttcagcctgaaactctgtgtgagagatcatagaacatatgggttaagttttgagttcagggtctgcttgtgtttgatggtacttacaaggatcatcgcatggttgtttttagtctgaaactcttgccagaggtgcaatctatggttacagttttcagttgagaatttgttcgtgcttgatttaaaggactgtctactttagtttaataatactcacaaggatccccttgaggttgatgaaaggatatggtgaggccttgttgaactcaacgatcttccttgccaactggggaacgtaatgtcctagaatttgtgcaaattttgttgatggacagtagtcagatgatgcagagataatagtttcagagatggtgatgcaaacatcgccagtttacacattaccagcatagctttctccagcaatgtagaaatcccggtgccgatactgtgggaagcgggacatccaactgatcaagaactgcaacgcatcttgagctgcatcacatcacatcacattcagaagaacatcaagggaacattcagcagtttgccattttatgatgcagtgttaagacagatttggtcagtaaatttcagattacatacctgtcctctcatcaccagatgtcttgagatcagaggtggtgttggagtatgaaaagccaactccggcaggtgattccaggaacaggaggtttgcctctgcagtaacaaagtgttcatcagtcagtgacaggcattgcatcattaggcatgatgagtttctgagcttagtcttagtacctctgttccatgagtacttgttcagatagagccctgtcccgtttgtcttaatcctaaatgggccaatctcttcagatgctccatacgcaatcgatgagcatccaggacctgggaaattatcagcaaatattactggagttaaataaggatgtttctacagctacagtaactttaaaagataattagcaatccaatccaaagtgattagaacatcagactatcagagagatactagtagtaaaacagtaagcactactgctatcttcatgttacagttgctatttacatgacatgcagctccaatgagcatggatatacttgagaagctccaaatctcccaaaacaagcaagtcctaaggaaaaagaggagatagatctgataatccaatcaagaggtccatccttctcgcagaggcgtgctctgcaactccagaaccccattcccaatgaataactagtcaaagagaacaagccatggtgccagaggaacccactgcccttgcatctctctctctctctctctctctctctctctctctctcatctgaacttttattttatcttctctactccaaatcctttgtttatgtacaagaatgaagtccaaaggcaagaaaaggcatctgcaattctgcacgcaagcacaacttcacaagcaattcaagcagctgtggttgtttcgatctcgcaatgacaaatcgacaatgcagaggtcgtcggccattcagccacgctgcagcaaatgtgagttgttgtggggtaaaaggttactgtttggtttgtaccttgtggctttatccagagggaaggaagcagtggtctctgcatgtgtgtgatgatgaccagagagatgaggagcaaatggaataataataattgatcataataaggccgagtgagttgcaaacagggagaaaataacaaaatcaaagatgactagtagtagcctttgtagtttttcttagcttcagctttttatttggctttttctcccttctcttggcataagccgatctagctgattgcattgtgtaactataactcttttcttctaatatactgacgtgcaatctttttgcgcgtttggaaaaaaaactagtatagtagccttaaattggtgctgcagcttttgtgccactcattcactagcaaacatggtgtggtagtatggatccgcagagtgcagagtactactacagtgcagacagaggcttcatcatttcttggcccctcttggcttggcttggctacacattttacagtgcttggctacagattttattacagtgtttggcttggctacagatttactactaatacttcacatgagatgatgtgggatgtggctaagattgcgccgatctccaaggacgacgggatcattcatcagagcgcgccattccagctgcagctgcagcagatgctcgcggccggccggccggccttcagaagaattctgaatcagcagcagatgagctctgcatcatcgcggcgcggggcgaggtgtgagagctgtcgccttgccgctgtacgctgctcgattcacaggctcacagtctcaggtgtgtgtgtgtgcagcggcagctagcgctgattgcagatgttcagagactgttctttcctcctaggaatgagagatggagagagataacaggagtactcctatgctgtaaagcttggaatcgatttttgaattagagtggattaatgcaggctaagcaaggctggattagtggttagcaatgaagtgattagaagggcctaagctgaacagttttctagtatctccttagactccttacactgaataatcatgccatggcaacatggctggctgtaaagattaaagaatgaccagaactacacagctcagtgtaaaagggaaaaaaaaacagtacaccgtgcaggacaagagaagagatttggtggccaaggaataaatgtcaaaagtccaaaagccaggattacaattcgtcagcttgaacaaggaacaaacacacatgacaacatatgcctctctcacacagttgtagtcaactagtggctggctgatgataatatcccacagatcaagctcataaccacacttaccaggaataaactgcaaatgatccggcataagactcgacagttttgggcaagtatacaggttcagagtttcagtcagtgtgtttacttatgcttaattgcccctatgtaggagtactagcgagggcttgtttatccttacctatggagaaaagaaccatgcatgagtttcgaagcattgttcttgtctggctctctctctctcacacacactcaagtctcacacataaatacatgtaattctatttatgctgtgtttaaattcagggtaaaattttttgccgtatcacatcgcatatacgaacacacatttaaaatattaaacgtagtctaataacaaaataaattatagaatcggtcagtaaaccacgagacgattttattaagcctaattaatctgttattagtaaatatttactgtagcatcacattgtctaatcatggagcaattaggcttaaaagattcgtctcacaaattagtcgcgatttatacaattaattatttttttgcctatatttaatacttcgtgtgcaggtgttcgaacgctaaatgtgatagggtgaaaaattttgatatgggatctaaacagtaccttacacaatgtgacaaggaaaaacgcaaagggtttagaggttgcatgtcgtgttgcccggaccagtgcacggctgctgctgccgcctgcacggcgccggctgcccgcggtctcccctgcatttactctctacttcctcgtgatgctaatgtttgttcagccaggcattggtcatgtcttttgcacacacacatttactctcctgtattctctgcatttactatcactgtgccatcgctgtgctctgccttcaaaacagctagctatagtaacactaccaattgctcgatcaaaacactcgtgtgtccattagaggatcgaacacacacacacacacacacgcacaatgtcctttacaaagacaacaagatcatctatcagagctactagctaagctagcaggaagaaagaacacaaatgtatgtacagtaacttgcattttggtttggagcgaagctttgagaggaactcagaaaaagagaatgtggctttccgttagagaggcgtgtgatgacaagaagtttgaacctaggagtgcgtgtcaaaagctctggaaagttgcttgtagctctcgatccttttaaactccagaaaagctagtgcttagatagctaaatgctcatgaaaagactccaggaatggatgtgttgtgttctcggtttggtcaaacacgagtacacgaccaccgatccatctacttctgtacctttggacttaattgagcacagtagttaggaccaatcaagaaccccattattgccagcgtgtgcaaaattaacgaacacgaatgcaaaatgtactatactaaatacaactactcgtacatggatcgaatcaatttaaggacgttgtgaaatttattcatgcagaaagaggtcgaagagaattcagaaatgtgcagtgtagaacagtatacttaacttaccgccgttgagccagaggacgaggggcttggtggcggcggcggcggcggcggcggcctcggtgagccagtagaagagcgcccgcccgctcgcctcgctcaccgccacgtacccggcgtactgcgcgaacgccaccggtggctgccccggcagcgcctccacccggtcccgctccgcctcgcacccgccgccgttcacgccgacggcgaccgccagccacgccaccacaacgctcgccaccgccgctacaatccgccctcgcgtcgccattcgcgacgacgaaagctaagctaagctccgatcggaatgtcgcaatgcagcagcacaaacacaacgcagcgacgaggtagctagctagctagctatgcggcgttggatcgggcgagagcgagatgagctcgctctggggaagcatttaagctggcatgcagctcgggctgagccgaggagggagaagagagcaaactaccaccaccattgcctggggcgatggatgctgcagtgagctgcctacggcgccattaatacagcagctgctactgctactgcagggcttggaggtctggatgggggaggagaggaggaagaggaggagggcatgcagtggctgcgggctcggggtggagagatggccaaggccataaatgcaaagtagctcaagctctacggcatgcggcagtgcccagtgcagcagccactgcactgtgctaacctctcctctcctcatcggattgagatcctcttcatcacttattaaattcactctcttcctcacgccaccgtatgatgtggattttttttattttttagaccttttgttttttaaattttaaaaataaatcttttaaaaaacggaaccttttggccacgccaaccacggtggcttggtagagcgcgtgtcgtgacagagttatttggcaacgccagctacatctggcgtgacagaattatttggtcaaacaggctagcgtggctaaaagattcagatttaaaaatattttttcaaaaggtctactttaaaatttttaaaaaaacgtgtaaaacaccaagtacttcacaaaagttatggtaacggttattaattaatatactctgtattataatataacaatatagtgtcaatttaacaccatcaaatattatgaatctgaaattagataggttgtgttaaatcgatagtattttgggtggatataacacatggatgtttcttgggctttttaccaaaagctgggtcattattaatataatgatctttgctctaaaagggaaaaatggattgcagcataagttataaatttttcaaagaaaataaataagaagttatgcaacttatttgtaaaatggttttttaagggaaaacagtatgagaccgtgcattttcattaaatatagcgggataaaaatgtagcctttagggggcaagaaaagggaaaagaactctataaactatatattgtgaggcaaaaggtcacgtaagctctaaaatgttctttttgactcatggggtaagttgatactacatgtatcaagattaacaagatgcagtagcatttctttctagccatgccttagtggttctgaaaacggctgccccacatacaccacctttgcttgttgtttcgtcaagtggccaaaaaagaccattttgcctaaatgggttacagccaaaagaatcatttcgccccacaggttataggagtgtctagctagtactgttaaaaaatatttttgggaatatcaaaggctataaaaaagtttaggtattcaccagatatgtgcaagataacaaacaaaaactactgtagctaagtaggtgattggcatggggacagcagacgcacgtaaatctagtcaaaacaagatcgcaagcaacgacgttgacaaaggcaaatttttctaagctagaaaatgctgcaggatgagatgagctagatcgatcgccttggtaatgagcaagaaatggagtcaagattcagctagctaagccataagatacctgtaacaactggctatacatacatggatcggagcattcttttttctctcatcatgcaattaaatcatgtcgtcatctagcagtggacaagaattttctacacctagatatcatggcacccatcatttacatgtgactcaaagtctatacacaagcatgtaagtttatttttatctacaactagaaaaacaataatagtaaaatcaaatagtggatagtatcgtacatcgcagataaaatttgttttttttaattttttttcttcatgtgtatatcaaatttaaagttgcatgtttgtaaatgtttgtatagtgtcttatatatattatcacagtctatcttattaaattttataaaaattttatgtaactatttaaattacatgcatacacctctataatagtgtagaaaatacttccccatctagcggtgtgatgatctgatgaaacccatatacgtggaggtcgcaatgagcaagaaccaattgatcgcatgcatgccatcccgtctcagctatcgtcgcgctcaaacaacctagctagcttttgttcgtcgtccttgcagctggacactgcctggacatcaacaagcagctatatatagcttaggttcacatgcaagatagcgtaaccggatggcaatgagtcaatgacaaccagactgatcaactcgaatcttcctattctgttgccgcaaattaaatccttaatttgtctccattcattcccaggtaaaaacagtgtcattagcctagttaccttggtcctaattaaatactgccccctccattctaaaatataagggatttataatagtactaaaatatactacatctatccaaactactttatattttgatacggagggagtatctcgctttttcacggagtccgatcagttttggttggctttacgaaccttgaacatatgtattaaggtggtgtttgaatctcctgaagataaagattaagtatttcacacaaaattagatgataataacgtgtgattaattgagttttaattattgtaaacttgaaaaatgaattaatctaatattttagaacagctttcatatagaaagttttcacacgaaacacaccgtttagcagtttaaaaaacgtgacatgaatattcaaaacttaatccacttttttaagtggaaacaaacggagcctaaatgaagaaacattatgattggataaaaagttatataagtagagaaattaaatgagataagattatgattagtctgagaaaaaaatattactaatagtggataagttattatatattttaggataaatcttaagtactacttatattttggacggagggaatagtgggtaatttcttttttttttctaactctacatatctagatttctataaagaaataaaattgtatcactgcattattctgaattctgaatgagaccttacctagtcagagacagactctgcacacaaattcttcacttgacaagctacagggagcatgcatgcagatggatgggcaaattaataatcgcgccacgatggctgaaaacaactgatatattttgcgtcacagctcaaatcgatctgatgacgtttttgacaatttgacccggttaaattaaagaaatctctgcaggctggctgccgcgatgagggcccaaactgtacccataattttacctgtactcgtgatcaactccctcgtatactctgtctccttgagagaagcagcagataagaatgatgctgcttctgccgcccgtcttgtctcttacagcagagtactaatgtggtgatgattcctcctgagaaaagcttgataattggatctatgcatgcatttgcactgtcattaacggactaacagtttcttgcatggaactactcactcacctactgctctgattagagctgagctttgtcagatggtgtactggtaggagtattgtgtttgattgattaagggcgcctagaaagagagggtctccccttccaagaaccaagacgccacactgcacacttttatttacattgaactgtactacacggctgtagttaactgaccaccacccctaggtagatcctgcttgctcagtcactcacactgtgccaagaattgcctatgtttgttctgttccctgatgaacaatgccattgcactgtagtatgtatgtgtgcctactgcctcactgtttttctgtagaattcagagagagaaagaacagcaaaacagtgacattaatttttctccatggccttgttgtcttgaccatttggctgattcgttcttggatacctgcgttcttggacgcattgtgcaatttgcttagtgccaagctaagctaccaaagagtagtacattagtacaaagctcaagttggattagcacttccagtaggctcatacacaaattaagacaagcaagccagcatctcaggtatagtagaaccctagctagtacataaaatgagaagctttgtgctaaggcgatattaggtgtcgaatgcttcgaagtagctagcactccaatgcgagctgttgcatggaattgatggcgatcgagtactactactgactagtgaagtgaaggcgacctgtgatgagttgaggaaaggagtagggacctgcaggtaggttatctctgaactttttggatagctgaagctttgaggctttttgcttgtacagggccaaggtcagtgatgaagaggcttccatttctagtagtaggagtagtgtaggagtatagtactagaattgcagatttgatccgtcgatatggcaatgtttggcacgggaattcaatgccaattcattgctctgttttcttctgaaaaaaatcaatgcaagaatttcagtagtagttcacttctcaccgacatatgcatgcatggaccatcaaattcaatatctgtgcatgcattgtgtgcacagagagaaccatctgcttgttgatcttatcactaacaaggggccccgggagatttgtgctggttgatggggcccatgtagcagtgaaaacactgaaacagtgtacaattctgtagagtaaacagcactagccactagagactgttctactttgatctgaagctg

SEQ ID NO: 9575 - DNA, 60314 bp, Oryza sativa
aagagaagagaagagaagagtgagagagagagagaggagggagggagagtgacgtggcatcctgacacgtgggctcacgctgattcagccgccacgtaggataaaaccggtgtcaaaaccaccgaaggacctattgtgaccggttttgattagttaagggacgctgaatatctggttttgcggttgggggacgagtttataactcaatgacaagttgagggaccttcggtgtactttttcctaagggaaatgtcacgactcacgagcagcaagcaaagcaggaaggccgagaataactgggctgcgtgggccatgcggtggcattttacgggcccatcctccttccccccgcgggtgggaacaaattggcacggccgcgcccaatttcatttccccccatttcaattcatttcctccgggcaccacccgctcccttcccttccaccgcacacttcccgttgcggcgccgatcgccaacctctccggcagcctcgctcgccggaatggacccctccgccgccgcccactggtgggatggatctggggggagaggtggaggacgacgccagtgcaggggccgctcctaaccctggtggaatcgccgggggaaaggagggagatctcgacgcggaagattcgggaggagggagcggagcagacgacgccgccgccgccgtttcccatggcgccaccagcaccgactcgatcgtgctcccgccggagccgacgagcggccacctggcgagcctcctgcgggcgaggaagctgatcctcgtcgtggacttggaccacacgctcgtcaactccaccgcggattacgatatctccggcacggagtacgtcaacgggttggcggagctcgtcacagatgatccggggaggggcctgttcatattggatcatgccagctggttctcggcgttcatcaccaagctcaggccgttcgtccatggcttcctgcgagaagcgagcgccatgttcgagatgcacgtgtgtacaccctcggggacagggactacgcggcggcggtcgccaagctgctcgaccccgacggcgtctacttcggcgaacggatcatatcgagggacgagtcgccgcagccagacaggaagagcctcgacgtcgtcttcgggtcggcgccggcatcggcggcggagcgcgccgcggtggtcatcctcgacgacacggcggaggtctgggaggggaacagcgacaacctgatcgagatggagagataccactacttcgcgtcgagctgccgggacttcgggtcgccgtgggagtgcacgcactccctgtcggagcggggcgtggacgagagcgagcgcgccgcggcactgcgcgtcctgcggcgagtccacgcgggcttcttcgccggcggcggcggcagcttcgtcgcggacgtcagggaggtgatcaggcggacgcggcgcgaggtgctgctcgggtgcacggtggcgttcacccgggcgatcgccagcgacgaccaccactccgtgtggaggagaaccgagcagctcggcgccacctgcgccgacgacgtcggcccggaggtcacccacgtcgtcgccacgaacccgacgacgttcaaggcggtgtgggcgcaggtgttcggcaagttgctcgtcaacccagagtggatcaacgccgcgcatttccggtggagcaagcccaaggaggaacacttccccgtccgttggtaaaccggatcgaagttgagattgtcagttacctcgccaccagcattttccagtgttgcacgtactggtatgccaatttcattgcatcgagcagtatcgtttgacagaaaaccccccttacaaatcttgcaaattttgaaccatccgattgctttaagattcatgcaggcaaccaaactctaaaaatcctctcgcctctctctctcccgattcatcacgcgccgccgctcctccgccctagcgcgccgccgcccggcctcgccggctggccgaatggtgtcaacggcgctcgcgaggcccccccgaccggccccctccctctccctctcctctcctttgcctcaagccggtggcgacgagctgtccgtcgtcttccccgtcgccggcggcggggcgccaccaccggccgcctcctccccactctttccgctttgcccccgccgccgtcctccagccccgcggcttcagcggcgccgccgccgcccgcctgatccgccgggctgccgcctcccacggccatccctctaaagccggcgaactcccccttcttccccctccccctcccccccacccccaccccaccctgggaccctaattcgtcagccctctaccggagtttgggtttgccggcgccggagaagaagaggtggtcgccggagttggagaagaaaagcacgaatcgtgaagcacatctagtgatccaaaatttgcaagatttgaggtaggattttctgtcgacagagctttagcaattccgtaaaactaaactttgtggaagtatctatatattgtcattctttgagactcttatcttagcgacatgcatgcatgcatctagaaaaagtggttgtgccttatattatggaatggagggagtatatactttggtggaacaggaaactatagctaatgatgtattttgtaaggtgcaataacctaagttttgtattggaaataacgggatttatgtctacatatatacatatggcacacaacaccatacatctcatctagtttctttaattatcagcactgagctcctttattagtgggcttgctggaggctagagcccaagcagttaggctgaggaagtgaggatggtgctcgctggctagtctgatatgtatacgggggctaaggacatgatatgtgctccctccgttttacaatataacactttttagcattgcctatgtacatatagatgttaataaatttaaacacatacatatgtctaaatttattaacatctaaatgaatgtggacaatgctacaaaatcttacattgtgaaacggaggaagtatatgcgatgcgtcggctacatcagagtttcatctcgttgagtctgggttttgatcttgcaccttatctaacgttttaaaactttgaccttttggtttctgcaaacaaattaaagacttatgggccttagcctataggtttagacaatgtaggccaagttattgaattgcctacaagtatgaaagtaccaaattacctataagtgcaaaaggctcgttctgtctacaatctaaccttgtcggtggtgtaattatgggcaattagtgtcacccatcgaactgctattggtcggtcaagtgggccatgaatgtgtcatttttttctttccagctaaactcacataatcgtatatatcatgcctctagataggggccacgtaatcatggtaactcaccgtaccatggtaccgaggaggtaccaatgataattttaggtatcacaaatattttattgttgcattatagagatagtgatatagtaagagtatgatgatatatccatggcacccactacttagaatgtattctctatacctatctatacctatctagttcatccccacttagtgtaattgctaccatttaccatttatatgtattctcatgcttccatatcacataaattgatttggacctgcgttagcgaaaaaaaaaagattcaaaccattaattagatcagagcagtgtggtcagatcgatactaaacatcatggtcatgactagacatagctaaaattagaggtagtaaccacttccactataaaacttgctcttagcaagctgtctgtaaggcttttcgggccatatcgtaagaggtttgtagagtatgaagtcaattaaaatggtttggctaaattttggtggagtaaggaatatgttcatgtccttatatattttcacactagacaatgtatgaaacatgggaatttcgctatcgtcacgtcatgatacaataacatctcttgtaaatatatgtccttttattttttggggaaacatgttggcattgcctcagatgttcaggtttggttggcaagagaagagacaagagggtgaagaagccgacatgtgggttccacgctgactcagtcaggttgaccactatcaagttgtcatgtgagccaaaaccggaaactatactgccctagaaccagtggcggagctaggtttggaggaggagggggctcagccttcttcttcctcctccagccccctctctccccccattttcttcttcctctccctcttttccctcctctcctccctcacatttccatggagtccagcagggtaggggggctcgagccccctccaccgctgcctaggatctcaggtacaccaatacacaattcaaacacgtcaaagacgaagggcttaaagtgaacttattccctcaacgcacgcacaacactgaattaagtgtggcgaaaacaacgggaaatcggcccatttcctatatcctggcccaatatcaatccatttttctagggaaaaagtgcgccgaaggtccctcaacttgtcatcgggatacaaaaacgtcctcgaaccgcaaaaccggatatacagggtcccttaactatataaaaccgatcacctgagatcctttggtggttttgaccccggtttttgtctacacggcggctgagtcggtgtgggacccacgtggaccccacatgtcagcgtgccacatcaccacccattacttcccctttcttttttctcttccttttgttacttctctttgccgtgagggagtagcacacggaacaggcagcagcgagccgggttgaccggcggtcgacgcaggtggcctacgagcgcgcggcggccggcgaagcggagaagagcggaggcgcggagtggcggtggcggcaggcgggcgagcgtggtggccggcgtcctcctcctcctccaccgccgcatcgacggtgtgtgccctgtttctctcggtggtcgtcggcgtcgccatggtagtcgtcggagtctgttagcaacccgatgcaccaagcaaatagcaacaatatctaaaccaatttgaggtgaaattgagcaagtagctgagtattacaagcttctagaaggttctatagagggagacaggaagggtgtagtggctggtaggaaggagtagtgagggagagagatcgacaaggttcctgcccaaacctggtcgccgctgccgccgtggccgaagccgccgattgccagttctgttctatttcccctcctctcctgtaagctgctgttgcccttgtattgtttcagcttgggcttgcttgggcttcttggcaacgggttgcctagcggcccatgtgtagcccagccgagaccctgacaatcccttcttcttgaaattcggcttgtccccaagtcgatgaagaaaacctcctggatcgaatgatgtttgaagttcctcttgtaaaacttgatgctcaagtacagcaaccataccaatctgtgtaggagcatcagataaccaggcgttgcatagcatgatcaaccatgcatatatcccagtcattaccaccatatgattgtcccttcttggattgaattcaagtaaaccggccatggagaatctggatagtactgcactaaatgtattccactccaccaccagtataacctcatgtatctcctctgatgcatgtactaatcttagcccactagaaagaaactgaggattgatagacaattcggtgagcacttgccatgcaactgtagctatcagttttgtatactgtagagagtatgtgtgtcgctcaataatctgatccactaaatgtgtttcagccacctgattaagcaagaaaggcaattgatttccatactttattccatagttatcggtgttctgttggctatacatgcattcttcaccttggatgacatttgcattagttggcaacaagcaatctaaagtattagccaagatgagcccttgagcaccactactgtgtaaagccagatctgggattttcttgagtgcatcactgtagatatcatccaagttttcttcaccttggaacttccatgcataaggtttcagataatcatttagctttgccggctggaacgaggccttcatcacctcccgcaccgccaccggctgcgcgcggtcgacgagcatggagaggagcagtgacaggttctgcttcagcgtgcggagcgccgggcggatgcgggcgtcagcgacaccgccgacatagagcccatcgtagaacgagtggtgcgagtcgaggaagatgaggcggtacgcggcgacctcggcgacgtgtccgaccgcggattgcgccgcggcgcgcgcgcggtcgaagtgggagcacggcgcgaggaggcgggcggtggcggcggacgacgacgacgagcacctgccgcgggagaagaaggagagcgacttgtcgagcgcgtggacgtggctgaggatgaagtggagcgtgttgagccggacgtagaggcgctacgtgccgcggctggtcgacgggcgcgggttctggccgccggacgccatgccgccctggccttggtggtgcccgtgggcgcgcgggctcgacacgggcacctggcacggcgtcgccaccttcttccacagcctgatgattatcgagtcctggttgcacctcgtcagcggcggcagcgacgggcacgcaccgtgtccttccattatcccagctacccgcgttctcacaatggaggcaccgtggagttcatgtctctcggccggagcaagaacgccatcgtcggcatcgaagaatggctacactacttattcatccaatcacagaatctccaatatgatatagtactactatttactagtataggaatgaatattcagggttagtcgtacactcataccataaactactacttgcatgctccatggctatcacaattgtatgacaaaatgaagatccactttcttgtctctcatgctcgtcctcaactgaaacaagacctccaaaaagcttcaggatcaaccaaaccattacatacacaacatacagactataaaccttcacaatcatcgatcacaggctataaacaatgacgaatcaagcaataaaaaggagatttttttaaaaaaatatcatattttcacggtgtctggtgtcgctagcggcgaagaacggcggcctgtacgtcatggagatgtatccccggggagacggccatgtcaccttcgaggtgctcgcctacggccgccacagccagccgccgcccgcctacgtcggcagcagcggctgggccagatgcagcatccaactcgaggactggcactggcgcgccctcccgcagcctccctacgtgcagtacccgggctacgaacgcgacgaggcgccgccgtgaaacacccttattacaatatcacggcgaccgcggtggtcggcgactcacgtctctggatatcgacggagggcgtccgcacgtccgcctttgacacggtgcgagatacctagagcaagcagggcgagtgggcgctgctgttcaggggcaacgccgagcacgtcgcggagcacgacctctggttcggcctctcgcgccacggcgacaagctgtgcgccctgcggcagcacccaccaccctttgaccgcttgacgcggagctccccgccggcctcctcccctccccacccgccggtggtctgcagagagagagagagagagagagaggaggaagggagagaagatgggaaataaagggtggtgacatggcacactgacatgtggggtcccacgctgattcagccgtcacgtagaccaaaatcgggatcaaaaccaccgaatgatctcgggtgaccggttttatataattaagagataccgtatatctgtttttacggttcgaggacgtttttatatccgatgacaagttgagggaccttcagtgtactttttcctttttctagtgcacatgaaaaggacaatttcaaaattgagattttgcgagcaggggcgatctgtggccgtccattcgttgtggacgttaaatcgaccccgtcgatttgtgatagaggttacgccgcatctgcgcgacccgctaccacccacacatcttcccgtctcaaaacaaaaagaaacaaaagaaaaaaaaaatccccatttctctaaaaatctagaggcttcttctcttctcctctctctcgttccccttcgtttcgattcgtctcgcccaaatcttcaaatccaaatccgcagcggaggcggccggggcgcggcggccagatcctggaagagaatccattccgggaggggaatccgcgcatgccaatgtcggatcccacggcggcggtcatccccaagccggggggcatcggcgtcggcggcggaggcggcgacgacgaggagccggtggagatccgggaggtgtgggcggacaacctcgaggaggagttcgcgctgatccgcgacgtcgtcgacgagttccccttcgtcgccatggacacggagttccctggcatcgtgtgccgccccgtcggcgccttccgctccccggccgactacaactacgccacgctcaaggccaacgtcgacatgctccacctcatccagctcggcctcaccttctccagcccgcgcggcgagctccccgcgctcggcccaggccgccgccgatgcgtatggcagtttaatttccgcgagttcgacgacgcccgcgacatcttcgcctctgactccattgagctcctgcgccgtagcggcatcgacttccgccgcaactccgagcgcggcgttgacgctcgccggttcgcggagctgctcatgtcctctggcgtcgtgcttaacgattctgtatattgggtcaccttccacgcgggctacgacttcgggtacctgcttaagatcctcacatgcagcagcctaccggacacgcaagccggcttctttaagctcatgaagatatatttccccaccgtgtatgacatcaagcacctcatgaagttctgcaatagcctgcacggtgggctgaacaagctcgccgagctccttgacgtggagcgcgtcggagagtcccaccaggccggttcagatagcttggtcacttcatgcgcgttctggaagctcaaggattcgttcttcgctggctctaccgagaaatatgctggagtgctgtatgggctcaatgcggagaatgttgtcagtgcgcattgatggatggtactcctctttgaattttagctttgtgaatggattgatttaggacagaaaatgtgacaaatgatcaagatgatgttatgtaggtcaagtttgtctcactccatttgggtttaatgtgatcctagtgttcttcagttattcgcgatgaaatagtgaactgtatttatgttaagttgttctgtccgctttcattttctcctacctggtttagttagataggaaagaaaaatcacctttaaggattaggagatggtaaaatgaatatattttgttgctgttttgtcattgatatgtatagcatggaagctggttgtttccaaagagtggggtgcgggtacatcaaagtgctcaaacatgtaacttgataacattacaatacaatacacagagcgcgacctctcttcacatgggtattttagatgctgttattttaatttcccagaataattagttactctaatatgtatccttctagagaataacacaatgcaatattgagaataagggcatctctctatttcgactttgtgctgcagtttttggtaatctgaggtaatgctatctggtctacattggaagcctggaaacatttacggttttcagccaaagttttctactatttgttcatcaattcaattatccagtaagcctactgcctagcgaatagttctgggcttctggccaatgttcactaggcaaaacctctgtactccatggagtaaaactacagtgaaatcctgcaaatatgcaaattctgcagatttgctaacaaaatattagatacgcatctagctatatgtgtctcttgatccagcaattaagtcacaatgatgcacagagcatgaatactagcagtttactttttccataataggttgtgggttacagtaacaaatatgcatgtcttgagacagtgatgctgatactatttcccttgccttcctgcaacacttggattgaatttctacttatccaacttatattctagatacaacattgatccatttacattctttgtgaaaaacttatcataactagatgagctttgaccacaagttacatcattccctgcaatttaatagcatcagattatttcattgctggatgtaccggaccactcttttttgctttgcaactagaatattagttcctttggcactaacatgtcctcaaatgttgcatgtggagatgaaatctagggcatttaattaagttactaacgagtttatttacaggttctgttggaacccaatttagagaagaatctagttagctacatcttctcgttttattaagactcaacttggacactaccttaatcccggttgattgccattgtccagtttatttaaattcatgtatataatcggtccttcttaagttcggacattgttggagagctattctgaataaaggtaatggtggctaacaagaaacaaggtaaggattgttagaaactggagaagtttgggtgccaaaaagcttcaaaagtattgaaattgtctaatgtttcatattttgcaggtaaacctgataatactttcctagtgtatcattttttaacgggatgcatttctggtgttaaaatgtggtactcgtcatgccaacttgtgcatgggttcaatttgaagactgagaagccttgtgcacgcatgaactttcttcatcacagattgatggcagcagcagcctatctcaattccccaaatctccagggatgagatcaaaccatctgcattgcacaagcttcctcccatggataatgcaaatgtgtaatgcttatgcaattgtaatgtgtagtgttaaacagttgtggtcatttttgtgagatctgaatactgattccataaatcggggctggccagaaacaagtgcttattgcatccagagaacatgttttcagtttgcctcacaatttcactaaaaatatcagtacagatttgttaacctccaaaaagggaacacagaaggcgagctaatatgcaagtttacatcatgcaaagaaatggcctgaagtttacattagaaagaattaacatttttcctgtcaagtctctattgacaatgaaaatcttaagcaggcaggagtcgttctatcatccctggcttaccgtcaagatctttttctcaaaacaccgtaattggatcaaaagttcaaaacagttgccatcttaagtaatgcagcgcagtgcactgttcaccctctaatctgcaggttcttagtgtaattctgcgttttttggctgcaaccacaaagacagtcgggtgagttatatttgccgtgtgtgctcataagcagcaactgttcatagcctacccatttacttttcacgtgatgtctatcttgctggcacgtatgatcaattggtccatttcttcgtccatatctatttgatctcctgctatcatctgaggaatattttgtggcacaatgtcagcattaatatatgccccaagcaatgacttgtacaggggcaagcttgtcaagttgaacttttgaagaacctttatgaatctatctgcatcctccacactgccttgctcctcgaaatactttgcaatggcctccaacagctcaagtggaggtctccagtggcaagtcttcaacagagataagcccttcttcatggcattgacagctttatccatctgcttactctgaacaaatccctccatcagtatctcccaagtcttgtaattcggatgcgcacctttctctagcatgtggagatgaagcctctcagccttttcgatccatccattcctcacataagcaccaaggagaacatttgaaacccgcacatcgtgcttcttgctttctgcttcccagcttccaaaggtccactcggcccgaccaatgtcgccaacttttatcaagcataccatagcagacatgtagtttgcagcagggattctacctggaacaattttactagcctcccacagcctaataaccccatctctgtcattcagggctgcataacatgtcataatgaaagagtaccctaaacgccctgttgatgacaactttgtttcagccgttctaaggcaagcaagagctttactgctctgtccatacttcttgaagatgttagctaatgtacagtatgtgctccaaccaacctcaaccatgtcatcattcagcatctccttgaatgctgattgtactgaggctaagccagagacctcagcacatgcattcatccaaatgttgtaggacagaacatttcttggaatgttgttccgtttcatcagataaattacactaaggaccttctcatactggcacgttgcaacatatagtttcataatttcattgaaagaatgaggatcgacaggcagtccatatctctgcagctcagccatgaaggtttcagctttctgcacatttctttctgtaacatagcaatggagaagcgggaatgacgcggccttcttggaagcagcagtacttagttttctgtagtactcctcagcttgagaagtaccatgaacttttgcaatcaaatccagtctaaccatatgatctgagggcgatagtctaaaatcattgtgcgagtccatccatgataaaatctgcagcataataaaattccgtttaggtagtgccccttgcatcgccactgcgcgatatagattggaacagcaataaacattcagctgagctgtgcaagtgtgtcaataaatcatataacaaagagtgaaacaatgttcactttgcagcataacattataaggaattattaagaagtttgaatcaaattgttgcaaaggtgaaaaagactcctatgtcctatctgtatcagatttttctcggttcaaattcgttcatcaggtagagctgtttggagtgtgctcacctccagggcttgctcgtagcggcgcgcgcggcgaagccggacgacgtcacggcggagctccggcggcgagacgcggccgcgctcccgagcccatctctcgacggcggcggccgcggcggcgcgcccgctcttcctcgggatccggaggaggcaccgcgacagtaggtcgccgccgtcgccgtcctcgcgagcagtcgccggaggagcggaggaggaggaggaggagcagcagaagggtctagggtttgggcgggaggcgccgacgaggagggcgagaaggcgcgagcggcgcacgacggcggccatgggcccaaacaatccatgggcttgcttgctttaagaaagtttaccttcttctcaatccctttttttaaaaaaaaaattagtaaatttcagaaaactgcaactatagtcataaaactgtagtgtgctgcaacattagtgatctatttcagtttgctgtaataataacgtggaaaattatcacaaaattacaacttttacgtgatatgcgtagaagttacagtttcgtgataatttatcacgctattgttctagcaaactggtagttttgtgactataattgcagttttttaaaatttactcaaaaagaaatgaagtgatagcataaatttgtatctcaattatagtggatgaaaatttagacatgtttttaaaaggctaactcatacgtgagacctaaccggattctacaacttcagtttcgctcccaattattttagataatagattaaaccggcctctgcatccaaacatatatgcacagccaagaagctccccaaatatatgtcctaaaatgtaaatccagccgcgccacggctgtctgtgccaaaccaggacgaggaagaagaaactgacagtaagctcaggtttatacaagccatcaatgtctctctttctaggtcgagttggcaacccatctcgtcctccagattactactacaatacatatattgacatagatacacaggcctagactagattacatcacaaactaacactgctagctagtacacagcatacaatggggggacatgtacacagatgcagacgagagatctgtcatatgcaagctccaagggagtagaaatcgccgcaccccaggtcgtcgctgaaggtaacatcatccttctcctgcatggaaatcgagtgtcagatagcgaaacagcgccgtcaacaagatgactattgcttctgatggtcttatcatcagcgaaaatggttcaataagtttgctggtatgtgtcacttttgtgtaatcttaatatggatgtcatggtaaaaaaaattaggtgaaggaaaaaatccttaccactttgactatggaattgagaaggccgtcgaagctgcagctgctagagctaagttcgctctgaagtttcgggatgctcaaatcggaggcgttcttcggcatcgccatatctcccgaaacgaggaaatctgtcttcatttgtgggataactgttgaaccacttgaggttgcttgcccaatcattctggcaccaatattgctactgttactactgctattgttccatctttggctcatagcatgatgagccccaatgttgcttgccaattgagagctcggtacagaactccatacgaacttgagatcaaacagactgtctgcagtcctatcatcgaacttctgtttcaaaccgtttccacctccaaaattcaagtacttttgctctgtatctggaggtaaaagcatcgcgccaccaaaagagctagctccaccttttgtgtctcttgctaccataaggtcatttgaagagcgagcaggtgcacacgatgaagatgtaccacccaatttgtttgcacaggtattgttaaacgaaccatggattagcaacccgttggcggaaaatcctgataaaggaatagtactctgctgggatacacgagattcaagcagaccagatgaaactccaacggcgccttcaatatgttctgaacttacagaggaagttcgaattgatggctgactgacaattttggcttgtgtgcactcggctagttcttgaggcagcaaaggactgcttgtgacactttggagtgtgccagacataccattagataggccattcccagaaaggatggtggacagatcatcggtttcttcatggatccacttctgttgcatttgggtctgcccaagcgatgttgccaaaccttgtcccaagtttcctttctggtttcctggtaagctaaggtggtacttatttgcatcattaatggaatggctcaatgtatggcttccgctcatagtctgaatcgattttgaagcaggtaccccctgagttccaagagctgctggattgtttctaggactgtttaacaatccatgtggagtaaaagatgatagagctgcggaagaggtaaaagcttgataaccctgtagtccttcaaatccacccatgtgcagaaaggggtctctacctcccaaagcagcaacgatgctaacttgttgcgacgccacagcgcttagccgtttgagatagagcctgtacttctgcgtggtacacaaagcttgagattagactctgcaaacaagttgtagtgtttatctgtgaacaatttgcttttagtgtctcagcatgagtcacagaatagcaccggaacttgtttttggttcaccatatatgtggttgctaaatctgctagaaggtttagagaagtgctgaaaaatgtacggccttttcctcaacttaaaggccactcatttaattgttacagaatctgctcttggaagcagaggggcaaagtacacaagactcaagttagaataggccttaaatgtgtaatagctctgtgttgataaaggatgccacagtgactttctatcagccatatttaatacagtattgtaaaacagtcagcgcacaattcattggtattgaagaacttctgaattcggttaatatttcttcagggccttagtaaagttgaaagatggtctatcttaagctatagtttcctctgaacagtaaaaacttgtagtgcaattaattacaatagctgctagctgtggtacagatttgttctattcaaattacatcattaccagtacatgctaataaatagaagatagtgaaatgagttccttgcctgtaggtgacttgcaacattttcccttgtgagtttctcaacattcatgagctcaagtatcctttttggcacagcctctgcataaatagaaaaaaattataatctcatcttttcacttatgcttatgcttattagccaaaaattgaattttcaaccttaaatttggagttgattttggggtttttttcatcgtagtttattttttagcctttgcttttagatcgttaagaacacgtatataaaagttttattcacaaattatttttcatttgcaaatatgtcgtttagttttttcctccaatatgccaaacgatggggccgtttctctctctctctctccaaaaaggaaaagattagggtgtaacatgagtcaccataaaaaaattgtgaacagcaaaatggaggcagtggtgagaacatactgtcaattccaagctggttgacagcagcgacaaatttccggtgtagttcaactgaccaaacaactctcggcttctttggagccgagggatcatcaatatcttgagtattgacctcaccctcatcctcctcttcactacagtactccttcctcttcttgctgggcctcccactttgatcaggtgatccacatgtaacatggccatgcacatggtctgaatccgcatttggtggcttgttgcactcttcatagaaatcgagattagcacggtcgcgagtactgaatttcctcctgataacatgctgccagatattcctgagctcttcgattcgaacaggttttaggagatagtcgcaggcaccatgggttatccccttcaatacagttttggtctctccattcacagataacactgcaaggaaattactaattggttaacatcaacatttccccctacccgtcatagaaggaaataagtacagtacagtgctcaggatttgctgaataaactgaaattgaattgatgctctgcagatacaagaaaaatcttcactcacagtggctattactatcaagaacagttgaactggattattggatagctctgagaagggataagattcatgacttactgatgacagggaggtccatttcaagccccacaagctcaagaagcttaaagccgtccatgtctggcatatggacgtcgctgataactagatcaaacatgtccctgttttcccgcagcattttcagcgcgatagcagcctgatttgttgtcgtcactggaaaaacaaaacaaaaattactctttcaagtgaatagctgttgaagatacaggaaggcatctgcgacaacaacaattcaccctaaacccccccccccaaaaaaaaaaaaaattgcagcatgcatttcttttatcaacaatgacaccataaatccagatcatgtaaacaatttacaactagacatctctgtagctgcatgcagcatatatagtatacgataacttcatgaaatattttattgaataaacataaagcattaggcaaaattctgaagaacatacatatagacatctaacaataaaatttgtaagaattgatattgctgttccaagacaaaaaaaaaaaccaagactgaactgcaaaaagaaaagaagaagtatttaccatgatactggcagcgcagcagcagggtctcgagcaccttgagacacaccgggtcgtcgtcgacggcgaggacacgcataccgacggggaactggtccctcctcctcgccgccggcaccacacccttcctctcctccgccgccctcatggcaacaaaaaacctcccaatccaattcacagcacaaaacccaagaacagcaagaaacctcccaatcgatgaagcaaatcaagaacaaaaaccaaccaccttataaccaaagttgcaggatgctgggaagcagatgtgggcaggggaagattgggattcagcttcaaggcaggcctcccaatccccagcaagaaagcaaaggcaaagagcccaaaggtacaaaaccaacaacctactactactgctcctgctgctgctgctgctccccaactagaacaggaaaagagaaagggagaagcaaaatggaaagaaagaagctggtggtggatttggacagggagaggagagagctggagagagtgggcatggagcttcaggaccaaacccaccaccatctccaccaccccatcattattgaggcaaagaggtgggaaagcaaaagggagggagttggagaagaaagcagagttctctctctctctctctctctctctgcagccaaaaaaataaactaaaaaaatgggaggaaaaaagcagagacactgactgttccagatggccaagcaagcaagcaaccaacctcagcttcagctcacacacatgtgaactactcctagctcagcagcagcagccaccacaactcccagcaagaaaacaagaggagattggagcaagaacagcaagaacatctcaagggagaagaagatgagggagagaatgtaagtagactgtccatctgtctgaattttaaggggtcaaaaatggtggagggcaacagaaattggggcccatttcatccacaagctccaaccgatcgctacagacgaaacgccatccctctgtagtctgtagtatgtactaccccgcaccggcgaaattcttgcgtctgtaaattttgtattgtatctcatgtatcaattggacggggcaaaaaataattttccatgaacatgttaaattggtactagtagtaatgtttttttttctgaggccttaaattagtagaaaatgggcattccatatgacaattccgtatctcatttttaactttttttaaaaaaaatatcattatttttttgagaatttttttggaacaaattttctgattaaaatgatccaaacttttaagagttgtggaaacggatgagacacatctcgatcacacaagtgaatatagcattgcaagctagtagtatcaacttgccacgcacaaatgaatagtatcgcacagtgactgtactcctacattgagggccttttgatttggagaaaaaaaaatataagagtaggagtttaggatgattccaaccctataagaaaatttcctaggaaaccctttaaaataaaggattgaatcatattgtatgctttaaaattcctatagaatgaataatcctagaaagattttgtgaagaaaatttagcaagagtttcaacctcttagaaattttcctttgaatctatccctttataagattattgtgtttttcctgtgattcaatgaaatggttattcttgtgtttctcctatattttataatcctctgttttgtacatgcaattgttattagaattatacgttttttttctatttcttcccttttttttcattggcccctacggagtaccaccaaacagtataataccatatacatatttactgcttgtataaaaatactgtagtaattatagagaagcgtacacgaacagaagacatatgcttgccttaacaactttagattcttcacacggtataccactactgcagctgggccccaaattataatcatccaatggagcaaacaaagacgacctgatctctggatctacaagtagttaatggtaaaacaccattaaccccaaagtaaaactccccttaaatgcgtgcctttaattgacgccatttactaacgcttttaataaccatccattaaagctttggatgattgattggaagggggcaccactccctcgcacacgaacgagattacgagatgaagattgtcacgaaaatgcccgaccgaccgagcgtgcttttttgtacggtctcattttctaaaacatgatataaacgaagacgctcataaacacacatcatatccttattagcatctttaaaatcctaatttaattactccctctatccaaaaatataatgtacaatcatgttttttcatgcctcataatataaaacatatgcgtatatatattaactagcacctcgatcctctaaatttggtttgttttaaaccatcgagctcttcaattatattgcttgtatgcatgaatgcgatccaaccaatgagaatgattaagggccagtttgttttgaggcctaaattaggcttgccaatttttttggcaaccttaacaataattgtgtatgtttggattgaagccaaattttgacatgcctatataacataggccattttaatagccaaattagtttaatttggcttcaatccaaacacatgttggccttaccaaaaattggcatgccaaaacttgtcaaaattgccaaattttggtaaggccaacattggtcacaaaccaaactgaccctaattttttttcttaatctttatgttacgagtggtgagcatttttttttatagatggagtagcatctttgaaagactggactaatataacttaggattgataaagtaacacgtgtatattgtcacacattgaaaaataataattagacgtaaatacaagcatctatatcaagtccaggacttgaactcatgtgaatcggtttctaatcaattgagttatgctcacttcaccatacgatattattctaaccctatataaaataataattctaaatcatttcaatcttgtattaccatctccactaaataattagaatgacaaaaacaatcgatcatcggttaaagtgatagtagttttagatattgtttccgaccgttttcacccctagcggcgcacacacaaatcacctctatttcccgtgctcgcgcgcgcgcgcgcgcacggtgggggcggccacacggggggtcgtgggggtgtcgatgcggtggtttttcgcgcgcagccagccccctttgtcgtctcgtctgccacccacgtccccatggcgctgctgctgctgctgctccttgctgcaacctgcaactctgcaaggccaacaagacaagcggaggcagcagtagcaggagggcatatgcctcgtttcccggactctccttccatctcatcccttggttgacccatgggtttgaccatctcaaccgttgattgatcccacatttttttaagcaaaaggtatagtcaatgagtactccctccatcctaaaatatattccatatctcaaaatatgaagaattttaaatagataggacattttctagtactatgaatctggacagactctctgtacaaatttatttaactatcaaatgttccatctgtttaaaatctcttatattttaggatggagaaaaagtaaatagtattgaataagaagaagagagtataaataaacaataattatgtgcgttaaaaaggaggttgtatacaataaacaatagttaattagtatttaataattgaacggttaaacatttaaagacactaaggcaaagatggtactacactaagcttagtatttgcaaatggattaattatgtggactaataagtgtttacactcatatactgccaggacatgagagaggagactgtaatttgtaaatagctgcatgtgtgggtttcttgtcattttgttcatctttctcgtgaagttttttgcgtgaaaaggggaaaactggacgtgccggtataaagtgagccagtactacaattcactgcctatatatgccacgtactcgatccaacctgctacgttgaaaacttttgcgtccatgactcactgcacgttgcttccggcgatgaactatcaagcgtcatatgcattcacgtaagctatatatatatatattattcccttctcctaaaatataaaatattttatataaatgtaatatatttaggatcataaatctgatttgactttctgttaagatttatagtcacacacccacctatttttttttcatattttagtacggatggagtatatgtattggcccacatcaatttaagtcagataatgcatcaggtgtttgcatgcttaattacgaccgttaattgtgacagcggggcatacatggctaccttcaatacgggtcaacatttactgttcacttctttttaaagcccgtttgaatgcgagaaattgtatgtgttcacttcacgtggaagtatgaaataaaatatactaggatacctcctctccggaacgcaaaacgatatttgcattaacatgtgattaattgaatattagctattttttaaaaaaaattgattaatatgattttttaagcaactttcgtatagaaacttttttttaaaaaacgtaccgtttaatagtttgaaaaacgtgcgcacggaaaaccatgatagggagttgggaactcccaacaaagaacgcaccctaattaagtactcttttatattcatcaccatataaagtactttcataaactatacacgaatttctattagtcaatgataaaaaaaattaactggcttaacaccaagtaatttaaacggaagtaatatatatgttttaacttttattaaaggtgactttttatactaatttaagaacgtgttcaacctataacctatacatatatgtatcgttagcaaactcctttttttatgccatacatgacttgtgtgtcgcataaacatccgcgagcacccaatagtacgatgataacactaaattaatattctccccgcttcaaaatttagcaatctatgaactaaattcatagtgttaggttggatctaatctcatacataaattgttatattttgagacgagtaataattaacatatttaaagtactcatctcacacttttcccccgcatgatgcaacgtttaccgacagtttatagcttccaacaaacaaatgagaagatggttgcatttaatttaattagcttgtgtgattggtgagtggtgaccaaacattatgtcatcgatcgatcccatgcatgcatccacgcccaattttttcatatacaccctccgtccctaaatatttaacgtcgttgacttttttatgatatgtttggccgttcgtcttattcaaaagatttaagtaattattaattctttttctatcatttgattaactgttaaattcacttttatgtatatatatatttcacaaaagtttttgaataagacgaatggtcaaatatacttaaaaaaaatcaacggtgtcaaatatttaaggatgaatggagtatatttttctccgatccatggagcacgcgtatagaagttcacaaaacatatggtaactaaaaaaatattcacagcatttttttctgcagggaaatattcacatcattttcacaggccacgtaagaaaagaataatattcgtcgtatgaagtcattataatcttcctttatggatatctagaaggcatatgcatgcatgcattctgcgatattaatatatatatgtaaccggcgctgccggccacgtggttaattagacagttaattagttgatgatgccaggtggtgtttaattactgtggaaaacttctactagacgtctgaatatcttgttgccctgatgataattagtatactgataaatggttttaattaactaggcatcttagtcagcttcacttaagtgcagatcttaaggtagctaggcccagtcatagttccaaactttttttttcaaacttacaacttttccataacataaaaacttttctatacacacataaacttctaacttttccattacatcgttacaatttcaatcaaactttcaattttaaccaaacttttaattttgacgtgaactaaacacagctctagtggggttttttttcttccaaatagctaaatgattgaataatgtatgtgatcactattcgagagcacaaacgaatggattaaacattatgaagttaaagaatagatctaaactagttttgtcgaaattcacatataaaagttttttttctcaaaaatcgtatagtttgggtgcacgtaaaacatgtggcatatattaatcgatcgattaatccttccttagaaaaatgttcaagggtcttccgactagttccacaaggtggtggctagactatctgggttcggagcctcaccccttttaattatttgatattaggttatttcctaatatttgccttttttttattaattcttcctttaaaaaaaagagtaggttgatttaatgctaattgcattgccatgtttatttttttttctttttgtgtggatgacgtcgcacgcgaacacgattcgaaccgaagtccatttttcctgcgcgtgtacatagtatatacgtacgcgtgtagtggacggttgcttttcatctgctttcttcagagaagctctatgtttattatgatacgcatgcacgtcgctcttatatatgtttctataatattatgcgatgattctcaatcatgcatgtttcaatattacctaaccatttcaaaattgaacgcgatctcaattatttaactacatatacgcatgcatgtgtgtatatatatacagtacgtacaccaccggctgcatgccggccaatgatcgatatgatctggacctgcttttgctagcttaatttactcgtatttataattttttttgactgaattatttataattgtttgtaaacactgctccctccattccaaattgatggtacaccaagaccaagaaaagctaataactctctcatattatatttactctagcaacaaacttgatgcatgcatcatccacactattttctagccaatagaaaatcaagatattgcatgtgggttataaatacttgtgtggatgcatgcatcaatgcccatttactccaatgcaccaataacgaatagacttaatgaataaacacaaatatatagatcatttaagaataaccttaaaaaaattatatgcagatcaattttgaatgaagggagtagtatacatgcctcttactacatatttttggatcgatcacttgagaatttatggatggagggcacaagctgcattcacgtacgacaaatgcgatctacacccaatctttgcgcgtaaatttctgatcgatctgcatttaattcactctccatcgaaagttcatttaagagctagctaggggccgaccatcgatccatcccagaagtaattactactctagttattgatctgggcccttcatgcaaggtcgaacccatcaacatgcacgtaatataagctgtgtttagttccacgctaaaattaaaagtttaaagaaattagaacaatacgatggaaaatttgtaaatttgtgtgtaggaaagtttgatatgacggaaaagttgaaagtttgaagaaaaaagttaaaatctaaacatggccatactctacatctaaaaataacacataagattaagtggtgagatgaaaaagagaaatgaggaaaaatatatgtatcacctttaatcatgtaaggggcaatcttcacacaactaaaaaaaagaaaaaaaagtgaattggacaaacaaataaaataaaattattggggttagtgtgctacagtacagaggtaatataaagatgatgtattgtatataccaccttttatagataaaattgaaggtgtcaactacctttgctataaaacttgttcctatattactcgtttaattataattagcatttaactgcgacgctaaaacgcacgcttgcatgcatggtacaatattggtactgcaggagtatatatatgtacgacgcgcatgctacctgcagtatgtacatgtccctcgtctgtgcgttgcacgcaccgttttagaacgcaaggtaatattggtttaactttgatcgatcatatataaacataattaaaaatataaatttcaggtatctgaagaaaaatggatgtatatatagtctaccataacgagagatttcttcatagtattacacttatgtaatttctaaaatttatatcgaagggctagatagtcaaatttttatccccgcaaaaaaaaaggatagtcaaatttatagagtataatgttaacttagaaaagtcacacacggcttgtttatgctaccagaggaaatagctgtataattaattaattaattaattaagcccgacttacgtacgtactctttctataaaagaaacttaattgcaagctattggtcaacaaattagtggtaagggtaggggccgggtgagcagaaaaaaaactgaaccgaaaagaccgagaccgagaaattcgatcctagacagtcaaagaccgatttttttcgatcaatttggttagtctcctcgggtaactgaataaactgaaaagactgaattaaaaaaatgtttaaatgcaacataaaatccactaagttcaataggactagactctaattttttcacatccctacttcttctaagcatgcaacctaacaagagtctttattcatatgtgcttacaatttctttttttgatttttgtgttggcatttttcactatttttttgcatatataaaaatgttgttgaatttcggtcaggaccgagaccgagaccgaatttgtcagtcctgacatttttgcgttgaaattcggtcttcacattccaaagaccgaaatgaccaaaagaccaagactgaaattttcggtcaggttgtatgcccacccctacgtaagggtaagtgcgcccctcacaaatacacataaacacatataccctacatcttaaattatatggtgcaattaacaccaatataaagaccaagaaagaattattatcacctttcgtttggataactccaataaatacaatgcatacacccaatgggattagagattttgagagggtggatgattttgaaaaagaaataattaaagaggagagagatgtgctagtttattgcatcatgcgtgctttatattatgaaacattgaaaaatatggttgtgtcttatattttgggatggagaaagtaagaaaagtaatattgcaaattggtagttaagggatactgagagcaagtactataaggatatatgtgttggtctaaaagtgtcgcataagataagtacttgatgagatctactccagaagaaaagtgatgagagagactatgagctagtcactagttatacaagaggcaatctacatatataatctccaaagaagagcacacaacgaatgtgagatagtgtgaaagtgaacataaggctgtcatgggttggcctaataatgttgattattttcatacagcttattaataaaaacttatttatgagcatcacttttatatatgtcatagcgactttaaaggcaatgcataaaaataaacttttcttttgagatggaaataataaatctcaatagcatcaaaatcaatttcaaaattaaattttacaattcaattttggtaacgatttataagctgtatgataaaagataggtatagtatatgacatggctaaaattaaggtagcacattcactataaaacttgctctcttaatttaggaacacaacttcttccattcccagatcgatcaaggatcaatatataagttgggacaaagttgcaaggctaattaaagtctttttagggtggaatagtaattttgaattttgatttggtggttgttttagttccaccaccagcttgtcataaactatatattccatgctgctagctagctagatttggcctagatcgatagctagcacttgcaaatttattaggtttggagctttgggatcctacgctgatcatagagagatcgatcacttatatataggcactcgctgtcgtgatagatcacatagtcctaacacatgagatcctgtaagattatggagtatcacacaggtcatgccaagttgtagaatcaattaattaacggcggccgtggcgtctgaagaaagaacagctagcagtggtaaaaaaaaaaaagaaatcaaagatatgtgcctgccatgtcatttatcacatgctacgtacaacgtgttggcacatacagtaactgatgagcaattcaagctatgcattagggtgcatttctttttagctaacgattacatgttatcacggacatgtttttttaaaaaagtttataataaacacggtactttttcaatggaatatgagcaatgctagcgcaataaatgaccacacatcaatctagccggaaaaaaaaataaagggtaaatagctaaagtggtcctccaagttttaattatctgaggctcagtttagtccttgacattttaatctatccatattagtccttcaagttttcgttttagttcaaaattatccttgaacttacttagaagccacatggctaaacataaccaacaactctcttgataaatgacacttatactcccctcattcacatatataagagaaaaaattgcatgcaatgatttttttatagataatgcatagtaatttatgtaaaacgaaaataaattatgtacttgcaggtgtatacgatagccattgtttaagtttcatgtgcatatgttgaaataatgggaaatacatctgcaatattgtttatttattttgattttcccttttctaatgtatagttgcatacaaattaagggcaaaacggacattttgcaatggaaatattgactacaaatatccatatggcatattaagtgggcccaaggatgattttaagccaaaacaaatacttagaggacctatgtggataaaataaaacctgaaggaccaaattgtgccttcggtgaaatttgcgggactaaattagctattcacccaaaaataaatgacaaagttacttctagtcaatgtattagtaaattactaatttacccttaataacaaacggatcatatcatttctatcgatagtataatactactagtagaaagcaccggagcatcactcaatattgaattcattcattcatgccatcaaataattgttatgaacaacgcaatttcacaaatcatccatagacactttagagtttagaacgcatcatatccttaggccagattaaccaaaagaacatcaataagcaggactatatatagcaagtactttctgagacgaatattattggtgatcccgggtacccgggtacgtacaaatcagggtgcatgaacgacatagcaaaggcaggactaacaaaaacggaaggcatatatatatatatatatatatatatatatatatatatatatatatgcatgcagcagtgtgcattcagatcggaagtggtatataatgtggttgtacgtagggtaagaattaagcgtgcgtggcaataacatcatagctttgtcggcaattgttcgtctcttctcctcacatggaaatcttgagagcagagatcgaatcgatcgtcgaagaacgtacggtcctcaaccaattaataagcacatatatatcgtcttgagatatcgatcgagctggcgactgactagctagtaaaattgtttgaatttttctagacaaactgtattaagtttgatcaagtttataataaaatttagcaacatctaaaatattaaataagtctcattaaatctaacattgaatatattttgacaatatatttattttgtgttgaaaatactactgtaattttattaaatcaaatattttttattagaaaaaagaaaaggtctaacgactttaaaggaaaggaagtactgtatattgttgtacgcatgctagcaagcaaatgcaaggggcagtctggcagtgcatatatgatagcgtaatgatgatttgttcctgcggctccctccgagcactggtgaccagtttaggttatgtttagttcacataaaaattagaaattcgattgaaattgaaacgatgtgacagaaaagttggaagtttgtgtgtatagaaaagtttcgatgggatgaaaaagttagaagttttaaaaaaaagttagaaactaaacaggccttaggagtacatgttggtcaggaggacgcattctgcatttctgcggcaaaatcaatcgtattttccgtcgtggtgacacgtcgcggctcgccggggccgggctacgagcgtgaggtccccgcccgttgcagactcagcccagcccggcacgtacttccaacttgcctcgccgtgcgcggagaagaatagtgggccggcccaacttgtcggtgcaccactgcacctgcacgttcgtgggtatcgcgttacggcccatactgctctcgggctgcctgtctacaatacatgggccaacatcgtcataccagtccacttctgacggtatgagcttttgccgtttctccttgcttcttgcatttcgatgacgacaacgtactctcttcgtctcctactttaatcatttgtcttgcttaaaatactaggcacaaatatatttaaaataagacggacaatcaaaaacttatggttgcacttaaaataggacggagggagtaaatgctgcttgaaacaatgttaaatctagaaagagtcgctcaaaggcatatggtacctgagtttctgcaatcaattcgaattaatcgattcccttcttttgcatttgcacatctgcagctaatagtacaaactgaataataataagtaagaaaacagaaccccagagggctcgtaaactgaactacagaacattgctactacatatctcctgcttccactaagctcccctcgattcagctcacggctaacactttctcatcgcatctccatttctccatccaagctgctacccacaagtatacatctgttctccaatctgatgaaactcacactgaccattcttgtgcagcatcagaattcagaacacactccttttccttcacataagctgtctcccttccctgtcagattcttcgtcttcttcttcttcctccatacgatcatggagcaacgacagctattgcacggttagtagattgtgacaagtgacaacggctaaaaacgatggaatcagctgctctccagtttcatctcttgccgaatctcaagcacttgttgtgttttacttcggtcatgttattgttcgaggacgacggcgccaactggggcgctttggctgtcttatccttggagagcttctccatcgcgttgatgaacttcctcagatgcctgatgtattcagggtacgtctccaggttgcagtggccgccacctttcacccataagggctcgtacttctccttcgcgagctcccatagccgcttgccgtgggagaaatcgacgatgtcgtctgctgtgccctgccattgtcattcagcaggtaagttctgagttctgatcacaccaaccggggaaaaaaaaaacagttgagagcagcaatgaactatctcagaacttaataaagtcttagcatgttttctgttgaactgtaactagtaattggacatgagatatatactgaaaagtaaatttgaagatgatttcagacttgaatatcaatgaaaagctaaggaggctttgaatcagaaatgaaaagggtacaagctactcacatgtataaccagcactggacagtcaacctgctttattttgtcgatgttctgcagacatgttagcagtaaccagattaggatggtaaatgacagtcgttttagaagcaaactgaaatcatggtccagagttccagacataccttgaagatatcaaaccaaagtgttacttttaccggatatagaacccgaatgcctgaaagtatagcactgtgaaggacaacccctcttaatttttccaagcgcgaggctaaatgcaatgttggtccacttccaactgattgtccatacaagattagatcctctggttcaatcccgtacaccttcgttaaacagtcataaacagcctctatgtcacagtatgtgttgtattctgatggcttttgaagcagaaaacatgataagaaaaggaacaaaattaggtatgtcttccacaaggcgaacaattacctagcttaattacttattgtaagttcgtagaaaggaaaacatttactatcgttcgttctgatcatcagaaagaattcgttaatcaacaaaaccatgtgccacatatgggaacaactgaacaagcacacatgccactttatgagctagtactacttaaccaagttcttcaagtagggatcgataatcaatcacctagaagttggggttgatggtcccttggtataacaactttgacaaaaggatgactaacagaacaaagttgccatcatggtcgagaatagcagaaagcatgtgtgactttttccgatattcataatgaaagtaaaattgaaaaaggctaaacagccatttgccaaagtcctattccagatgaggccaagaaagacagaatggctaataataattgctttgagaaaagctgcccatatacctatagaagaacaggatgttgattatgaaaaaagcaagggaaacaatccaatccaaagattgtcgcttgagtcattgatgaaaatatggcataaacatacaggagacatcatgatcacaaaaaagtttaggtgacaatctattcaaagaagacaagtttactgcaaattaacctaagaatcaagtttgagctcttaaaatcactgaggaattcagaatcttactttgcctgtagaggccccatatcctgaataatcatagctgcagaacgaaaccaagtaaaaagttcagtcacatgtaacacacaatattggtcatgtccatcaaaggaaaattgtcatgatattaatttgacacaattgtccatgttttatatatttattgatggaaataaatttcaaatcccatgaggatcaaatagcaacttttccagtaggggaaattctttcgttcttaaagttaaaaggcaggcatcaactggatccccaaaaggtgaaatagataccatttgaatgtgaagttcgacaggactccatccgaaataatttatagcagaattattcatgatacatttttactctatccacacagcaagactatatgcaaattatcaatccacgatccaaatgccacaaacagttataacagtattataagaataagatgccaagcactattctcttacaaaaatgatgctctgtaatccttgtatattttaagagaactgcaacaaacaatgccgtaaaatttttttaccccagttccccaatctagagaaatgccacaattctaacaaatgactagaatcgctgaaactgaattcgaaagcaatagcagcagatcacacacagcagcatgcatctgcattggagcagaatctgacagtataaagtacaatgaatcatccaaaaaaaagtacagtcttaacctcgtcggatggcaacctggcaagaactaaaatctaaaacggagggaagaaacgatctgtttttcaactcttccataattgtggtcaggccatcaggatatccaagaaactaaatctaaacataaaagcagaagtcaaagcatttattcaggaaaggagtggtcgtcatttaatcaaacgagcagttcgttcctaacattgaaggtgaagcttaatcaggtgcgaattcaacccctcaaagaaggtttaacaagaacaatggaaagaaaaaagcaaaatcttttgcattgcaggtcaattaacaattctgaacgccatgacattactgttcaacacagttggctcaccaactaaaaaaagatcgaatcaaatcctctttcaaattaaagcgaggaaaaaaaaacataacgaagtgcccgccaaatcggagcttgcaaaacggagtatttacaaaattgatcctaaatcataagactaattgaaagtttgatactgattaggcatgaagagtagagccatagagcgcagcatatctagcaggcaagaacacaacaaatgcaaaggcatataatgaaatgcaaatgcaaatgcaggttcagaagttggaagtggaagcaagaaaagaacaaggcgagcaatggaggagaggagaggagagagggtgacctcatgatgttgacgcggaggtgggcgcggagctcgaggaagaggccgagcatctggccgaggtcggcggcgttgccgtgggagtagagcagcgtgaggcgcgcggaggggtggcgccagaaggcggcgacgacgcgcgtccctcccttggtcggcagcgcgtgcacctccacgccggcgtccgccgacacccccgtcatcctcaccacccctcctccgccgccgccctcctccgccaccagctcgtacgtgggtggctccggcgggaagaaggccagcctcgccgccaccgacgacgtcacgttccccattagctccccctccccgcccgcctatctcgctccgcaacgtgaggccgccttctcctcctcctcctccttttcttgatttcttccctcgtcaagaaaaagaggtgaggtggtggtgtgtgttgcttttctcgggctccttacctaagcttgcttttcctcctctctctcgcgcgcgcgcaatgactctggtggattcgggtagcagttgcagtcggggggttggtttctttggttggttgcgcggcgggggcgtagcgtaggcgtacgtacgcttgtcgatcgatcggcgacgacgacgacaggttgacgaccaccacgtcgcgtgtgtgcgcgcttccgtcttcgtttagtactactcccacacgttttttataaaaaaaacagtctaatactaaacatatcttaataagttgtgttttcctgaaaaaagttggaggtttggagaaagttgggagttaaaaaaaaagttagaagtttactccctctgtccaaaaaaaagacaaaccctaggtttctatgtccaacgtttgactgttcgtcttatttgaaaaaattatgaaaaaaattaaaaagacaagtcacacataaaatattaatcatgttttatcatctaataacaatgaaaatactaattataaaaaaaaattcatataagatgtttttgggacggagggagtatgtgtgtataaaagttatatgggttactgtagcacttatgactaattatggactaattaggctcaaaaagatccgtctcgcgatttacatgcaaactgtgtaattaatttttctttttatctatatttaatacttcatacatatgtccaaagacttgatgtgatatttttggaaaagttttttgtaactgaactggcccttagcaatgttttagtagccacgcacgaaaaattgtgagacgtctcggatactcacccaaggaggcaacaggacggagtattattacaccatccgttccaaaataaatttatttataaatttgtgtgtctaacgtttgattacctgtcatatttaaatcttttttataatttggcatttttattgttattatgtgataaaatatatataatcctttatgcgtgacttaattttttaatttttttaaatgagatagacggtcaaacgttagacataaaacctacaaataaactaatttttggacgaagggtgtactattatagatttaaaaatttattttttaaaaaatgagttttatatagattattttaaaagaaaatgtattgtttaatagtttacaaaacgtgctcccggtaaacaagtgggtagtaaaatcgaaactcactttcaaactcagtgttagatttacatttagcactggcattaaacaccaaaagtagctaaattggttggttagtgttgttttttatgtgaaattctcgaggattttggtgttagcttatgcgtttaaaaatgatcgtgcaaataactatcggctcatccgaatagcagcagtacggtcgctcgcacggatcggatgcattacctgaccaatcaacagtacagatattagggaaaggaagacgttgtacctgcatataggtgactcaataactgatgttcagttagctataataaatgcgtggaagagccaaagagggtaagctgaggcttgtttagagcaagtttaataatacagtggttcaaattatctatagctaatctaatagtctattcagataatagctaactataaaaatatactacaccgttaatacacgattctacccctcatacacacgtaacgtcttagagtttttgttacaattagttataaatctacaggccgatttattctctcttttcttttttcttttcgatatatgattatagctagtttatagccttttattgtaccgctcttaggtggtcaagattcggtcaaaagcagcggcagagcaaagaaaggatgatggagaagaactcgcagcggtgactggtcgatcagacggcgaagatagactgatgcatgcctctccctgcagctgtatacagtatgcttccgtccattctaaaatataataacttttatcccttagtatttatcctaaaatataataacaactctccaccaatattctcttcccaaccaatcacaatcattcatcatttatttttttccacctacctctactaatcatcaatcacaaacctccaccactcacttctacctactttcttaataatcgtgtccaactctaaaacttattatattcttggacggaggggtagcagactataaatcagctaaatacatatcgagaagataaaaaaaagagagaagaacaacgtggcaacagatttataacgaggtctattgagatatgttgtactagaatatgttctatcccatcttaggttgtgtttttgggacgaaaaaagtatatatttatagataattattgtataaattagttattaaattgagtatagatgatttaaagttagttggctataccattgggtgagactgcgagttgagcgagtgaggcactgtttccctggccccacattggctgtcttcatccgacagctgccagccctcgaagtcctcactgatctctctctatacttcttccagcatttctgcttgatcatcatcagcagctgcattgcctggcctactagtagtagtattgctattgctcaattgttatcgagactgttagagactgtttaatctgacgaaaggatagatatatttcgcttaatctgatgattaatcatgtgctgcacactctatgctatggagtagtagtactcgctgggcagaacattctccttgcgcgtcttttgaagcctctgccgctggaatgattggatggaaaagaaagaaaattatgcgtgcacaatgagagccgaggcagccatcggctgtctcgcccatggacaagaaaaggtcactagtggccattgcgttgcaatgacacgaatcaacgaacagctttgagtccaatccaaaaacacatttagttttggtacgaatcaacaaacgcttcgtcgctatgcatccatccatgcaacacactgctgttcctatggccatactccatccgtccaaaaaaaagacccgatccatttcaactagtgtcacaatcaattatttcatttctattggagcattggcctagtagcctcctcctcttttgttactacaagaatgtccctttacttccatagaaaaggttaattaagttttcttttcttttctatcgctgactataattagcacatactccttctgttttaaaataaaccaacttatacatatgattttggataaatcaactatgaatctaaatatccgtatgtaaaagttgattttttttactagagtatctctttcttttaacaatcaagataaacgccacacaacagctagcatggactcatatgaagaaggtgaagatggttaattagaggtagaaaagatcaagcacaagggtaacacaataaaccaactgctccaaatctctctttttgtccctgaccagattagtgaattgccttttgtcaacagtgacgttagctggatctgatcatgaatactctctccccaactgtactgttgataaatatgggaattgggcaatgtggtcaagcaaagggaccatcagttcatcattctcttttgcatttctttatcaggtgggacccacacccaaagctccaccccgggaccacatgcagctcttcctttcatgagggctgatgcggtcaaagggtgaaagggggacggtcaacgggagattaccactacctggatgcatgtgggcataatgatagtagtactagtaattaagagttaattatccatatgcacatatagcagctaagcttagcctcaaaccttggagtgcgaaacactgtaaccaaatccattggaacgtgaccggcacatgcaatgagtgcctaaattagaaaggagcacggcttggaaaagttagtgctcacatcattgtatatttgtaccaacagattgtgtaaatacaaagcgtacaatatcataaaagccacatgaaaataaaagagatgatctagatatacgaaattgattgttcctttccccccaaaaaaaaaaagaaattgattgttccttaccaagggtatttgttagagataaaactttatagtggagtataatcttgtagcaactcatatggaccattaagatcaaaatatggagactcagattatatgacagtccttataactgcatttgatgtaaatcgagagatgtactgtggtagttcctgttatttataacagtcttttctagcttgttccttgtagattttttttcctaataatatactccctccgtttctaaatatttgacaccgttgactttttagcacatcaccgttcgtcttattcaaaaacttttatgaaatatgtaaaactatatgtatacatataagtatatttaacaataaatcaaatgataggaaaaaaataattacttaaattttttaataagacgaacggtcaaacatatttaaaaaagtcaactgggtaaatatttagaaacagatagagtattaaagtacaaagcttttatgcactcaaaaaaaataaccacacttgatctcaatattgagcgagggtcctcccagtactgcagaggatctggatttctcaatatcgagagtcaaatattcgcattcgtatgggccatagagctgagacttgagagaaggaaaacgtgtggaggaaaagtccgaaaatcccatgcttgtgtcctgctatctcgactgggagcacaagcagagacgacgcgaaggctgacatgtgaagtacttctactaggagtactactcgcacaggtctgggcggcaagcaaccgaggcaggaggagccgtacgagtcagcagtcatcatcagccagcgtggcgtcgcattggattcgcttccttcttctgctcccttctcctgccccaaaacgtcgcaacgaataacgatgcccctcggatctgcctgcacccgagtactcctgtgtactctatccattccaaaataaaagaaaaacatgtccaggcactcgatattccagatagcatcatcttatcttagatttgattattttaaaacggtgagagtagtccagtactgctgctgctgctaattggatttttatctgaatatggaagacatattcagatttgttattctaaatatcatcacatcttgttttaggttatcctaagttaatttattttgagacggagagagtagcccagactgtccggtactgctaccgctgctgctaatgttgatttttatctgggagcaaatgaggtctcgttgagttctaggaataaacaacaattcatttgctactttgcttagcttaaacagcaggtcatgcggctcacgcccggtcgaggatatgcgtggcaattcttgctttgtattggtagaaatcatcatcatcttatgtacatcggtgaggattacatgtaccgtgtctaatgtcatgtgcaacagtgtaagcctaattaagcagaggttaatatgtacatggggacgccatctcttaccagatggacggagcagaggagaggcgggctacttccacaccttgacggcgccgtctctgcttcccgagatgagcctgtggctcgacaagttcacggaggccagcgcgaggatcgcgtctcggtggcaccccgcggaatccgcggcggccatggcgagctgcgtcttgtgggttagcctcgacgccgtcgtgggctgtctgcatatttcctgcacacagaagcaagcaagcaaacacactctaatcaggttcaagatttgcagatggggaagaatgtggcacaaaccaataatcatgaagagagatttgacattgatcaatcgaaagttaaaactgaaagatacagcacagaacagcatagatgtagcagaaaaattcatattttacgactagttacctgcacaacttgtacacaagagctggatcttatatcgtacgtctcgtcgtttccagctcctttcaccgagggaccggctatacagaagctttgctcaggccttcaaaaacatcaaaggaaaacgctagttttatatgacaggcacctcaggagattttttttttgcaaaatcagtagtagtatggtacaaatactgaacctggcctgatcccagtagcgtatcttcaagtccgttcctccggtcaataggtcccctcctggcaaaggaagcaaagagcggatgcctggaaggcgtggaggcgggtcacataattcttcaattcggtaattataattcgctggccgggtctcatctctggtatttggatgtattgatggtgcctttggtacaacagcttcattctcagtacttgctgttctaaatatctgcatagttcatcaaatttacagggcatgagtagagtcgtcaagtgactgcacttgatagattagaggtgttcacttcatttttctcaaaaaaaacactgactcttatagaagactaactaattacaaatgtgagtaaacaaggtattttatcaactgtgacagctcaggaaacaccaagcagaaagccatatgttacctggtgacggcttccattctcagcatcccatagggtaacttcattgcagcctgcagcaacaaaaaccacaggtctcccggaagaagaaattgaattcggtggtggtataaacaagcacaatttctctataggggttgctggcaaatatttccatgagttaacgggaagcaaaaacctattatcccacaacgtaagaacgcctcttgaagacccagagatgaaccaattcccgcactggcccactacaagtgccgatacatagccctcctctggtgaagatctaaatgaccaagactcagcattggtccttgtatcccatttatgtatgccacaatgttcagtgctgaaaagaatggttgggctaaaactctctgtggaacagttcacaacactgagaattgcaccttctttcaaatctttcctttttacatcaacaatgccagaatacctttcgatgacactccctacaccacgtgcgcagtcaacagaaaacaagtgcaatgttccatcactagcaccaacaataacttggggagtaccatgaagcattgtcgtacatagagctcggctactaccgaggctatatgttaacctagatctgaaggcaatgtccttttccaattttcttgtatcccatatcttgacacttgagtcatctgaagctgttacgaaaaaggtattgtcggttgatacagcaatatcattgacagataagcgatgctcctgaagatgtgccaccagaactccacggggtttccaacttgtctccagagacaatgctggtctggtgaacgatcctgaattatcagagttggaaatgatatcacctggtatagacgagctgctattcattgagtcactgatgctcccatctcggtgcatgttactgaaatgattttctctagtacgtatgcctggaactgaacttgataaactcccatgccggtcagatcccaaatttgcatgtagtgctgtcccttgcatggagtataatggtattcctttaggtacgccatcataaaaggaactagatccatgtactgcagagcttatatatgctgaactagcagaagaaaaatctttaatgttcaaagacacatcattggacatcttaggtcctctcaaccttgaatcatcttcaatcatgattgatgaaccactttgtaccatggcaggataccttcctccatgcactgtcaattcttttttaccatcacccttcagtaaaatgtctcctgcatcatggacatcctctaaagcttggtacaagactaattttgagaccggaggcttaatacatgaaagaagagcagtttctgatgacaatgatggtggctccctgtgtaaaaaatgcttaagatgtggaaaaaggtatacaaaggtgtctacaggccctatgctctcactgcaagcaacaacaaatcttacagcggaccgtttaacccattggactggatgacacagcaagggaagagcctttccaaataggccaacaatcgcccttttcctcaaataaccacttttgcacatcatagtcaagcagtcaagtactttcacaagcacaacctccatttcatcacttagtgcctgttcaagatagggcaagagatactcctcgacacttctggaaccaataaaatagcacacaacaacaatctgaccaaaataaactgcacggagctgctcatcacggtcatttagaaatgctggaagtatgggaagaagaaagtcgttagtttgtctatgtccgaagaagtaacacaggtaacctatatcttgcagaagagctctgcggacattacgtgtctgtttctgtcccattaccaactcttgcactatttcataaatagattttctgagtcgtgcaagttgaccattaatgctatcttgctgcctctttactggtgattctacagactgtgatctgggagctaccattgattcatctagaggcctagcatcctctatactccgagaacgaagcaggaatctgtaggctgtcaaggccaacttataaatgttgctggcatagcaaaccctaacactctcctctgtatcatctgggagcaaagagagcattggaaggatgtactctgggaatatctttgcatcactgataggaaagtcttgaataagacaaagaacatcagatagagtttccaaagcagcacagcggactatggcagctggatctgaaagcatcgcaataacatatggaataaccagctgtaagcgactatcatcatctatgtatgtagaacaaatcttcagaagtatgagactagcccttctaagctctggctttttgacacttcgtatgcatgagcaaagtaatgaggcaagcaaaaccatgccttcacagctcaccttgtactctgtttgttggaaaatgtcaaaattataggtatctgattgagcatcataactagacactaacgcaagtaggttactctttgagatcttctgcaaatgtgatacacaattgttctggcccatcaaaccactttcagttcttccagcttgacaaacctgctgcaaggactgaataccatttgcatgggaaacattgggagtaacagaccggtctctgtcttgtgtgatctttgtacttgtacggtcgtccttctccagttccttgaggaggaaattgagatctccaacaatatgcttatgctgtgcaggactgtttatcttaactacaggtacacttttggcatattcttttggtgaatttacagtttgccctccgatgcccattttcccagacagttcattatgcacaggcacagtagcagatccttgaattttctcgagtgttgagccacttatcattatatcatgcatcttttcaaaatattcttgagtcttctcgacctgtcaaaaggcatgtatgtttggatatccatggtcaagaataacaaagtagaagtttaacatagatgtaattgatccttaccctagcatctgagtgaagcggaacaatatctgagaaaaatttgcggagaaatttcgaaaaataaaccgggaatacaacagattcatatttttgcaagtagtttttgcatgatagcctttctttcgggtctaactgaatcatgtgaagtaccatgtcacggataccagtatcttgtatctgcaagcacaaatggataatgagccatttttctttatgcattatctaatgttccactccatgacccaggaagatattacaatgttgcaagataagaacagaatagccaagagactacattgctttgtatgtgttttttcacctcctgactattaggcaagaaaactgatggaataaaggacaaggcataactaatagctggaccaataaccagaattatttgtgcaacacaaaaggaacaaggaacaataccagaaaccttttcaagggtatgaatagggtcgtactgaccacgccgataagctagaagttgtgaaagctcaaaaagtggctgaccttctaggaaaagttcagcaagaacacacctgtaaagaagacaagccatttaccatttggagaataaggaaacgaaaaatacagcctcagtaaacaagtctaacatagcaaagtaccacataaaagttggagctattaaagaaaaaagattaattttcttaaccaagggtcctaccgtcctagcaaacaatcatgcaccgatttccttttgggatgtgcaaatattttaatgtagacagcaaaacatactgagggtaggtctctcaattataccgtcagttcgttttacttctaactgagcattcctcaatgcgatcaagtgaatttgtaccaaccatgcagcctcaaattgatcaaaattatgttccaaaaagacaatcaaaattattttcaaacgctaacccagcctaaatgttaaatttcgtatttcagttaagggcgtgtctcaaatgacaagataccaagtggagaaaaaaacacattggtaacaatggcatatattgacaacaaagaacactttgtgcattgtctatcagcaattatcagatttcatgggacaggaaaaatatgatatatgatttccctctttgtcaagtgagatgccaaatgataacacatccaatgaaattaaattataaaactggcatgttcaagcaaaaggcaactgtgaccaaactattagtataagggattgaaaggtcctatactcgtgaccaaatcgataaagatttataagaagaaaattacccaagagagaatatatccatagatcgttgcaaaggtgcatctgctgcgacttgggtttccgcaccatgctcatagaatctctggaaacattgagttaggtttattcaaaagagttgtaggtaatcaaagatatagcattaagacatccaacagtgcattgcaaaaatgcaaagactgactataaatcataatgtgttttcatattcccaaccaggatgactacatatgttattacatctttggtaataatgaaagaatccaaatctcctagaaaatagcaatagtttatttgtgaaatgatcaagtgaatgtagttttcaacccatatggagatggcaatatactttcaaaaatcaactgcatgtaaacccaatcattgtaaataaaatggaaaaaccattgacgaactgccctgacactatacatgttactctagactaacaaattagtacataattgtattaacaggtttcgaatttgtgcatctgcagtactgcaactacaattttccccgtaattcaatcataatcctttagctcaaacaagagttccccatgtagatttcattttgttgatcgtaaatcagagaaagcaattgccaaaactttaaacagaagtctgcgttatctgcagctcctaaaggaattctttttaaaaatgaatgcactaaaatatagtagcaccaaaagctgaaacatcacaatggtgagagaagggtgtaactaaagatcctaacagcagccagtctaaacatcacttattgagtagttgtttaaatgaataacaatttgcaggaacaagcaatatacagaagaccataacaatattagtgataagggtgaaaactatgcctatgagaacaaataaattgggatatcatcgacaaaagagcataacactttcaaatataattcagattaaagaactaacctcaggtgctaggtagcatcttcgccttccaccagtatcaaagaagaacgaaaaatcagatggatcatcatccgggatgtaagttggtttgaaagatgcaaagtccgcaagatatagccaattccaggaggtaacaagaacattctcacattttatgtcacctaacaagaaaactcagtgtaaacatcaatagacaaaaaaaaaatactgctgatgcacagtaaacccttctcaccatgacaaatccccttactatggctctgctccacagcatggattaactgcacaaccaaatgagctatgttggtaaccatatctggaatggaaagagaataatgactcttacatgttccactagttttaagtgcgtgactcatagctatacaatttctaacagtcaccataggatctgatcattaactctgtaaatgcaaatgattatccagtaacaaccataaaaaggatggctcacctgaaaagcaagccatttcttctcaattttactgaggaaaggccgtgtgcttagtcgatcatgcaggttgctgtagaaatactgcctaaggagatacgctgccttatccgtttgcaaccaaacctgaagacatgggatgtcatgtcagcatatgttacccaaaaataataggagggcatatatttacaatagacgtagataactatgttcacatcctgatggatgcaacaaccgctaaatttcactatttcatacaactatctagtgtgaaaatattacgagggcatgagcatattcctaactccattagaatttaatcaaccatagaaatcgatatcatactctagaaacccctaatggtatggcttgaaaagccctaatgacagtttaccaaaggaaacaaccttttactgcctgatctgaaatttccacctaaaccccacacagagtaaatacgcattatttttctgaatgaaaactacagtctaatccaccaaatacccttatgcaacataacaatgcgctaaagtcccacgaccgattgcgctagttcgtaaagcacgggcaaaattcgatggataccacagcacgcaatcctcacctggaagggccagacgtgggatccctccaacccctcgaaggcgttcctaatccgctccagcctccgctcatgctcctgccaaaaccagcacccacagatctcaaaacgcgatttccaaaccccaaatcgagggggggacgggggcagagtgaagggcgcgcgagccgcgaagcctgccgaattttcttaccttgaggtcgaggggctcgccggcgcgcttgaagtagaccttgacgaggagcagcccctcgtcgtgcttgcagcggacggacttgaggaagcggccgcggctgacgacctcgacgagcacgaggttgtacgtggacgggaggtcgtggaggtagtactccgtcgccgacgcctgcgtcgtcttggcgatcttgttccccatcctcctccggcgccgccgccgctcgccgccgggctcctcgcgctcgctctgctgtgcttagtttttgggtttcgatttcgagggaggtgtgcggcgtcgttgcgtttgcgtggtgcgtctgcgatcggaacccggtgcgagtgccaccgcgtcacggagcggggacggagaaccaaacaagcaaacccaatactaatccgaattgcacgcacgcaacagaatgcagttcgagcacaacacgattaacaatatatggctgtgtttagattctaatttttttttcaagcttctaattttttttatcacgttaaatattcaaacatatatatgaagcattaaatgtggacaaaaaaaatatcaattacacagtttgcatgtagattgtaaaacgaatctttttagcctaattacgccatgattagacatacgtgctacagtaactaatgatggattaattaggctcaaaagattcgtctcgtagtttacagtcgaaatctgtaatttgttttgttattgatctacgtttaatacttcaaatgtgtgttcgtatatgttaaaaaaaaattggctcgaacgaaacacgacctatgtctaagttatatatccctcatttcatatcgtataagtagaccaaacttggttaagtttaactaaacttatagaaaaaattagcaacatttaaaattatcaaatttagcaacagaatagagttcgagcacagcacgattaacattaatatgtcaaagttatatacaagtataatgtaattgtaatatatttatttatatttgaaaaattgttaagagaagatttgtagacaaatttatagtaaaaccaaaaaaatctgaacaaactatcaagcttcttttttccctttttttcacggttaagttattgttgatgttttatattaaaaaaagaaaatgtccacttcaccaactaacctaaactaccaaggcaacgagaacagggaaaccaagcacgacactcaaccaacgccattcaccacaggaacaagcagctagaaaaaaaagagactctcgcacactgaagacatgatgttatcattatcacaccatcaccctcgtgatcgggtgactccaccttcgttgggaaacatcagtgtaagggtaacaacctagcctgcatcaaatcatagcttaaataggctcatgttatcgttaccacacgtcatgccccgctgatgctatagctccaacttcacaactaccaaactcactgatgtactgttgagccagtctaacgtacattacagatgataagctttgaagccccacacaagagcgaaaacacaatcggtgaagtctaacttatgaaaaatgactaaagaaaaaggagtgagttgatcaaacggtgttcatactatacaacatagtatgtcagtagatattaggccttgtttggatcatctggtctattaaatagctctccggaatcttgctatttaggagtattaaatgtagattactgacaaagctaattccataacccctaggctattttgcgaaacaaatctaacgaggtatattaattcatgatcgcggatgatactgtagcatcactgtagcaaatcatggattaatataccttgttagattcgcctcgcaaaataccccaggggttatggaataggttttgtcagtaatcgacgtttaatacttctaaataacaagattccggagagctatttaatagcccggaggatccaaacaggatatgagaaagaatcttcacttctattcaaacattctgagattttattggttagtcaacaggatcacaataaaggacgcctgtgaagagcaactgaaatgattatttactctgtttagcattataagccgttttgtgttttgaataatacatgcatgcatccttgtatgtgtttttttagacgcaaaaggtagagagactctaccttattaccattgcattaatggtggtcattaagtaacaaagccggtggctggcaagagattataaggggggaacaaagaggaaggataaagaaaaaagaaagatagaaaaaaaaaggaagggtgaagaagaagaagaagaagaataaaacgatacacaaaaataaaagaaaacctagctaagtttgtctgcccaagtgttgatgttctcgcgaaggctgggctttaggcgatgaacccacaactggagactttctcttatttgaagcaggatgtacgtaacgcttgattcagttagcttgaagatcagctagttgtgtgccttccaaagaccgtgcgaacaagctgcaaagcacgcaggccatcccagtttctggtgttctggcaaggtatccaggattgattccacgaaatcttgtatgttagagctgcgcacggctggctcatagaggttgagcttcttccagacttctcctgctaatttgcaatgaagaatgatgtgatttgctgtttcaatagctgggcaagagatacattagtggagaaaccatctcacaatagtcccagttctattaaaaactgggactaaaaaacgatttttaatcccggttaaaaaatttttgatcgactaaagatgatttttagtcccggtttatcccatgtcagatgtatggcagggggtcgaggatctttagtcccggttgatactaccaacactttagatcgatctttagtgccggttggagttatcaaccggaagtaaatatttctctcccacatctgatcggttaagtcccagacagatatttagataagattagaacatcccctctcttcctcttctcagatccaatcctcttcctcctctccttcctcttctcctcctcctcccctctcctctctcccatcagccggcccttcctcctcctcccctctactccctcttccatcagccgggcgggcggcggcgacgcgaccgcgaagagggaggaggcggcgggcaggaggccggcggcggcgggtggcggcggcgggcaggcggccgggccccggctcatttgcttttttttatataatttgtatttcactggatgtatatttttttttagattttatgattcattgcattgcatggatctgagatgtataatttgtataatctgtgatgtatttaatttgtgtgtagtcttttaggatttgtgatgtatttgatctgtgtataagtaacttaatatttggaatgttgatttggggatgtgcatcccattcaattcgggagaaaatatatggattaacactagccattagcaaatcaacagtaaaataaaaaaaaaaggatctcgaggaactgtcgattcacctcaccaaccggaactaaagattccccctctttagtcccggttggtaacctctttactcccggttggtgttaccaaccgggactaaagagattcgtagtctcggttgaaaaaccgggattacaaagggttctaaatcgggagtaaagagtatttctccaccagtgatacagtgtgggttggaatcccatttttccttgtatgtgtttcacacgtgtctaaatttatactcctgtgtgttagggaatctagataggtaatggatcataaggtaaaacgtaaaacggagggagtaatacatactcttattgtgaaacagagtaaattagttttcttcctcgtacactccgagaggtgaggcaagcatggatacataaaaggcatattcgtcatttttgcgtaaccttacagtcctgctcatggtcatgttgcagcacgataggtagtttggtacatgatcttcctgagatgtaaataacttgtaatgtacggagtaaataacttgcatatcatatgtaccattacaactcatgtctgtaaaaacatcctcaggtgagtcaggtcctgccgatcgatgctccagtagctcactttgccttcaaagcaacagaaagtgcgctctctgataataataagttgatgataccccatgcgttgctgcgggatatttgaataactttagtaaaaatataaatttataaactttgaacatgttgcattagcgttgttttttttgaaaaaaagaaaaaatgatatattgtgtaatcataataaaagaaaagctaaacaacaaaatagttatgaatccaattaatccataaatcaccaagaacaaaaaaaaatgatggtctatgatgatgtcgttcatgatttactccttgatcgatgaacaaaataggcaagacgtagctgaggagacccatactttatgaattatggttgatcatcacataaaagaactctataacaaatagttcaaatgaaaaaaaaaagctatcatcaaggtaattcacatataattttaggggatcaccaagtgaatagaatcagctacagtgtaaaatataaagacataacaaactacaataacatgatttttgatcaacagtgctacatacctgcaccaaaattatgccaaataatccaaaaggcttcacacagtgacagtcattagcaatgcagttgctggccggacatgagctgcatagtggcaaacctgcaatagtggcaattgagacaaaacaccaatctaatatctgtaaagcacggctatgtgcgaggcaaaggctggtattttattctattatatctaaaaatatatctgtaaagcaaccaacaatgaaaaatataaccaatgcaatacagtgtgtgttgacagaggaagatacctgctgccgtgcatgtgacagagtcattatctaacctgaagaaacaaaacaggacatgccaatactattccctttacgctagtgttatatatacaacatggcttctcgatcgacagtttccttgataattgtgtggatcagtggataacatcgctcgattttatagacatgaagcagcagaaattgaaggcttgataggaaatgtatagttagcaattgaaaaaaaaacagacgggaattcatgtaatcctccatggaataaacctgcaaagaaagtgaagtaatccaaagaagagattgaaaggagtgactttccactggcacaaatagtgctccaagggagagataaaaaaatagagagaaagaaaaggatgaaggtattaggaccattaaaaagtaaaaacatggatgaaggtattacaaactattcgaaaaatggcccaatttgcatcatatagattataaagagagacttacatatttagctggactgaggatgaacctacaataatggatatcatggcatggaaagaaacaacctcctccagtcctcgtagtcatccaggaagcagcagcatcaaccttcatacccacttctcttcttgaatcataattagcagaacaactcgcgtacgtgtcgttatataaaagaagatgagaagggaggagacgttccaataatgcaagcggtggttattggaaggtgaagattaaaaggcagaagtggggcagccagcgacccttcgctccctaccgcgggaggggctggactgggccgatcgagtactatagaactgagcagggcaggaaggacggcaaaaacaatctgatctgttaaagcagagcgatccaatggacgggaatagacagtgacgtggcaaagcgagagagcaggaaaatagatttagtggggatgacttgtataggtatataggatactcaattaaaccttcttatacttcacgcctataaaggtaaaaggtagaaaatatgctttaacgcctcaatttttgggacattagaatctattttagtaaaaaccttgattttaaaattttagatctttgtaagaatgtaagtgccaaaatctcagttaaaatttcgaaacaattacccctatccaaattcaaatccatgaattcggatttcttttccaggttcattttacaattcctccgaatcccaagtccttaaatatctacacacaaaaaaaaactctcccctaaactcctagatcaaatttaaaactttgatttgaagctctccattgaaatgccctctctttcttttcctcaaattcataccaatattcaagtctcttccaaaaatatccaagtattggtatttcagcccttctataaaatatttagaatttcatgagaacaaaatataaaattttgaatcaaatccccgtttcaaatctttcaattatccttcaaacaattcttggaaaaatctcaacattcactattcattcgggccgctcttttccttttctcccggaccggcccgctctctctctctctctctgtgtgtgtgtgtcttaactgggccaataataatttgctgggcccgtagttagtttgcccactgggatggatggtcaagatgtggccgtttcgaacggactgatatgatgatttcttcaccctcaagaagtattcctatactgtatagggggtcgtatactaccgtataactactagatgttgctatatagttactcctcctctcacccatctccccactcgatacacactttgtttacatctaaatttggcacctaagattaaaataggaaatattgccaaaatttggaagtctaccggttcctccgaagtgggccggtctgaccgccgtatgttgggcggtcagaccgccggttgagggccggtcagaccggcggtgtgtggccagtctgaccggcaggtccgagtccgactctgtttcgtcgggtctcgaagtttccttgctcaggaagacatgtttcgggtttcctttggtttctaccccgagttggacgtggaggagggcctatagagggcaagaccaacccctatataagggacatggccggttcattgtaagaaaccaatctacaatcaatcaatcgaatcgttttttatattgcttttagttttctcttagtttgtccatctttatcggtttgcaccgtaaaccgtccgtcgccgctgcgagagtgcgacatctctttgtcggtttgtcctgaaaaccttccgtttttcccacgagacgggtagctatctagaaatcggctccgctagccggtttagttatcaaaacccatctaggtttagctctttgctagatcgaggtggttggcgactctaggatcaccgcaaggtttaagatgctgcgatcgtgcttgtcaacttgtcaaaaaagttgccaacacgatttttggcgactccgctggggaggagatccgttcatcgtcaactcaacttcgatttcgccatgacgaagccgccatccaagacggaggtggagccatctaatgtgatgccagtcacattggatgacttcgaaggagaagatcgcaaagctatggaggaatacatcaatgagctcacacgggaggcgttgatgagagcaactactaggactcgtcaaggcatgatcatcaagcccgggccacgtcccaagctcactcccgacgtggtaagtaatgacgaggtatcacaatctatccaacaacaaattgcatctacaatagattcatctatggctaattttaaagatagattagatgtaatgtttaaggataaagttgatggttttttaaggagtaggctcgattcttttatggatgattacacattaaaggataaagcctataccactgttgatcaacctcctatagatccaatgggtagtaaaaccgacggaacggcgttcacggtcggtccgaccgggcctgacggccggtcagaccgcaacatagccgtcgatctgaccgtccagacggccggtcagaccgggtattaccccggcggtcagaccctgggccagtcagaccggcacaatcgtcccaattcaggctatagatccaatgactaatgctagttatttgtatcactttaaaacatttgatcctcctgtatctactgccaccactaatcctcaagttcccccacatattcctaatgcttataatgatgtttctagaggctatcctcccgatactatgcaaggccaatataatcatattgcgccacaaacacatcctattaggccaccaaacccaccgccaaatccacaagggcctaataacatggaggatatgattagtgatattatgaggaatagattcgggattgaaactaggaatcatgctagagcttacaaaaagccatatcctgattattatgataatgtgtcgtttcctcgaaattatagagttcccgaatttgccaagtttagtggtgaggatggtaagaccacatgggagcatgtaggtcaatttttagtgcaatgtagtgaggctaatagtgatacttttaaattgcgcttgttttctttatctttatccggtaatgcttttacatggtttacttctttaccggcaaattctattcatacttgggctcaattagaagaacaatttcatgattatttctatactggggaaactgagcttaggttatgtgacttgacatcggttaagcaaaagtataatgaatatgtcattgattatattaagagatttagagatgttagaaaccgatgttatactttgaatataactgatagagatttggccggtcttgcttttaatggtttagttgctcctcttagaaaaaaactagacggccaacaatttcttgatgttagtcaactcatgcaaagggctctggctcaagaaagccgggctaaggataataaaaaatttgctagaccatttgacaaaaagcctaatgttaatgtagttgattaccctgaggctagtgatagtgaggaggagggtgatcatgatatttatgttgccgaatggtcgtggaataataaaaataagccttttgtttgctctaacttaatgccgactcctcgcaaagatcggcaaagtgaggttaagtatagttttgacgtggccaagtgtgataagatttttgattaccttttgcaagaaaaacaaattagattacctaaaggccatgtcataccatcgcaagaagagttgaagcgtcgagcatattgtaaatggcatgattctcattctcactctactaatgattgcaatgtgtttcgacgacaggttcaatcggccatagatgaaggacgattgaagttcaccgatggctccaagatgaagcttgatcatgatccttttccggtgaatacaattaatttcaatgataagaaggtgttgattcggccggagcaagccgaatctactaagggaaaggaagtggtcattggtgaaccaagatcaaagatgatggtgccaaagaagccggaggttggtgtttggaaggagaataagagtggagcttcaacttataaggctcctaggaagaccaaagtgacctttgatatgcttttggagaaatatgagaggcaaggtggtgagaaaattcgcaacaaagggaagagaccaagatcacctcctagggaacgatttggtcattcaccaagacggtcgcattcaccttcatatcatcatccacaagacatgtcatggggtccctatccgatgccgccgccgggttattcttatccctacttcatgccatggggggcaacgccgccaatgtaccatcatatgcctccaatgcaattcaaccaagggtggggaggaccaaggaggacaattcatgagcgtttgtcttcgccaaacaatagccggttctatggtaagaatcgggctaatgaagaaaagagggaaggaaagcgcgttaaggtggaagagaggacttcggaagtaattactatcaaagtgggtcccatgatgtgcctatacattctgtagatggagttggaaagtccccaagcaaaaaatccgaagccggtaccagctcctcgcagacggtcggtctgaccaggccctctggccggtctgaccgcggccatgttgccggtctgaccgggccatcaggccggtctgaccgtcgacccgatagtggtccgaccgacgcctcaggctggtctgaccgtgtgccacacgtcggtctgaccggcgcgactggccggtctaaccggtggtctacggccggtctgaccgggctccagcgccggtttgatgagaggattgtaaagagcgatgtgagggcttcatcattttcaagcaaagtcaatagaggacattatttacctcctggaacagagccgaatcctaggtggatgcctaaggatttgacggctactcaaaagagaaggttgcaacgtcttcggacccaagaactaagggagaaaaaggccgaagatcaaagggataaaaggttcaatgagttgcgaccaccaccgatatggaggcctaaatccatagagaaggcaaaaccgattgatgtacaggagaaggaagaacaatcggttgataaaagtgatttatctccaaaagaagacatgtatataaatatggtatatatgttgcctatggagttttgtgctatggatgaagccgaggttgctcaattctcattaggtcctaaagatacggtttttgagaagctcgatgaatcaaaccatcatatgaagcctctctacctcaaaggccatgtggatgggaagccggtctctaggatgctagtggatggaggtgctgctgtgaacttgatgccgtactcgttattcaagaagttggggtgcgaggatgatgagttgaagaagactaacatgattctcaatggcttcaacggtgaaccaacggaggcgaggggtatcttttcggcggagctcaccgtgggaaacaagacgctaccaaccgctttcttcattgtcaatgtgcaaggtaactacaatgttattttgggccgttgttggattcatgccaattgttgtgtgccttctaccttgcatcaatgtttaattcaatgggacggcgatgatgttgaaattgttcaagcggatacatcggccgaggttgcaatggccgatgctacttttgagtggcgtcatgggaatatccaatgcttatcggggagggatctttctagctatgattttattagtatctctgatggcaaatttgtacctatctctgtaaagccggctagtgtagcacggctaagccatataaatttgtataacgagtaaagaggctaatttagagtggttacaaaaaagggtgcaagaatatcggtctacaaagaacgatattggagaaaccgttgaagattttgatgaagtggagaagcttggacaagggtttacatcggccgatccattggaagaagtagacataggtgatggaactaaaccaaggccgacttttgtaaacaaaaacataagagccgattataaggttaagataatcaagctacttaaagagtatgttgattgctttgcatgggagtaccatgagatgccgggtcttagccgtaagctcgttgagaatcggcttccaattaaaccggtttttagccttataaacaaccacctcgtcgttttaatcttttactatatgaccgagtcaaagaggagattgatcagttgttgaaggtggggtttattaggccatgtcgttatgcggaatgggtttctagcatagtcccagtggagaagaaggggagtggtaagattcgagtttgcatagattttagagatttaaataaagccactcccaaatatgagtatcctatgcctatagccgacatgatgattaatgatgcctcgggtcataaagtgattagctttttagatggtaatgccggctacaatcaaatctttatggcggaggaggatatgtacaagacggcttttaggtgcccgggatttgttggtttgtttgagtgggttgtcatgacttttgggttgaagaatgccagtgcaacatatcaaagggcaatgaatttgatctttcatgatttgttaggtattatcttagagatctatattgatgatattgttgtcaaatcggatggtatggaatgacacatagcagatttgaggttagcttttgagaggatgcgccggtatagtttaaagatgaacccacttaaatgtgcttttggtgtgtcggcggggaagttcttaggattcatggtgcatgagagaggagttgagattgatcctaagaagatagaaaaaattcatgatttcaaagtgctgacatgcaagaaggaggttcaaaagttgctgggtaagtgaattatttgaggaggtttatttctaacatagtgggtaaaatcgatgcttttgttcctatacttcgcttaaaaaaggaagccgattttacctggggggcaaaacaacaagaggcgtttgaagagttgaagagatatttgtctactccacccattgtgcgagcgcctaaagccggaaagccttttcggttatatattgcctccgaagacaaagtcattggtgccgttttgacgcaagaggaagatggcaaggaatatatcattacatatttgagtcgccgtcttttggatgccgaaacgaggtatgtctttatagaaaggctttgtttatgcttatactatgcttgtaccaaattgaggcattatttgttatctagtacatgcatagttacttgtcaagccgatgttattaaacacatgttggaaaggccaattctaagtgggagaattggcaagtgggcatatgctttgatagaatatgatttggcttataaaccattgaaatctataaaaggccaaattgtatgtgattttatagtagaccatcatatagatgttgcttatgagggagaggtttgcttagttgaagttataccttgggagatttattttgatggttcttcttgcaaagaaggtcaaggcataggggtagttttgttttcacctaatggcatgtgttatgaggcatcggttcgtttagaatattattgcacaaataatcaagccgaatacaatgctttattgttcggcttacaagttatggagatggttggagctaaatatgtggaggcctttggtgattcggaattg

SEQ ID NO: 9576 - DNA, 43983 bp, Oryza sativa
tgtaagtttatttgttaaaaagtactttacagacttcaatgcagaataacacactggaagttggtaaggatgttgcaaaggacactgataatgtggcaaatgccgaggagcaggtattgaaccaccccttggccgagcaggtaaaatctgagaagcaaatatatcctggaatttctacaacattgatttgctctgaagacacaacacagttgatagataaggatacaggcagtggcaaattaaataaaaagatgaattgcaagtcaaagaggcaagtgaagtatcctgctgttcgcatgttttttgggcccaaacaactgttactggcatcagtaaaactgcacaagaaaaggaaacacaagagatccaaaaaacaccatgcactttctgtgcacattgaaagcatcatcactgatcagcagacatcaacatcagaaactgttttctcaaagatcatatcacataaatcccgtggacagaaacgttcttgtgccagtgcaagttctgaggatggcactcagctgttcaacaagaaacagcatatcgaaggaaccaccaacagtgttcccatggacaacaacgatacaaaacttgctagcgctgacagcaacgatgcaaaacttgctagcgccgagctaccaagctcatgtacaaactctctggtgaaccagactgattcaagaaacaatgtaaatgcaaatgagagaggcccctggcattttaatctcctcacaaggggtttaagagaaattactggttaacatctcttcgcaagaaatttctcattttccatcctgctgtcaacactagaaatttataactcattgttttgtttttgcagtgccacgttgggatgacactgagattaaaaatacgaaggaaacagagatactacatccaaggactagaagcatcggctatgtgctagatgaatggtaagcctgttaactgcagttaaatttctttctgatggtgatgttggatgtctcaattctcttgatgctgaaattcggaaaatcctccacccataccaaatctttgctaaacttctgagtaatatacgaacaactggcaggaacataacactggttcctaggtccgacttgaactaattttagaatcctactagaatatgcaaccagcagcagattcttctttgctgtgactaagatctgagatgaatataaagccctcttctttttttgtatatatctcggttttcctcttgcctgtttgttatccttgaaactgtcttattcggaagataaacatgatccttaacaagatgcacctaatcgttgtgtcagggacgaggagtatgatcgcggcaagagaaagaagatcaggaaaccaaagcatggcttcagtgggccgaaccctttccaggagacggccaacatcagatcacggcagaggatgagactacagtctgaccagaccaaatctgggaaccagcctctcaggatataattgatatactggagcagcaacctgttgttgtatccttcagttttggaacagtaactacttctctagtagaactattatcctccccatgttttttttttcagttatgtgtagtgtcatcagagagtaagatttaggcctcatggctcagtcatttgtctgattgattagccgaggaacgaagcggactcttgtttgttgtcccatttctgtcgagcttatcatgccaatttttttttacgtcaatgcattcacacgtgttattcatcccggtccattcgcacaataaccgagcaattaaaagtcgtgatttctgatctgtgacttgtattctgcatcaacaaaattcagtaaaaactgcaaactttgccaaaccggtctgtgtagccattgtgaggctcagtaagcacgccatcacgaccgtcagatcgtgagcgaacggtgttgattgccaatttccggacttcccctgaaaacgcgggactcgcacccaaaatgcccaatattacgtacgtgtaatagttagcccgaaaatgattggaagaataatttgcgatccaatttattgcggtgaagagggtgaggcgcaccgagttaaggtggctcacgcgttcgctgtgatgacggttttactggcgcgaccgaccggaccggacccaacgcgcgcacccaactaccaaacgccggcgatctcttgcaggcaatccattatccatgcgaggctgcatctaccgcatcagtttggtcatcgatcttcagaaagatgtacaagtctgattcaatgcatatcaaaccagcaaagttaaaataagcttgacattcagaattccagatatacatactccaaatatctgaatgccgcatgcatctattgttaacctatgctagctgcaaattaagggtctatttagatcccctgctaaaattttataccccgtcacatcgaatatatagtattaaatataaacgaaaaaaataactaattatacagattgcgtgtaaattgtgagacgaatcttttaaacctaattgcgctatgatttgataatgtggtgctacagtaaacatttgctaatgacggattaattaggcttaataaatttgtctcgcggtttatatgcggattctgtaatttgttttgttattagactacgtttaatactttaaatgtgtatccgtatatccgatgtgacacgtcaaaactttacacccctaatctaaacacagcctaaaccaaaatgcagcacataaagcagtgatattcatatgaactgatcgagccaacggaattggaaattcgacgagaacttcattcacgatgacgaggaggttagctgggggttgtaaatgagacgaggtgcaccgtgcacgcgcttaacgagttaatggaaacctaccatccaaacccaaatgaaacgaatcacgaaactgggccacaaaatttctccaaattttgaattccagaggcgaccagtccggctcgaaatccccgccttataaattacgcacgccgacacgatacgcccccatcgaattcaggcgcaaaaacctccaaaacctttgcaatattcctcgtaaatcgtaattccccctcgcgatcgagctcgcgacgcccatggcgatggagagaaacgcggcgccgcgcgtctcggcctcgtcgtcggcggcggcgtcgccctccaccgtcggtgcgctcctctcgaaggcctcggtggctgccgctcccgcacgcgagatcccctcgccgcggtcgctgctgtcgcgcatcctccataggagtggcggcggcggcggcttcgggtgtcgccttcgcctcccccgatactgctccagcggcgcggccgccaaggaggacgccgccgccgagtacgtggaggttgaggttgaggcggaggctgcggcgccgaaggtggtgggccgccaagcggttgatcgcgagtcgcctcggagctcgctcggtacgtgtccatggcgagagcgagtgatcggatggcgtggtctggttcgattgatttggttgtccgtcgtgtgcagggaagaaggcggcggaggaggtgtcgccggcgagcctggggctgggcgcgagcctcatgctgctgctctccaagagcgcggcggagctgaacaggatggcggagctccgcgcccagatggagcggctggtgctcgacaccaagggggaggaggaggcgcggagcagcaaccaccccaacgcgtccgacgatcacgccgacatcaccaaggaggagcccaccgccttctccggcggcgcattatcccgctgctcacgcacggccgccgccccgggaaacgcagggcaccacgccgccgttccaatggaccagatggaagcggagctcgaggcggagctgacgctcctgcaatgcgcgactcctcgtcgggatcgtcaactcgaggtcgaacagctagaagcccaccgattcggatcaatttcgccgccattttctaacatttatttcctccaatccatcttcgcagatcggcgacgacgaggaggagtccacggacacccacgcggccaccttcgccgacgccgacgatgacacggacggtgctgacgacgaggaggaggaggaggaggagagcggggcggcggcgcagggcggcgtgtcggcgagggagctggagaggaggctgcacgagctgctccagtggcggcacgaggagcggatcgcggagctggagacggcgctggagcgcgccaggaagaggctgcaggagaaggagcgcgaggtttgctggtggcgcaacaccgccaagctcgtcacccgccacaaggacgactcccgcctcagatagcaagaattaatccgccatgagatgagatcaaacaagaacaagatcaagatcgatcatctcgcctcgcagtgatccgttttgtactctggtgatcatgctgcaactagactagaagaacaaattccaaccagaaaacattgattgcataaactaactgggatcacagattcacaggattcggttgctgcagcctatcaacatttggagcagatggtaaggtgttttttacctatctagtctacggattgattccaagatgattgtgtttcggcctttcattcgacctccaaacgtgactaaattaagatgcatggaatgacgcacaatctcttactaatttatactgttcggttcggttcggttcaatcaccatcgccgcgcgtaaatcgaattattcctactctacctgggccagcaaatcaggcctctcttggctcatcactttgatatatcatatcacaaaattcaataaaataaaataaaatgaattgaactacaccaccatcggctatgcaaaacctgcagaccatgcaacgtttccaaaattatgtggctaaattcctgtagaaacataataaactagctgtattctgcacaagtcaaatttgcatcagttgcggactttgccaagcaagacttgcttgccttcttgtcaaagatccgtctctcacaaggtaagagcaaagaaacctgatttctttttgacttttgagattcctcatccagattatctcaattgccgctagaatatgcaaaacaacttaatttgatagggcgatacaaaacatctgtgctgttcttttcttatattatatcatcaataaatatacagtgggataacattcacataacacggcagaggcaacaaggaaccagtacttccgagaagtttcgtctccgtggtgcctcagggcttaagaggtggccatcttgactcaaagaggtctccgcccgtggcagacacaagaaacatatacaacttgaaagtatttattctgtgtcgcagcaaacctcaaatacacaccagttaccattcattctggagcaactcccttccatatgcatcacagagactactggagctgatcctcgttatggatagtacatatatcctgtgagtgtgctcttcaaagaaccgtgcatatcacttgtcatccagttgtttttgtagaaagtcgagaaccgagagacgctgcaaaagtagcacagtacatgataaaagtcagtcaagagcaccacaaataggagcgcatggatgaaaggcagtacacaaggataagtagtagctacccgctgctcaagactggcctctccagattccagcttcaaattctcaaggcatttaattgcttcctcaaaaccctcaactgccatgctttcgttcccaagatttctatcgacatccgcaactttggcaagagaagttgctacatcaatgacctatatccaaaagtagacagatcatgaaatagcggcagctaaaggaaaaacactcaagaatatgtctgttccatgtagcagctaaatcctaccacaatcttacaaaatgatttgtgatcttctgttggttcatctcctgacattaaatttagataagataaagggcttgtttggtctgcaaccaatttgtgctgtacaaatttctgtaaagttgctcatttgatttgttgccaatattttttttgtgtacgcgctttaattggttttcgttaccaaaattttgtcagtgccaattttttggccacagaccaagtaatgaaataaagccatcatctcaatggtattgacaattttattggcatggttgaattgggaacaagcataaatataggttaaaagatctgttagccatcatttatggcaaattgccaaacttcctagtatggtctggcacttgctaccagacttcagacaacaatttgcttcagagaaaggaatacaaaaattctgtgtaggaacccctttttttacatccatttttttctgcctactatgtattatgtgcaatgtccatcagtaccaggaccatgaattatgggataaaatagctactggtccatgtgtaattggagcactcattgatatggtatctaatacacatttaaacacttaacatttctaattatgtctggataataaaaatctaagataaggaagaacttttgatcaatatctgttgatatcattttcatggacatatggtactctactagtgtaatgatatagaagagctagcacaaaagagcagggacaaaagagagtgatgaataaggttccttctgtttctaagatgataacagcagcccattttgtatttatagctaatcttaatcagtaatacagtaatcacctgggaagccacagctgagtgttcttttactgcacttctgcgaacgtccaacgaacgcgcataatagcttcttgctgagtggaggtccccatcataatagcaaagatctccaattttatttagtgaaactgagagagtatggaccaactgtagatgaatgcaaaagttaaattaacatgagaacttactatcatgctattatgatcatattaacaacaaaacacaacctccagatcctttttgggcaatttcgagaggaattcagcactttcttcatagtaagtgattgctgaaggagcatctcccaaggtccgactgtggcatggaatgaggtcaattatgaacaaacaaagaaaaaataagttaaatactgccatgattatgtgtcacaaatataatgaaaaataatagagcacaatgaaattcatggaaaaagttcagccagatattataacagagggatgaaaacaaaacaccctccagtgacatggaaacacaatgagttcagcaacaacttatgacagaccctaaggcttttatatgagaaggtaccagacatcctgactagaactaggctcttggtagctggtagttggctattacacaagctatcagcttgctattggcatcagtatgctggctggtgtagggcatggttaaaggtttcccacgttttccgagctgtgaatatactattcagacaaattgcgaccagtcataattggcatcactatcagcccacaacctgctagacaacctctgtggtctgtgcatcagtattgtagaacacactgaggcacataacagtttaatattttaatggataacaaacgttattacaacaagattctcctttcccttgtttggaaggcaagttctatgcctggtcgaaacatagaaaattcaggtattagaacacatgaaagataactaggttctgaatgagcagaaagatgaacgggccaaggctagaatgggcccttgtgcacaacagatacaaatcattgagcattgagcatctctcttcttttgaggaaagctacagacatttcaaagttaagaactgttctctcaattagaaggaaaaaaaacatgcaagaatttagctcaatactcccttcgtttttaaatgactgatagcaggcacgattcacttttgaactttgaccactcgtctttttgttatatatttacaaacacaagaaatgatgccatgttattaaagtgtgttatgtcctaaatattaagaatcaaacttttgttccattaggtctaacaacttaagagcaaataatggtcaaagtttaaatgggaaagtcaaacgtgtcaattatttagacacggagggagtaggcaataaacgtatcaatagcaggttcacatatcctcaagtccccaagagaaaattgccgtaccagcagtccccaagcattcctaacacagctccaagttgagaacacagttcttggttgtcttctttagatttcaactcttccctgatgtcttctgcacacatactgagccttgactttgcactttcaatgttctgtgcgcgaaaagcctggatatgtaaaagtcagaggtattgttaaaatatatagagcattaataaattaatacagaccagaggatgaaggatatatgcaaatttcaaaggtaaaagaagctcagagtaagaagcttatgggagttgatttggtaactgaccctcatcgcttgctggaccagaaaagctcctctctccatggagacatgctcgtaaatgaccttggtcttgtcacttgcggcttcaccatcgcctgcagcatgtgatctcttgattcgggcatggccatcaatgaagcggtcgacaaggccttgaagctcatcatcaggctcgatcccttggatgtcagcaccacacaatggacagtccttaaagcgcaatatgcatgccctgagaaggaaatccagtgttttggagaaagacaaggagatcaagtgagaaggtacatatattgacagaacgaattagaaagctattgaaatatgatacgcacttgcagaacttgtgcgagcacggggtgcatttgctgctttgatgtagcagagcgtggcagaccacgcagctgagtgggccaagcttgaaggtgttgttggagtcatagccaaaggggcactttgctggcaccacacgaggatcggtgttagcattgccagttttttcattatcgtcgtcgtcggtgtgattgttggctgtgacaggacatgaggtggttttgttgtctgattttacggggcatgtggcgccagcagaggcgagtttggcaaacgggcatagagagctcataatcggttggtcttaggtggattattatttacctgcataaaagattggtggcaagcagttgagtgaaagcatgagactagatgcagtagtagaattgaattgaattgagaagaatgagagagattgttaaagtagggagctaagcagaagcttgattattagatagaggttgggaaaaaaattggggttggtttattttgtaagaacaatttatctatcaatctctatctatatctatctataactaaatctatatcatcccaaaataaatccagcacatgagacaatccaatcggaaattgcaaatcacaaaataaatcacacataagatgagagaagaggtggaaatcacaaaataaaatcacatcacgtaggagatgagaggagaggtcgccggaccttatcctcgccgctgtggaggtcccgagctcggagccgaatcccgagccgcggcgccgccgggcagccgctgcgccagggagccactgagcagcctctgcgctgggagccgttgacccgcccctgcgccgctgctgcctcgggagatgccgagagggagagggagagggaggaggaaggcggagacgacgagaccgaggaggcacggccacgtgaagggggccggtggcagcaggcggatgcgggccggcagaggtaggggaggtgggcgtgcggcggcgctgggggtggggcgacgctggggtgggtgggagtggggcggcgctgtggaggcgtgcggcggcgctgggtgggtggaggaggaggaggggcggtagtgtggataaggttggatggctgtgagctgtgggaatcaggttggttttcaaaaaattaacacaaaatttaaaactttcgattaggattttcaaactttcaacccaaatttttgaagctttcaagttaaaattgaaaactttcaactcaaaatctaaaatctttcaactttcaccagaactcagccgcctctacgccctcgagcctttcctgacgccggatctgccgctcgcgcgcctcggcgaccgtagctattgcggggccatcatcgagaggtcgccggacccgcccctcccgtcgccgttgacggtggatccgtgcgagagtgaggcggagagacgacaggatccaggcggcggcggcggatccacgcaagtagcaaagacggcttaagccggtgttcgatatggtcaacgacaactcggatggaggagggagacagacgaagaaagactggatcaccgccgtccactctcttgcgtcgctggaggttggatcggggagagtaggagagaaaggggattttatcggagatcaaggttttcggaccctgccccctctggccggcgatttcatcggcgcgggaccgatccgagccatccatcagatctgatggctcagatcagccctgggtcaggccgccaccgctgttgggccacgtagtctttgggccgcggatgacaactgggccgtgctcagttcaccccgcgatgggccgttgccgataaatggccaactcgatgcgcgatcaactcgtgcgcttgcgctaaacgggccggccaattttttaggccggttagtcatgtacataattttctttggcattattttgagccatttaaaattgttggaaaattatgatcaattacttagaaaatatatatctatatctatatatacctaataaaaaaatgcaaagcttctggtttattttggtcagttggtttttttcccaacgctgccggggctgaatcctagcacaaccccgccgccatgtcgatcgtgcgtttcctcctccaattgattgcaaaaattgatgccccactccttcatcatcagtgaccttcctggtcttttttatcgtgaattttacgttttgatttgagaaaaacggaaagagtagatcgagtggattgaaagccctcatctaattttgggagatcaggaaagattcggccagatttgtggggaagatctgctctggcatcgtatgggcacgagactctcttcggacgttgaagacggagtcgactgtgggagcaaggcctgtggctccacttggggactgggctgaagggaggcaggttgagttgagggagttagcatactagcctagggcctaataggaaggaaggaatgggctttcggtccaaaaccaagaaaatttttttattaacttttaaattatagtatatagcaatcccaatattagaattttcattaacgttttcaatcgtaatgtatagcgagagagataagcctatctgaccaggcaaccgatacttttttaaaaaatacaattatagtagaaaaataattgttaaggtacacgtacatactttacagacgagtgatatttttaattattttttaatttttgacatcataatcatcgaaacttttactttaatatttgtttgagataaaaatttccatgaaacacgacatattaaagtatgcgcgctatatatcatccacatgtcaccactacgagactatgtgtaaatatgcaaaagtatttttgatcgatcgtggttttcattagttttataataaacttacctgttttaaatacaaattttttaatcatacaaatttttgtccatctactcttgcgtgaaagtgacctaaagaattcaccatttgttcctcccatgatacaatcattacgctaacacgttaggaatgtagttgatatcatacacatacatgtggaataattgtccaaacaaaaagaaaacctttgtgattaaaaaaatccttcaattaaactttatccaatgcgacattacccggtgcaacacacgggcattttgctagtaactaatataaatattcgtatttttccggtcgtcacatctaaattttcgtccgtttttcgtccatacccaatctgattcggttagcaatagccatggaaaaaaattgcaaaaaaaaaatctgcggccgtcgacgcccgcctccacgccgtccgggctgccacccctcccgctccgccgggaccaccgccgccgcccctcccctcccctcgatctagcggaggggagggcgtcgccggctctcccgccgctgccacacacagtgaaaggggaaaagtggagagagtgggggggatgggagggcgtcgcgctggggggagggtgccgccaccgccgccgctcgttgggggggagggcgcaccgccgctgctgccgctgctcgatacgggggaggcgtcgccgccgccgctcgcggggggagggcgccgccaccgctcgccgtgggggaagggcagcgttgccgccgccgccgctcgccgtgggggaaggtggcgccaccgccacaccccgccgcaccctgccgtcgtcgcgccgtgccggcgagaagggagggacagcgccggtggtgggagagacgacgctagtggcgggagagtcggccggctggggggaggggaagaggcgccggtggggagagggagagggggagggggagaggctgcgtcaggggtaggggaggaagaggcggcgtcaggggcgggggaggaggaggcggctggctcggctggggggagggtgagggggagggttagggttagggttttcatcaattttaaacttatctgagccgtctatcaaaacgaacggctgagatcgatcgtgggtttgggccgcaccacttgggctgcacgtgggccggcggtccactaagtgagaggaggagtatgggggtattaagtagactttggtctcttgcaggctgaagaagaaaatgggctgaaaaaggcccatagagaaaaaaaggatttttatttagatttttatttcaataaattctgaaatgatatttgtattatcaaaattagcaattaagctatgtaaattccaagaaaatttcaatgagtgtaattaatatagaaaatttaataaaagttaaatccaaccataacattttatttcttacacttactttacttataaattaatttaattatatacctacctacttaaaaaatacccaaatatttcagaaaatttgtatttcatttaattataatttaatatgttttaattcaattttatctgtttttttcttttcgttgcaacgcaataccacttttgctcagaaaattttatatttcattaaattacaattcatttttttcatataaatagttcaaatcaaatttcattaaccatatcattaccctgtggaacgcacgggcattttgctagtaagattataatatagtaatagggaagagaattaaatcgcatgaacgattcatcctcgatacatgaaaccctagaaatcgtatgatgggggatgggggagtaatcaatacttacgtacgtaggaggaggagagaatgaaggaagggggcaggcggcggcgagaggggcgccggagtcggcgggaatctgggtgtgcgccgagagggagaagagagattgtgagcggagcggatgagagaggggatcgattgattgccaaccgcaagctacaagctaagaagacgggaggaggaggaagacgcgacgcaacgcaaacgaatcgaggagtaggcccaccagaccagaagcttacaatggagtatgttgggccgatagcccatttgcattttggcaacgcattccatgcattaatggtggtagtccccaccacaagtcagtctgggactgtccaccaccgcttttatgactcctgtatcactttgatgtaattatcttgatatcaatagaactccttttatatctctagaaagaaaaacatttgcatcaacatcattattattagagattaactatatctaattaatattctacattacaaagcaacaactattctctcaattgggacattggcccggtccaccgaagaacacatgcatacccatcttgagaacaccaaaaccatcaacagtgtagcacaatcccctagtggtcactgtagtggccttaccaacgtttggattgacaaagttgttgtccttgttggctatcctgatacccttcacaagtgcggctttcctatacccctctttggcgaaatggccgctccccattggtggaggatctaatgaaacagttggtccacgaacccatccaccccaaaatgcatatgtagccttctcttgtagggtgtcaaagagcttactcggccaatatccaagtggtcgatatccaatggcactgctcttgtctaggcgtgctagccaccaatctttagtctttcggtcctaattatataattaacaaaagaaaaaaaatttatatgagtacccttagaccggtttattacaagaaactattctaaactcttgaagggttgtcccctagttgtttgcatgtcactcaaatggttatagaaaaattcaacaagatagtttaatatgtgatagatcactacacaaacatgtaagatcaaatttaacttctacatattgcagcagaaaaacaaatttaactagaatatacgttaactagttgtagtttaattgacttatataagttaaattttaacttacatgtttgtaaagtgatatatcatatgttaatacattttctcaaaaattttcaatgtttttcataactatttgagtgatatacaaataacgaggggacgtccccttgagagtttaaaatccactctcgtttattgccttttgtaaaatcacactatgtagtcacaaaagtaaataatcatgtagaattattaaccacaaggaaaatacctgaaacagcatgacggtaattatatactgaggcccattgtagatagaaaccggtgttattttccctccaataccagcaagttggctaacttgcacaaaaccaggacaattaaaatcatagcatggcttatttgaactgtctacctatcgccaaaagtaatgccaaggatgtaagttggatggattttgtggtggtggctgtagagctattactaatattcgtttttatagccacgtcaagtaaggaaaacatatagaaaagtatgtgtgtattacccaacgaatgtgaaacctgacaaagttgtccccactaaaacttggccatacctgaaaaatatgatgatgaaaaccaacaattatatagtacatgaatgcataattattgtttaagtttgcaatactatagatgtgacaaaattattactaataactaagctagagggaatacatatgattaagcagaaattcttagacaaaagaatttatgcttaatcatgatataaataaacaatgatataactcatgattaatcacaatataatggaaccgtgataatttcaagtgttgaaaataatagcacggtatgcaatgggactatatacttacaatggaacctgcagctatctcttcgggtccattattaagttgtacaaatgatgcaatgtggtccccattatttcgtgttcaaaacggctggttaacacttagggtagcgtgtgttccatagaaactattatcgtcccagtatttgatacctgcatactacaagtgaaagaataatattgaaggtaagtcaaatagctttgcatgccacattagaatagaaaagaatttaatgaagataaactatttttatatacaatctataattgacaataagataactaaaaaaatgttaaagggtatacctcttcttgtgaaccaccattaggcatatgtgcttctgagctattgtgacgcagtatcggaattgttccggttgggcacttgatgtcggggaaatttgattctgagatattggatgacagaatagattgtatatcaagatctaatggataagagcttggttccatctgcgtaacaacaaaaatgaatcctaatcaaagatcgaaaacaaataccaaaaaatacacttatctttatattggacggtaaagggaataaatacgggaatccctcagttgatggctttcccaatatttcatattaaagtatcatgatgatatcttatataatctactaatggatcctaaataaattaaacttggatcttgaaactgctgttctattcatacaaaacacaaaacttaatcaagcataatatttatgtaacatgctcaaaagcatattcttctatacgaaaagtaatactctacctggattatatggtttttcaataatggatggttcatagcaggttgtttgtatatgtcaacacaatcgtaaacatcaccatctcctgtcttttgaacaattagttccttgttagccaccaaatgcaatgcaaatacagaagagaaggatttattaatcacatacctgaattgtcatgtttagatctttactaggtatggttgaaccaattatcccatctcgatcaatatgtatcttcactcctcctactagaacaagatatgtcaggcatagagttacaatactgatagctagattttcttccattgttgagtctcaagaggtcatctgttctgtatgcaaatggaccattttatagcttgaggaaacaatttatcttcacaaggccaatgaaacatttattcattgctgaatgagaattcaatgaatttgcaattaatattgagggtgtaaggacatgccacaataatgaagtaatcttcaagattatttacactattaattgaagatatctttacagattttgtaatcctctttttaatgcattgtgggaaaaataatataggaaaggcataaatgataaatgtggcattaaatgcacaagatttggtatactagacaaccgtacgatgtaaatttattgtagtaagaacaaatttaatagtatagccaactgctacctataacaattgatgcatcatctatagctaatctagcgatatacccatgcaatagttagctatagatatatgctaacaccattaagcatcaatacatggcttgcctaatcccctcacaaaatttgttggagcccgtgttgtagttggctactgatttatagtccacttaacttctctctactctcctctatcctccaactcatcacaaatatggtgtagcatttcctatagcctacttacatcatcttattgcatttacactaatttttggaagaactttaaaatatttaatgtaagaaatattaattacatgatatatgataataatactagattacatcgggtggacattaatttaatgttttaatgtttcttcaaaatatttaaagcatgctgattgtcattgtgatgcagtaaatccttttccatatactagtatgatttattttgttaatttcatgtttctaaagtgacatatataatgtagcagcaatgctaattagcgagcattctctagcaaaggaactagtgaaaactacatccacatatgacatatgtgctctctcactaacgttgatatgactcatatctcctatagtgggatatcttaatggctatcctttgatacctcggcctcctcctcgctagtgatccccacacttgatcctagtgacgccgatgaggtcccatgtcttcatcagatttggaggcaggttatcggtagaaacttccatgaattcgagtagaaagtttgaagtcatgcgtagaaagatttgaatttttttttgacttaaaccactgcaggtccccacaattaatatattagaaagaacgaaagtttcttacaaaccaaaacaaaaaaaaaataaagtgtcttaaaaagttctgaatattttacttgaaattttcaaagttggaaaaatattggttgaaagtttttgagattttagttggaagtttcagactttgattcaaaagtttagggattctggtataaaatttttgagaatgttttaattggaagtttccacttttgatttgaatgtttagggattttggtatataaaaaaagagattttagttggaagttttagactttcaattgaaagtttgtgtttcgaactagaagtttcgggatacaagtagaagatctcatatttgaatcgtaaagtgttgttgttcaatttgaaagtttcaacaacgcaagtagaaagttttagaaattctagattgaagtttgagaatttgattaactcccacagcttgctctagcctcttgtatagaaatagggaaaggaaaacaccccgtgttggaaaaggaaatgggcacaagtgttgagattcggagtatgactctaacctagatacttcaagtcaggacacgcgaatcgtgtgaaagttactgctgagttgaaaccattcacgacctcgtcatcttgcatgtgagtgcaaattagcaatccacataaggtactaccttgtagtacaatgcaaatttgatgatttgtcactctttgtattgccaactgccaccctgtgagaatgatacatgggactcttcgtgccaatgatgagtgggctaggatggcaaattatctaatttatctaaagagttgtaaatcatcaaatctgttgcaatacaactatttattggtgcttcaaaggttgaaatgtgcgtaagaacatatccgtggcacgcaatatatctcgaggtcccgctagaatgcgtttagggaaataacgagtttcgaaagaatgaatgaagctcacttgcttcttaaaaattaaaaaactcatgattggttgcttccaaaaattaaaaaaaacagtgagcgaatggctaccatgtgggccatgcctcaggtgaactattctacaccatgtcactgtcactttttttgctccgcaatgaggttaggttggatcctagtgtgggccaaacgaaacaaacttgtacttgtcgcgtaggcagtgggcatgcatcatgtgggcctcatgggctggtggcctaagtagtgcatgtgaccgtgggtagttgcagtggacgcaagaggagcgcgtgcgtcacgccacccgtgggacctcactggtaggccgacaccactctatgccacctcgatcggacaccaccaactactcaaatggtccaagctttgctccggcaagcccacttgttagtccttggatatgggagctagctactgactggctggtcaaaggagcctccgctcaaaactccagccccctccaacacacaacattaatttgcttctttttgggacaatgaatatctcatcagtctaactatcataggagcccgaatctgattattaaaaaggaaatagagggtgcatgcatgcatgcatacatggtgttatgttgttgtatgttccctttaattccattatttctaacacataaacttatgttattacaatttgcaaagcacatcacatcatttagatgtacttgcctgggccaccatagtatacatgcataccatcgtcattaagtccataaccatcatagctatatagttttagattattagaaaaaggattggcattacggatgtttggagtaacaagcttgttatccttgtcttcaataacttgaatattcctaataaaagcggctttgccaaatccttcagaagcaaaatgcccacttcccatatggcgtgcaccatttaatttatcttatcttaatggcgttacaatagaaaagttcaagaaattctctttacatgcatcggcataaattatttggctatgagatggtagaaaaaagattccaacttatcatgaatagctcaactaatatcattgtgagctgaacaaaaagaatatagcaaaaatacttgcacataaactacatgcttagacatggaacctatatgaccaatcatacaaatattaagaatataatattaccttaaaaataagaacatttattacatattgtggtccattatagacagatatgggattgattcttcctccaagaccaacactgtgactaacttgcatgaaaccagggcaattgtgatcactgcaactcttgttcaattcttcattatcctattattagaatttattccaaagtcagcaaggaactgtaacaaattatatttgtaatatccgggttatcaaatttatatggtccatcatagatggttactgaagaaaatgtttatgtctcacccaacgaatatggaacctagcaaagctatcaccacttcttggatatacacaagacccagcacctataccaattccgttggtaccttttgggacaacactaatttgtatccatgatgcactaacatctttgctatctttcttcacacttggttcatagacatttattgatgcctgcatgccatatatctcatcccaatattcaattcctgctccctacaagcaaaaattatgatgccttgttgggataaaaagactaacataaatactacgaagatcagctgatcgagttgaaaatttccattgccatatccaatgcaaggataacaatgtggggtctaggttggcagttatcctcacattggatatcattttccaatttgtgcatgctcaagtgttattgggcagatttcccaaatcaaagtatatatataattctaatggcatattacacagaaatttcaatcttctagtgttgtcaaataggaccaacactaatacatttcccccgataagtattagtaattggatacaacaaacatatttcaaatctccctttggttttattgaaaaaaaaagtaaagcttcagaattaaaataagttacttatttcttaaaattgcatttgatctctgaatttctatttttttatatataattgctcataagatgggaacattgcacatatttcatcttatattatgtctcgttgagaattttgatgttagcactcaaagattgagtcgaaaatgatcatacttcgtaaatatgcaacaactattcatgaggcaataccatacaatagtctataatatcataaccaaccttttattactatataatttcaaaattttattaaaaaacctaccagcattggtaaatcatcattagccagtgtgccaatacgttgtaccatcatgttggccaaattgttgttgcgcactattggaattgttccaatggggcaatcaatggtagacaattgtgcttgcgagattgcacctactaatggcgatttgatatccatccctatcgggaaagaactaggttccatctatttgtcatgaaaaaacttgatcaccgtattcattaaaaaaaacttgatcaccgtataataaatgactcccaacgcacaaccaattaaatagatatacacatagaaaaatatgcacacatgatttgaagtgcagttttcacatgtgtagacgatgaacaatagatacaaaaagaagttattgttcttaatgttaaatcaaagtgtagagagtggataaagaacgatttttaaaaacaaatgtagaagcaagctatgacctatcatgaatacaaactaatgtaaagaatcttgctatgatgatttttcctacaattttcagcctatataccatataattatgaatatgaagggacttgcaaatattttttgatttaaaattaaaaatatctaaatcaccgtcatgtgatagaaaatcagatctttatgaaagtggctaacctgaattttatgtcctttgaacaatggatgtttcaatgatggttgtagattcacatcgacacaatcatatatgtctccatcttctacctactttaatgtttctctgtgcttgttagccatcaaaggatcactaaatgtatctcggaaaaaggtatacttgctaatacctgaatagtcttattaacttgtaaagttgtcaggattcgactagtattttctccattgttaatgggtttgagctcttctcccctagtagttagaacaagatatgacaagaggagagccagttgagaaacattgtttcctttcatggtggaaatcttgagtggtttgtttcatagcatttagaccattatataggaaaggtttcactggctatcatttaagatgtaatacattacaattaatgacagatgtacaatacatttattacatagaacaatcccagtattaattgcacaagatatggtagagtaagagccatctcatatttgcacaggcatgactacttccacctaattagtattatataaatgtataaatgaccttcctgcctaaacatgttaaaaacaagacctcatttattgataagattggtagcattaagcgaagaaaataggggaaagtcgtcttgaagttctacaacaaccaacaaacttatatgggtttcctacaaccctgcgttatggatgctcccaagcttggctccgacaagccagcttcttggtcatggaaaatgggagctaccggttagacagttggaggagcctcctctacagttatcatactcctacctctgccaacaacacatcaatggcagaaggaatatgctagctatgtgttattaagttccatttgcttctttgggacaatgagcatctcttcattttaactattacaagaaatcatgattattgaagaaacaagaggatgcatgcattgtgttgtcatgccatgtatgtaacctttaatcccattatttccaacacaaaagattatgttgttacagtttgcaaagcacataacaccatttagctatacttgcctgggccaccatagtatacatgcataccattatcattaagtccataaccatcatagctgtataattttggatcactagaaaaaggatcagaatcacgaatgtttggagtaaccagcttgttattcttgtcttcaataacttgaatattcctaataaaagttgttttgccaaatccttcagaagcgaaatggccacttcccatttgtggagggtctgaagcagctatcggaccttgaacatatccaccccaaaatgcataatcacctttggctttgaggtaagagaattgtgaacttggccagtatccgattggtgtattgtttgaaccatatgccaaccaccagttttcagtctttggatcctaaaacatgtcaagattagacaacaaatacttaatgcaaattctaaagtaatatttggcattgaatattgatatgtttgtgtaatcaaactaaaaaactgtaattaattcgtcttgatttgaactagtttggactagttttatttatgtggtcattgtaatcatactaatttcaaaaggaaattaatatagtttagattgttcttactcgacttattattgatatatcaagtctacatatatagtcaaacctgagtttccatgttgatcgagcacaaatatcgtacaattctcaatctgggcatgcattatgttacaattctcaatctgggtatgcaattatgtaatttatcttattttaatgaaactataacatcaaagttcctttttaataaattaattttctttacatgcactaagataaaatatttggctaggagatgatagggaagggaattgctataaaaactatgagttgcttagtttttaataaattaattttctttacatgcactaagataaaatatttggctaggagatgatagggaaggggattgctataaaaactatgagttgcttagtttttgaaaaacaaaaaaaatagcaataataaattacataaattgcacgattagacatagaacctatataaccaatcatacaaaatttaagaatataataacaccttaaaaataagaacatttattacatattgtggtccattatagatagagatgggatggattcttcctccaagaccaacattgcgactaacttacacgaaaccaggacaattgtgatcaacgcagccttttttcagttcttcattatcctgtcataaatatttattccagggtcaataaggaatcaaaacgaattatatttataatatctgagttggctaatttacatggtccatcatagattctttctggcccatcatatgccttacccagaatatatggaacctagcaaagttatcaccactaaggcttggagacacacaagacccaacacctatcccaactccaaccgcagcttttggcaagttactaatttgtatccatgatgcagtaaggtcctgactatctttcttcacctttgggtcgtagacatatattgatccccgtattccgtatacctcatcccagtattcaattccggccccctacaagcaaaaataatcatttattcttgcaaataaaaataacaataattgcaaagaccaaatgatcaagttgaatgttccatcggcatatccagtgcaagtaagacaatgtggggcctgggtttgtagtcattcccgtgttggatattatcttccaatttatgcatgtttcaatgctactagacagatttcacacatcataaatacatatatataattctaatgagttattacatagaaatttcattcacttagtgctatcgactagcaccaacgtggataaaccttcccaagaagtattagtaattgggtacaataaactgatttcaaatccctttagtattattgaaatattattcatttgatcgaatatcttgttaaaaaaccatcaaagtttcaaatttaaaactagttacttatttcttaaaattgagagagttttttttggggggggggatctctctgaatgtcttgttttatttataattgttcttacagtgggaacattgcgcatatcttgtcttactatatctctcgccgagaattttgatgtcagcactgaaagattgatttgaaaatgatcatacgttgtaattaggttatgaacagggacactagttgtgctgttaaatgccatatgcaattcatgggacagttccatacaaaagtctatattgtcacagtcagcctttcgttagtatatagttcaagcatttaactaaaaaaacttaccagcattcgtgactcattgctagccaactcgccaattcgttgtagaattgtgttgtccatgttgttgttgtgcagtatcggaattgttcctataggacagtcgaaggtagacagatgtgcttgcaagactgcaccttctaatggcgatttaatatccaaccctactggaaaagagcttggttccatctatttgacatgtaaaactttatcaccatataataaatgattcgcaacgcacgactacttaaatagatatctacctaacaaagtgctccaatgattccaaagtgcagtttctgcgtgtatatattatgggccatatatacaaaaaagaagtcataattttccttttttatgttaaggcaaaaagtgtagggagtgcataaaggttgattcttagaacaatctagaagcaagctatggcctaccatgaatacaaaccaatagaaagaattttgctatgatgagtttgcctacagttttcagcctacgcagtatgtatcatataatcatgaatatgaaagaacctaaaaatattgttttttgcatttaaacttaaaaaaaataaattgacccaccatatgaaagcaaatctcatgtttatgaaagtggcttacctgaattttatggtctttgaacaccggatgtttaaatgttgtctgtagattcacatcaacacaatcatatatgtctccatcttgtgcctactttgatttttgagtaaatcgtattagctgtatatgaatttgttaggtgggtgtaatctagtgcatgaactcgtaaaacattcattttggtaaatgaactaggtgcgtgcgaacgaaggccaaaagaacataacaagactattcttgctaatttaagtattgattagaatgctacataaatatgtacttgagaagaatgctacataaacatgcatattttcactaaaatggtttaataaggcctataacgattgcacggagaatgatataaaaaaaccgagaaatgatacaaggggtagaacaaagaataataaagtataaaccaagtttacaaatatagtatgtttcatgctcacctcacgtgtgcacgtcctatcctaaccagcatctaacttgatagaattggccatgacatgtccttttggtcttagtttgcacccatccaacaagttcatacaccaaaacaagtattttacaagttcatgtagtaaattgcacatacctgataagtttgtatatcaccaatataatttactcttgatatttcctcttgtttgtcatcaaggatgccaaatatacaacccctcccccccccccccccaaactcagaaagaaagaaagaaagaaaaagaattatttctcatacctgaatagtgatattaacttgtggacttgtgaggctttcattagctttttctctactgtttatagatttgagctcttttcctccaatagttagaagaagatatgacaagaggagagtcacttgaaaaacattgtttgctttcattttggtaatcttgagtggtctatttcatagcattagaccattgtatatataggtttagaggttccgctagttttcacttaagagatactatattggaattaatggcagatataaaatgcatttaattacacaagaaaaatcatagtattaactacacaagatatatagagtaaagaccatctcataattgcacaggtatcactgcatccctctctttgttataaatgtttaagtgaccttgttgttgtacacacattaaaaccaatacctcatttattgataagatcaatatcattaagtgaacaaagagacaaatgtcttgaattctatgaataccttctccatctgtccaaaagtttaacgactactatgttccttttagagattaagaataaagaaaaaaactatgatatctcttattaaatgagtggtggttggggagaagataataagagatggtgtttggaggtaagattgagtaaaaataaaataagggatggttggtgaagggagtattgctccataagtaggacaaaatttaaatactaaaggttcttatattttagggcaaatagagcatatctgaataagagtaagaaatttaaaataaataagtgatttcttagaatcgaatggagtagataatgtggtggacatcaccagcggctatcaggagaatgctggcggaaggcctggatgaacaccggcggcaactggtgaggttgcgagcgtgaaccaccgtgagtgtgatgacggcagcggcggcaatgggcttgaggtcatcgtcgatggctccctaaataacgacgtcatgtcataagcatgtaggcatgtactccatataaatgcaatacgtgttagctgaaatgggcaagagaaaaaaaaaagaaaaacacccgaaccatctaacatgacccatagcggaaggcactactatgcgctcgctcctcattgtgaacggattggtgctgtaggggtggcaatttccttgattgggggcacccctaatgaaaacggagcggatagtttccgtccgctccgaataaaaacggatacggatatcttttggatcggataattctcggatagtttagatgcggatacgaatacgaataattcggatacggatacgaattaaatttagccaccatatgtaagaaagccatctctttaagaaagtggcttacatcggatgtttacatgctggttgtagattcacatcaatacaatcacatatgtctccatcttctgcctacttttataattcatatatatgttagccatcaaacaataaagccaaatatagcccaaagaaaagtattcttgctcatacctgaatagccctattaacttgttggcctacgaggatttgactagagttttctccattgtttatgtatttgagctcttttcctcttatagttagaacaaaatatgacaagagggtaacttggaaaacgttatttcttttcattgcataaatcttgaatggtcaattttatagtgtagaccactgtatttatatatgtttgtaggaatccgatgttggtatttaataggtaatattttgcaattaatgcaaaatatataatatatttaattacatagaaaactatcctattaattgcacaagtaggatcgatacttcctttaggtattagactgatagcactcatttattgagagcaggtacaatagcaggctataagccagctataaacatattttaaagagataaaagaagagagaagagcagcaggctacagagctgtagccagctgcagcatggactccaagacataatgtgtgtatgaaaggtaggaccaggtataatagtatagtaaacaactattgtatgaattggctattacattgacaacattcagagcaagtttgatagtatagcccactactagctccaaattatctatagccaatgtaatagccaataagaaggacataaagggaaaaagcagaagacaagtgtcaagtaagcactctaaagtgacatgcgttatttggaatgattttttttaaaaaaaaatgaaccttttaaatataagagtaaagtccatcaccagtccctaaacttgtaccgttgtgtcatttcggtccctaaacttgcaaatcgatcgttcaaatcctcaaacttgttcgactgtgtcatccggtccttaaacttgcagatcactcatttaggtcctccaacttgttcagttgtgtcaccccggtcccttaacaggacggtctaaaaactttatatcaaaaattaattcataactttttcatgtgaacgctaatgaagacaaactttatatcaaatttgtagccctcgacacgacctacaactttgtagttgaaaagtttttgaattaaaactgtttagggtcccaaaatattgttgcatgtttatagattttgatattttaattttaaaattacattttgggacaaaaaaatgacttaaaataaaaaaaaatcaactacaaagttgtagatcgcgtcgagggctacaaatttgatataaagtttgtcttcattagagttcacatgagtaagtttagggacgggggtgacacaacttaacaagttggaggacctaaatgagtgatctacaagtttagggaccgggatgatacagtcgaacaagtttgaagacctgaacggtcgatttgcgagtttatggaccgggatgacacaacgatacaattttagtgaccggtgatggactttactctcaatataaattctttgagaacttattttcagatttgtatccttttggctacgctattttcactagcaaggtataacaattttaccacggtggtgtaatatcatggtgtgattttgctacaccagtaccaccactcgtagtggcatggcaggtcagtggtactatagtaccgcccacaccattgtttgtatccttgtcctaccatgctaccacggattgatttttcttaatttaaattcttcggaattggaagtagtagttattaatgtcaagagagcaaaggcaatttaaactatgcaaaataatttttggaatgattcaaaatatcgcttagaaaaaggttgatgcatgggcttgaattctcgttttgcccgatgcaagtcctatatactccacatgtttcatatggtaagactttctagttttgctcatatacatataaaagttaaagagtaaattgcattcacggtacatcaacttagtaagttggtgtaatttagtataggaacttgagaaatgagcatgctaggacaacaacttaccaagtgggtgcaacctagtacaaaaacttaataaatgagcttatgggtacaactacttgaaatgtgggtatgattttggtacaataacttgagaagtggtgtaaaaacttaattattttgagtatttttggctatatgtactcagcttttacgtactctgttgataatacttgcctgaatcttctctctcggttactcagtggagtgatctctctcttaaattcccataaggataaggaaaagtagacggttcgaaacccgtgcttaaatcctactcaaggttatacttatgtagatttgtacaagcattttttttttgtcattctagtaattcaaggtcaaacaaattttaccatgcagaaattttctagttggtaattgagatggtgaaaaaaatatctaaatcgatggtgcaaattaggtgagcaatatattcttacatattatataagattatatctacgggaatgctatgtgatgacatattaacatcgtgaactttcatagcactcattaaccaaaatagcatatctagccaagttattgcaccaaaatactaaattatcaaattcttgtattaaagcgcacccacctaccaagttattgcacttagacgtcacattctcaagttcttgtactaaatcgcacccacctgtcaacttgttgtaccatgagtgcaatttactcaaagttaatggatctagagacatatatatgtctagattcattaacatctatatgaatgtagacaatgctgaaatgtcttacattgtgaaacggagaaagtattatttagtgcgtttgagagaagggaaaaatgagaagaaatgttgagaagatatgtagagcgaggtgggtcattatcgcataattaattgagtataaattatttcaaaacttgaaaaggaaagattggtgttaaaacacctttctcataattttttttaaaggtactgtctaacagttcgagaagcatatgtgtctggaaaaacaaccgacttttctctacttgtgcttgtgtcaaacacctaatcttggtccaaattcagttacgcctagcaaagctttgggaaattggcagtgggtggaagacgcgtcggatgagggttaaacaaggttgactagttgagtacttcaggggctaatccaagcgtacatgggccggctgaactcttaacttgggttgggcccgccgttaaactcagaaaggaaatgccatcccgcgttttccctgggaagaggactcttcctcctaaggaaaaggaagagctaagaacccgacatgtcatctagctacccacattcccttccattttaaggtcggattaggtgttgttgtaatccaacaaggtttatagcaagattgctgatgatcaccttcttctcttccgatcctcttaataatttaatgttacttatctcacatgatgtcttaaatattgtgtagaaaccatgtctcatgcaaaacatggtttcattctcttttctcatttattcacatgtcacatcatttttcatactaggtgacagcttatttaagggcaacaacaatgtatatagcaaaagtagtccatatagatgggacccacacatatggactataactattgttatcttcacaatgtatatagatagcaactagtattaagaggggagaggaaatagagagaaataacatgttttattttatatgggcaacccatatgcttatagttggcttttactattttcttgctatggactggttccataatgttgttaggtggctgaatggaatattttattgcttatggactagttttagactacattgtggatgccctactgatatagacactattctagtcattgagttgaaaattgccttaggccattcccaacccaagacactagacatagttttcataaactccacatcataaaaaaataatagtactagacactactattccaatgcaaacaccactattccatacttaaatttaatgccacctatctcacataatgtcttggatgttgtgtagaaactatgtctcatacaaaacatggtttccttctctttcctcatttaatcacttgacacatcattttttatactaggtggcaacttatttaatgctattgacacaatcctagtcattgagttaggaatggtcttagtacctattaattaataagaagatgatatggtttaaattagatgtggcattcaaatcgactataaaacttcccctgagtagatagatagatgagacttgtaaagtgagatttataaaagcccacaccactacaaagctttcttccttcctttttaaacccaacctcccaacacctttcctcactctcctccctccctccctccctctccaacacgctcacccatgcaacccaacgcccgccaaatgcgcggcggcggcggcggcggcggcggcgggcaggacgacttcttcgaccagatgctgtccacgctgccggcggtgtggtccgagctcggctccggcaagcccgcctgggacctcacggccggcgccgtaggaggaggaggaggagcctccgatgaccactccgccgcggcgttcgacgactccgcgctcctcgcctcccgcctccgccagcaccagatcgacggtggaggcgacaagcccatcatgctccaactcagcgacctccaccgtcatcacggcctcgccgccggcgatgacagcggcggcgctgccgggttccttcccctgtcgctgttcgctgaccggtcgcaggacgacatcgacgccgccttcaagtcccccaatggcgctgtacgattctatatttctatcgcttgctatatagctcaacgattacaacttgaagggtgaattgaagcttcggtttacttgagctatatatggtgtttctttgggttctcttcttcgcagagaggtgaccatgcgctgtacaatgggttcggggccgccggaatgcatggcgccgccgccatgcagccgccgccgttcgggcaggtacgcggccaagaagcggttcaacttctccccccaattcattctgcttctttaccaaggttggaaacaactcaggaatctggattgtttccttgatttttgctcaacggagtttggtttgctccctgttcgatcaattgctccactcgtaagaatgcacctcttgttttcctcatgtcaaagggaggatcaatgccggcgcagagcttcggtggcggagcggccgcgagcggcggcggcggcggcgggtcggcgtcggcggcagcggcggctggggcatcgtcgggcggaggggcggcggcgccgccgcggcagcggcagcgggcgaggagagggcaagccactgacccacacagcatcgccgaacgtgtataccactctcccaccacctttcccttctcgcccccattttttattgcctccatgccatgttgtgtgagtgtgttcttcttgctcctggagctccacaaattttggaccaacctaacaagtcaatttgacctgttgcacacttcaaatttcggctagaaatggtggtttcggtagtaagaagagcttgaaatgagatggaacttgttgtgttcttgtgatttcctgagactttgcatgtgtttgatttgcagctccggagggagaggatagctgagaggatgaaggcgttgcaggagctggtcccaaatgccaacaaggtagctgaaaattttcctcacttttgctcctcttcttttgctttgttttacttctttgcgccatctttgaacaaagtaggaagctttccttgaaatgcgatgaagatgcacccatgctttctgcttttttttttgtgtgtgtaaatatcttatcttaaaacttagtgaccagctaagtgtgttgatttattgcagtattaacacatatgttctgtttctcttacaattaacatgatgtgatatcttcattcttcactgtatgattggaaaatagtaagtgcatcatagggtaggaaagaggggacatgaggcatatgatgcattgctgatttgatgttctgatgcttacactgacacatgttggcctttcattggagtatttgggttggtgattagctgctaacggtggtgaatgacacgtgtcgggctttcgttggatgatttgggttggtgattagatgctaattgatggtgaaggcagtagtggggaaagggaggtcagacatgatgccgaaatgaatgagaaatgtttctacccgttaggccaccaacagtaacagatgaatagccacagctcaaatttaggggaatgcagattaaactatggacttgatcattgcattagccaccaggttcctagagaactgaacatcaagaaaggaatggattagtactaggtgttatataatatatgcacatgtcttaacttcgagacatgcatttatacttggactatgtgacggctgcaaaacacaagaacaggagacacgggcacttgtctaatgttccagcctcgtctgttctccatgaactggatagagagcactacaagtcccacagctacatgccatggttggcacttctggagcttccagcgtcacgtctgatatcttgttttgcacaaactgtaatctgttttgtagtatctgaagcgataatgggtgctgatctgatgggatttggaataaaaactgacatccatcttcatatcttagctgatagggttgctccagcacaaagtagagtgacacggatcactgtcactgaaatgacgatgtggaatttcgttttgcagaccgacaaggcatcgatgctcgacgagatcattgattatgtgaagttcctccagctccaagtcaaggtaatctaaccctgcttttctacagatagatgaattcctgcctgttgctaataagttagtcccttgaatgtctcaaatcgcgcaggttctcagcatgagcagattggggggagcttctgcagtcgcgcctctagtggctaacatgtcatcagaggtacttatattatatgatgctttattttgaaaatctagagcactaccaatgacgcaatcaatggttaatggtactaggcgaggacttgctgatatgtgtaggacaaacatgtttagcccaaaatgctataatgatgtttattacagcacaaagtgactagggaaagtgttatcttttttaccatcaggttggtgataataggtagtcattatctgtcctctttaaagttagtgtattgattctgatgcatttaactttctttatttttataaacgagcaaatggttatctcttgtctaaagtagatctgtcaagaagttcatataatggaatataagcatgttaaatcttatcagtgattctaactttggcatttggaggactagaagtcagacgagttactaaaaacaaatgcatgcttgcaaaatagcataaatcaaaaggagatgtgccataaatttgcttaagaaactgatcaaaccttagtgggtaccaacgcaacaaaaagataaggtcggaaggaatcttggtagttcaagaattggatccaaaaaggacaaacacgcctgaaaagtgacaaggtagtactactgaaaaaaaaaatcaagcataatagtattagcctgtagaagctactaacccactaaggacaattcaaaccccttaagtctgaacacacactagcagccgagctaccataaggtcaactacctcaaatgtgacaaaaacgcccatcaattccacatcacctctctgttgaagaaatggcacagagattttacaatctcgagtcatttgctcaaattttaggtgtgtttttttgcagagtaatgggaatggcaatgccaccagcagcagcgggaacggcgaggcggccaatggcagcagcaacggcgacaacaatggtggcggcacactgcgggtgacggagcagcaggtggcgaagctgatggaggaggacatgggctccgccatgcagtacctgcaggggaaggggctatgcctgatgccgatctctctcgcaacggccatctcctccgccacctcctcgtcgctcctcccccgcactgggggaggcgctggagggtccctacatgaaggtggtaatggtacatcaccaccattggtgaatggcaccgccaccggatgtgacgacgccggaggtaaacagtgaggttggacagtgtccatgggaaagttgagtgatcaggatatgtcttctaattctaggggtggaattgtgaaatggcgatgctcttttctttgcctctctctctctctcttttgttttgtttataagaaaaatgatgttaagcatgcgagctttagttccagcttttcttgttgatatggtatagtagcttttctgatatctttcctcctctccttttgagcaattgagctttgagctgctctctaatataatctctagcagtattcttttctgttaaatttgtcgtggagctgtcgtttctcctgctgaatgaagactgtagaggtaaggaggaatcgaaattattggtccagaagggaccctgatcatattctgattcaaaaaaaatatcagagtacttcgtagcctggaacaggcatcaagtgcaaaggtttgtcgttggagttgaagtttgtgcgtgaatcagggataggatatgctctgctctctaacagcagcttaagctgtaaagtctccttcacgctgatgcaatccaggcgctttccggaccatcagacatatagaagattagatgcagaaacaacaggctgtacctgttcctgaaaattacctacagaatgtgtataagaaattatatatctaacacttgagctggaacagttaggtttccccttacgacgaagcaccaatgattgcgatgcaggaggcaacaaagttgaatgatatgaagagggcaaggtgatatgttcatacatgctagctatgctactactccaaactgcaatattccttcgttgctttcaactcgcacgtcgcgatgggctggcttcaagtaaacaaatccagaaggaatgatatgatgaatagattcaaggattcggacgggagatgcacccacgttggtgaagtaaatgaagggcatctttggtcgtgctctaaacaaaaatatcgcagtgacaactctgatggatgagttaatacaatgaaaaatagtctagaattgctctagagaaaaccaaaatacaagactggacacaagatgatgaaaaaattttaatgcgagacagatgaagccgcacaactgttgcaaaaaggaaaatgaaccgaaacaaaggccaagggattctcaaccttctgcctgaaatttggaatctcaaaggcactagaaaatggagtaacaaaccgcattactaacagagactgtaatagtaatagatatttcaagtgtaaagcctaacaaaaaggttaacagcgacgatacattgatgtgaacgtacccaactttactttggggtagattccttcctagccatgaaaagcagtggatgtattataactacagaaggaaagaagaattccttccctggtgtaaaagcagaagagaactactgtaccgtgcaccaaaaataagcagcaggttgcagggatggggaaagctgcttggggattgcacggcaaatggattacatgacacatcaaaccatccctcttgttttggacatccatgattaaatgctgagcctgttgcagaattatcataggcgagaatcacctaaaggagacagcattggaatcactggaaaggcagcattataaatcaaacaagggataaatcatgatcaagtgggtgtttcgccctccatactttaaacgataaatggatagacccaacccgctttgaaccacatggtttaatgttcatcacttatcatgttcaaatctagcatatctccatattataagaactcaatgagctctggtgatatgtcatgtttaactccaaactctactctagcccatttttactggtactcaatgaacaccagagtcctgacagttttaccccttcctttctaactgatgttggatgatgttatcaaattaatagggctggtggatgaagctatagcagacaaaacagtaaataaaaagaagaaacttcatgccatctgagaaagtagaactcaccaaatctatgtagcagatgcagatacatcatacaaagaataaattagaacttcaactaatctatactgcttcacgtattgatggttctctttcttttagaagcattaggcgctttatctcccgacttagatttctttgttgcttctgattcaagagactcttccaatttctttagagctttgatcacccagtcagaaaaaaaaagattaaatttaacacaaatcatatgagtaataatgcattagtgcatcttaaacaaaacagactgcaaccttaccagaggaaaaaactgggcgaagggtttctaccgattcctctggtagtgaatgaagactgcagctagaattatctgccttcttgagcattttgtcaaaagccttaacctgcaaagacagcccaaataaaaagaaaagagttagaatgagattttagacttatggcacctgctctcagtattcaattaggcattcttttagtgaaataaagtagaaaggttacacagaccatagttatccacacatctggacatatgttgcaataaaaaataagcatcaggtgttttatgcattggtaagtcctaaaccaaaacagaaagtcccagtgctaggtaatcggtggtgccccttctgttttctacaccatatcaattagcgtcaatctaacatataccaagtcaataaatactcaacttcttttctatgtttttaaacatcacaaatacaggcatgcgattaatctttcatgtgcaagcttcctacacatatagtcatatcatgtaattaccatgtcatattaataaaatcaactcactgtatattattgtactagaagaacggaaaactacttataattgttcagcaatgtattacctcatgtttccttaaaaatgtgaagcaagaaccagactctcccgcccgagcagtacgacctgctcggtggatgtatgtttttacatacggtggcatgtcataattgataacatatcttaagccatcaatatgaattcctcgagccattctatctgtaccaatcagaacatctatcttcccttccttgaaggcatccagtgtcttcctgcaaaaaatatgtgttgctaatcccgtaacttatcatggtgtgaataagttcaacataccaaaaattacatcctatcatcaacagaagttacataggtcttgcagttcaaacttcaaatccacatgatccagaaaatattatgatccatagaacttgaacaaggaatggtcagctagatatgatatttgcatactatttttatgttgtctatttgctaacagctccatgaaactgaacttacctccgagtcgattcacgttgcaaacgtgaatattcactaaatttgaagggcaagtcttcgaaaaattccagcaaggtgctcagtctgtgactggattccacagatgaagtaaaaactaaacatttttccccacgcagctcttggagaagaacaatcagagatagtggttttaaatttgatttacagacctgcaggtgcaacgcatcatcaagatgaacaagaaaatacagaatttccaaatagacttttacacattggatgcaccagcactaaagatgtaacggctaaaaatgtgctacatagagatgaggacaaaccagcttgtaggactgaagctttgttggaattctgtagcgcttctttccactattcaacagcaagggatgttgcaactcaagttgagaaagcttgctaggatcttgagtcagtgtggcagacaaaactatcttcgccaatcttggaaaggatttacctttaaaaccacgctcaacacccctatatgccatagcatagattaatcaagttttgaattgaagtacagatcaacaaacaatcctcagagctacaatagcaggaagggctgaatcataacgcataagtattacaagtaatatgtgaactttactaaaaggggagtgtaaaatactaaaatatgacaatgtaattaggtagtgtgggactaacgatcgtctaatggtagtcaatggatgcagtagagtttctccgttcatgtctgaccaggaatggttttgatcactcgagcgagtaagctggataactgttggcaaccaagactgataagcttctctcaacatcctgtccgtctcatcaacaacctgaaatgtcaatatattaagtagaaattaaaggcactaaaaagatggaaaagaagactcttagtgctaaaatcaaagtgcatatccaagcataaactgctggtctggtcaatccaataattatgtgaaaccaacataaggtaaaatatattaataaactattttccttattccaagctgtcctggaataatcatgttcttgctattgctgattgaacaaaagaacaaacaagtaatcttaggaaaagtaagcaagcggggaagattaagggggtggaatataactcaagaggacacatagattgttcccatcaacctaccaggtattgaagatgctccaggctgaaaccttttgtcatgctgatatgatccatcagtcttccaggagttgccaccaatatatcaactttagtctgtggttccatttggatatattcttcatcaagacttgggaaaagcccttgtttagacttctcaataagatttgaaacttcatccgctattgatgattgaccaactgctgagcctactgacaagcccacaacaggagcaatagcatcaaaaacctctttaacctgaaattgaacaaagaattcatggaacatcagtattgttcaacataacctgaagaacatgaaatagacttgttgactagctgttctggttagactagcatgtagaaggtaaaaggaacagcacaaacctgcaatgctaaatcccttgtaggtagcacaaccaaagcacgcaagcaccttacttttcgagtagcgagcatttgaacgataggcaaagcataagcaagagtcttgccagatccagttggggagttaatacagatatccctctcaaaagcaccaggaccaatagtttccagccatgctgctacttgaactggaaaaaatgattctatccccattctctgcaatggcttcaccaacctaaagcagtaaaacatagccaacacaggagtaaacatgttagtatttcttaacagcatgaagtattaaaagcatcctttctaagtacctcaacaaaattaactgcactgaaaacgcattcaagaatagcgagggaataaaggagattcgcaagcaaaacaactgaaattacaaactctcttagaaccaaacaagatgggtcatgggtgcatatgtgtgttttagagctaaccgaacttgtacaaattccaactctgaatactcggacaccagctgaacactattagcttagtgaaattacacaacgccattgatgtccagttggagtaacatcttatggtcacacacaaatcgcctaatcccagaattacaaatcaaccgtgaccaaaaaaaaaaaaaggaaaaacctacttgatagttcataccccacgaggatgcaaactaattagcatcctcaccgcatagttatcgacagctaagttcattccatgcataaaactttcacagtgccacgacgcctaggagctcgcgtccaagctagcgaatcgcttattcaagtgatcgaaagtatacaaaaagaggggggtgtggaggggggggggagctcacctgggatcgagacggggaaggtgcgcgacggggcagccggagaaggagtcgatgtcgacggggttccgcatccacggaaggtgaggcacgcggctcgacggcccaccctcctcctccttcgtcgccatggccaccaccatcacacgccgaggacgacgattcaaccgccaaccagggtcgtcgccgtcgccggcgccggtgagtagaactcgcaccgagaggcgacaggcgaggaggtgagtaagcggcggcggcgaattagggcgtggagtagtgtgatgaattcgcggaggccgccgcagcgcggggaagacaacgggccatcttctcgtgggccgcaagcaaaccaagcaggccacgttttcgtgggcctcaggcaaagtagacaggccgagaataaataggccgcgtctgcccgtgcggtggcccattccatttcccccggggtccacccgcacccttcccttccaccgcaagctttcccgttgcggtgcggatcccccacctcttctccgccgcctcgctctccgggatggacccctccgccgccgccgccgccgccgacgacgacgacgactaccacgccaccacgggtgggatggagccgcgtggagaggaggacaacggcgccagtacaaggggcgtcaccggtcggctactcgcttggcgcggggaagaggaagacgacgatgacgcggaggattcgggaggagggagcggagcaggcgccaacgccgacgaagacgacgcggcctccgctgtttcccttgacaccatcagcaacgactcgatcctgcttccgccggagccgacgagcgccaacctggcgagcctcctccgcgcgaggaagctgatcctcgtcgtggacttggaccacacgctcatcaactccaccagattcgcccacctctccgacgacgagaaagccaacgggttcacggagcgcaccggagatgatcggagcaggggcctgttccgaatggggctcttccggatgatcaccaagctcaggccgttcgtccatgaattcctgcgagaagcgagcgccatgttcgagatgcacgtgtacaccctcgggaacaggaactacgccacggcggtcgccaagctgctcgaccccgacggcgcctacttcggcgaacggatcatatcgagcggcgagtcgtcgcagccggacaggaagagcctcggcgacgtcttcgggtgggcgccggagatggagcgagccgcggtggtcatcctcgacgacacggcggaggtctggaaggggtacagggacaacctgatcgagatggagaggtacctctacttcgcgtcgagccgcggcaagttcgggatcgcggtgaggtccctggcggagcggaaccgggacgagagcgagcgcgagggcgcgctcgccgtggcgctgcgcgtcctgcggcgagtccatggggaattcttctccggctcggtgtgcagcggcagcttcgcggacgtcagggaggtgatcaggcaggcgcggcgcgaggtgctgcgcgggtgcacggtggcgttcaccggggtcatcccaagcggcgacggcggccgcgccagcgaccaccccgtgtggaggagagccgagcagctcggcgccacctgcgccgacgacgtcggcgagggggtcacccacttcgtcgccgggaaaccggtcacccgcaaggcgctgtgggcgcagacccacggcaagtttctcgttgacacggagtggatcaacgccgcgcatttccggtggagcaagccggaggagagaatgtaccccgtgaaaggcgagcattgaggacattggaatggcggcggcggcgacgggcggcggtgcactggaatggcgttcatgatgccgtcgagatcgatatgcttcggatcgaagttgaggctgccaatcttggtctggcaatggtcgtgcagcgatgttgattttgattcgttgggtgcactgtattctgtaggaaatcgatctggaaatgaaccaatacagtactactgaccaaagatgatagcgaacgaggtaaaggttagaactctagatcagcgtaaaccatctcttgtattcttcgatatacgcagattctgatcatatatagcgacgccatatgtttctttgcccgcatttttcggttgggcgtcgatcgactcgatcgccgatctctttttagcagaaagtcttgcgttctctctcttcaatgcaaccatctttgtcttgggaagtgtctggttatcgtgcgcttaccgtggagtacagaaaggattaccggtttgctaaatgtgttcgaatttaaattttgggaaaaaaaacaaaaatcttttaaaagttgctagaagtagtgcaacacctaagagcacacatccaagccattgaatcggttgttcaagtgaagtgatcaggatcgaagggaaaggaaaaagtacaccgaaggtccctcaacttgtcatcgagttacagaatcgtccctcaaccgcaaaaccagatatatgacatccctcaacttacaaaaccggtcacaataggtcattcggtggttttcacaccagtttaatcctatgtggcggctgagtcagcgtgggacccatatgccaatatgccatgtctctctccgttccttctctctctcacccttctcttctcttcttcggcaagc

SEQ ID NO: 9577 - DNA, 5828 bp, Oryza sativa
gcaccgtacgcactccactccctgtacgcctcccacacgtctctgaggaagaagtgcggggcctcctcccgctcggcatccacgccgcagccccgccaccccctcgcggctctctgcatctgcatcccaaatccaccgccgattcagaaatggtcgcactgccgcaagtaattactacgatctaaccctaccacgcgaggaagtcaaagggcagggcgaaccttggaggggaactgagcaggcacgaacggcgtcacggcggccacgaaccgctcaaggttgcccgcgacgccggggggcgggaccggcgccctcgccggcgacggggacggctcctcggccgccttctcctggtggacggcgggggcccacctcgccttggggagcccgtggtggtggtaccctcgccggaccctggatgcgtcgtagaagcggtggtcgccgccgtgcctccggccgagctccacggcggtgcccatcatcccacgcgcggcacggcacggcacgacgcgacgcgaccaagcacaccccgctcaccctccctggacgcgctaatccggcgaggaaggcaacgaatagacgaaaccctaaccctaagatttggggaaacctgctcgattggaggaggcgccaagccaagccccaagccaaaggggggaagaggagaggaggaaatggaaaagaaagggagaggaagcaacccggcgccgaggggtaggtgcatttataggaagaggaggaggaggaagacggggaagcgcggggggcagaagcgggatttcgcccgcgcgagcctggtatgccacggctcgacgctggcgggtgggccccgccctccccccgcgggcgtggggcccacctgtcagcgcgtgaggcgggacgggagggagaagggggaggagaggaaggtacacggttgcgggatcctccgctcgtgattggtcggcggctcgcctctccggatcgaccccggattacgcacgcacgcacccaatccgcacgctggactgggctctagtgctctacacgcgctcgcgccgcattactgacatgtgggaccaggcgaccgcggggcccacgttacagtgggtgcgtatgttctggggggggagcgtggcgggctgaccccgatcgggcgcactggacgggacgccgcgtgtgcgggcggcggaacacgtggacggcgggggaaaggggggagcgtgtgggccctgtcctgtcggggtcgagctcgagagcctcgggatcgggcaggtggatcgcgtcgtggcgcgacgaggggagatagatcaatcgcgtcggatgatgtttttccctggcgcgcacgcttctcgggacaggtcgctgacaggtgggacatattggacgtagtaggctggtcggtactatgtcagtgggaggcgtggttttggagtttgggcatgctgtgttgtcaaacaacgtgtccgtggacggttggtatttctattgcgggaaggtacggctaaaacgtttaaaccacgtgatttaaccacgaggttatggtgctaacagaaccgtccccttgcacacgcagttaaaaagcatttccccgtcgtgccaataggcaaacgctccccatcttcgacccagtggagtagaatttactaagagcaagaataatacagtagagtccacttcctactattattccatcttaaagccaacatatataatgtattaactataaggttggctacaactttcttcttctctctatctctcacctatacatttaatatatttacttaggagcttgtgttaaactagctcttgcatgaaagccaacatccttgattttttattatctgtcacctctacctaagcttatagtagatttatagctcactattatacttcctctaagggcaattgcaaagactgacactaaaaaattataaaaatgcaactataactgttattcaattagcaactttacaagattaaaaaaaacggtggcaaatttacaaatgccctaatttataaaccattgccaaaatttaaattttatagcttaattttatagcagcacaccaataaaaataatattgtgagatggatatgataacagtatctaagatgtatgatcttggtgttattaatacagtgttgatccttagttgcaaacacgatggcggtaaaactctaaccatgctagcattaaattggactcatagtcacaggcaccactaaagggttatttggttgtttgatttggttgtttgaaccactctggcacgctattaggtataaagagggtagtttggttgctacttgggctacgttctttgcaaacttttggaggaaaaattttaaaaaccgaaacgataaagctcagtagcacacgattaattaaatgttaactattataactgaaaggaccttgatgtcgcctagaggggggtgaataggtgatttttaaaataaatgcggaagctaaaacaaaacagggtcggattgtctgatatcaggtcggatagttctatgtgatcggatagtctgaactgagatcagactatctgacctgcacaacaacaatacaaacaagataacaccctaagagatctaaattcaatccacaagcaaagaggtgagctcaaccaacaacaatattagcatggcacaaagcaatgcaacaagaaggtaaagagagtgaggatatcaccgaggtttatgcgccgatgtatttcccggagttcaaatccttgaggggattctagtctccgttgaggggctcgcaaagagccaggtctttttcaaccctatcctcgtgatgttgcacaaatgcactcatccttccactaagggtatctctttccttgcggaggcgagatccggccttcacaaacttctcttggccaaccacacgtagatcggtggcccaagaacgacacctagccgtctaggagtcctcaacctccaagagtaataaacactgttggaaatatagtcatgaatcggcatattttaatccaaaatgttaaagcaataatcatggcataagcggtgtagggtgatcttaacataaccagtagcataccatgcgcatcatgaatgtcaggaacaggaacattacagtaacgcaataacatgctagaggcatcatgaatgtcaggaacaggaacatagagcacataacagtaaagcgatagcgctaacaaagggaataggagaaggatataccccgagaatggccctccgctggattgtgaggcagaattgcctccgttgatgttgtcgttcgcggcaccggctccagctcctggcgcaccaccttcggctccagctcttggcggcgcaccacctctgccatctcctccagcagcggcggcggcaactccagacacggcgagcagtcgtgcaggaggcactccccaaaaacctgatcacccgcctacccggtgcagatctcaggcgaagatgtggtttcggaggcattgctccttccaatctctcgtgcgcgcaagagatcagaagcgaggaagcgataacagcactggcgcggaggaggaggaactaacatcgggaaagaagcaagcatccggaatagatcggactcgcggcctccttatctctcaggagagagaggcagtcgtgggaacgtggacgcgctgttgcggagagaatcgtgggaacgtggttagtggctgcaaaagaatagcgacgtgacgcacgcacgccgccgccagccagaccacgcctcgcccacgcccacgcccacggcctcggcccggcgcgcgcgcgcgcgtgtggcattccgacctccacctcaaccagtcaacagggggcctccaataactccctatttaggttgagatattcctcgcttaaatcctgaggtggtattattatccttaacacttattatgggcctttgagatttaataggataagttgggcctaccccaattattctaacaatccccaccaagtttcaaggctcataagaaatgttctcaatgttgtgcctgtttgatataccagggttttggtggagactgttaagttgaacttccacctaggaaatgagctacatcagaccacaactgaacaatggactatgccttgaattgtcagttttgtgtgatcaggtttcactcagaaccttgactggtactgggctgccgttcgcatcccctctgtttggagcatataagtcaaactccaggcctttcatgagtatctagagatcgcccaaacctcatagactgtgactagcagtcgaactcatataggtgtgttccttctgagatgttctgcaggtcaacatctctgcttggagaagccactcggatcacattaaggcatgagccatcctaccatgcaggaaagaagagaagcacatcatggaaatgagcccttttcaagggtctcttctctcagtcacacaatagtttgtttcgccatccaaattcacaggatctccgatcacaatggacaggtttccactattgtgcaaccttaggtgggtatcaagcccatttccctcgatgcactgtctatcacattacgtggtagccccttagtaaactgatctgtcagatttctagccgtttggacatagtccaatgctatcacttcggagtttttctgctttctgacagatttcagtcttctcttgatgtgcctagatgacttcatgttgtcctttgaactgttcactttaataatcactgtttgattatcacagttcattaggatagctggcactggtttttcaaccaccggcaaatccatcaggagttcacgaagccactcggcctcaactgtcgcagtatctagtgctgtaagttctgctttcattgctgacctcgttaagatggtctgcttgcaagacttgcaggaaacagcgccccctccaagtgtgaacacatatccacttgtggcttttatctcatcagcatcagatatccagtttgagtcactatacccttctagtacttttggatacccggtatagtgaattccatagctcatagtgccctttatatagcgcattactctttccagagcctgccaatgatcatctcccggatttaagacaaaccggctcagcttgcttacagcaaatgagatgtcaggcctcattgcactagccaagtacatcaatgaaccaatgatttgagagtatctcagttgatcccttgctatttttcggtttttccttaatagcacgctgggatcataaggagtaggagctggcttgcggtcactatatccaaaccaactcaaaaccttgtccacatagtgggattgcacaagtgtaatcccaccctcatctcctctttgtagtttgatgttaagaataacatcagcctctcccaaatccttcatttcaaaactcttggacagatagtccttgacctcctcaatcacattaaggctggtcccaaagatcaatatgtcatcgacatataggcacaagatcacttcttctcccccaccatagcgatagtacacacatttgtcagcttcgttcacaacaaagcctgcagatgtaagcgtggtgtcaaacttctcatgccattgcttaggtgcttgcttgaggccatacaaggatttcaacaatttacacaccattccctcctgaccttttagtatatacccatctggttgatccatatagatctcctcctccagctctccgtttaggaaagttgtcttaacgtccatctgatggacgagaagaccatgagaggctgccagagcaagtagtactcgaatcgtggtcaagcgagcaactggtgagtatgtgtcgaagaagtcctcgccttccttttgggtataacccttggccacaaaccttgcct

SEQ ID NO: 9578 - DNA, 4985 bp, Oryza sativa
cctatactacttacacgagattggaggcactaggcctcagtacatggcacgcgtgtataccttattaccgccgggaccaactgaaagaagtcagtcccggataaagaggggaaaaaaaacccgggcgagggacgagcgtcgagtctagggggtcgaaccagactcgtaggctggtcggcacggagcgagccactggctcctgccacccgcgcgtagcggtcctcgaatcaatcaatttcctcccacgggaactccatggtgatggtgggctgggccagtccgggccgtgttaccatctgcaacttcgtgccggccgggcccagtacgggaatcccatcccaacctccggcaggagcccaggacggcacggcgcaagtatccttgttcctccggctctgctcctcctcctcctccttccaacaagagttgattctacagtacagatccctccctcctccaagctttcccatggcgctgcagtacgtggaggcacagcgccaggcgcgccccgacctcgccgacgcctacgccgacctcgccgacctctaccagcgcaagctctggcaccagctcaccctcaagctcgaccacttcctccaactccccgccgcccaggtctgcacttttccccttcctcttagatgcgcctcttctaggttagccactgccccccatacggatctcgccgcaaaccctacccgccgcgtttgtaggtgctcgatctcagccctagttgagttggccctgccctgataccgatccggccgccgcaagaagccaccactttgtgtagacttagctgaatgtttcaatcttggattacttcaacaaccatatgcttagggttttaactgatgggcaatcctgcaattctaacggcattcattctcccacagactggcgacaccatcatacagctctacaacaatttcatctctgacttcgagacgaagatcaatcttctcaaacttgcccacttcgcggtcatcgcttcacgccagtaccctgacaaggatgccgcgattagtttcctcgagggggtaaccgcaaaactgcgcgagacgagggaacggcgcatcgatgaacccgttctctatgtcaagatgcagatagctgcaattaaccttgagaagggagatcaaaaggagtgcaagaagcttttggatgaagggaaatccacccttgatagcatgactgatgttgatcccacagtccatgctagcttttattggatatcatctcagtaccataaggcttgccaagaattcgctgaattctataagaatgctcttctttatctggcctacactactgtggagtcgctctctgagtcattcaagctggtattaacaatgccaattacataacagaaaaaaaatagcatttcctcctctcattagttagtttaataacaacatactgtgcatattgtttgtattgataatttaccctttgacactgtcatgtgtcaggatttggcatttgatctctcccttgcagccttgcttggtgataacatatacaactttggggaattattagctcacccgattgtaagttgggcttttcttgggcatgatttctttgttcccactgcctacctttcatttagtcatatcatttgtgctagttgattacttgattatggcattaactccacttgcctctataaacgttacatgcggcttgttgtcatcctcaggaataatcagtttacaaattatgctttgtaatgtgaactgcagggctcccaaagaagttgcatgtgtgttatagtagttaggcttcgtggttttgtagttctgtacgcagattaacaacatttattgctaaattggcaacagtaatttcatgagttgaatgtatggagttaagattgacatgatttttgctatgtagcgaatataaaatacaatgaaaaatcatgtgataacttgtgattgttttttggctgaaatttcaataatgtaaatgtaaaccactgaattgttattacggaagctttgtactttctttgaatggaaacagcgtaaacttaattttgcataaattaacggcaaaccatctttagttgaaaattaacttaggtgtactaattttttgttgggaaaattgatattgacctgtggaagccttcagcccccaaacagaattattccacaaatgcgtacaaggtgtttttttaatgcttgaatggcccctaaatctatgtcagcatatagttgtcaatttgatacatctctgttctgaaactgctattttttaatccttagatcaacagtctaattggaaccaaggtggagtgggtctatcatatgttgcaagcattcaacactggcaacctagctctctaccaagaactttgcaaggtccacaacgctgctcttagtgcacagccagctttggtgcagaatgaacgaaaactgctagagaagatcaacattctatgtctgatggagataatctttacgtatgactttgctacttgcttttatatgacaagaacaaatgccctattccatcgttttctttcttctaaaccttgtgttctttttcatattgtagccggccatcagaagacagaactatcccattaagtgttatagctgagcgcactaagctttctatcagtgatgtggaatatcttcttatgaagagcctctcggtaactgcatttcctactttctatcttccataagatattatttgcattttcatggaaattcattgttgttatgcataaattgattttaagcttgggagttgctgccggtttatgttgcagctggatctggaatagtgattgttgataacttgtgatgcatatcactgctgtcaattccttgactttcttaacttgtaatttacttggtgattctttatggtttgttttgtgaacctttagtggtgagtaatgacctacgagtgtgttggcagttcaactagtcctgtgattcatgtcttttcgtttggatgatcacagccctgtttcttttcttgttgcatgtcacttccttttgccttaatactatttcagtgtttgcacaatgcatcagccagtattcctagtgctaatgcatcagcttcattaccgttctttccagttccacctttttcagacttccattacagtttctttctaaatcattagtacatgattctcaccctgaaaagcaggctatctagtacttcctctgtttcacaatgtaagactttctagcattgcctatattcatatagatattaatgaatctaaacatatatatgtgtctagattcattagcatctatatgaatgtgggcaatgctagaaagtcttacattgtgaaacggagggagtagtcaaatattgaaattattttagtcgctagtgtatcagctgccatgcattttctccactgcaggttcatcttatagaagggataattgatgaggtggacagcacagttcacgtgtcatgggtccagcctagagtacttggaattccacaggtgaaggccttgcgtgagcggctggacgcatgggtcggaaaagttcacactacactgttgtcagttgaggcagagacccctgatcttgtggctgcataacttatcgaccacttgtcctttcgctatacgagcttggtcaacaaggctgcggtgcttaatgagaggtgatctggctgtggtgcttatagttttctggagaatgagaacatgttgccttggatatttccctgcgtcctgttgatcaggatctgtaatttcaccctttcttttatcctttgggcattgagtcctggagctatcacggaaaagatacaaacgggccaaaagtttcataccggcaagatgttatcgtagttcttttagtcaaatttagattgtaatgcagaggatattttccccttttatttttacatggatgcaggaaactctagctgattcccgttgtgttaagaggctggtgcagtagtgcatgacgtttggactggcaaacagggagcgcttattcgttgtgcgttttggtgaggtgctgcatagtgcttacaatacttttttttcgaataattataatttaatgaaattttgcaaaaaaaaaaaagaaaaaggaccaagttctaaaaaatcagtaacctatcggcaattgggtgccgacaaggaaaaagatcccatggggcatcgctaggctaagtgtacaatctatgaaaatagagctataggaatgcatgcacatttcaatccatagaaatttttcaaaaggtttgagtggatgaaatttttcaatatgaaatagagggagtagattttgcaccctacacgcactcgcattctgaactttcacttttttagtctagccaacaactctatcgacaaccgttagacgagcttttgacatcacacatccagctaatcgtatggtgaccgtctgatgtaacatgttcgaactttgattattcgatatggtgttacacttgtgatttccagccaaccgacttctatttttgggaatttgctaaaaaactatcgcaagtttttctttaaaagaagactttcaaatataattatagtatattttagactgtcgacctatatttttggcaaattttaaataaattgccgtaagtttttttagataaaaagctaagggcctgttcagattgtagccaaaataaatcttaccaaaattttggcaaattgacaatattgctaaaattttgacaggatttcctatgtatttatcaaatttagcaacaaactaaacgtaaaaattttttgacaacttaaaaaaataatgatatgattgaaaatagcattaatctgaacagcccctaaacaccaaggcactctctaggcaagcatcccaccttcgtcgacccactgctgccggcctcgcgagttcacccaccaccggagccgatctccatctcgcgagcagcaatgcgggcgccacaccccccccccccccttgctatttctcgtcgtttgctggtgagtatccgtc

SEQ ID NO: 9579 - DNA, 47485 bp, Oryza sativa
catgctatataaccaatttttcctttaaaatatagctatttctagcatgatgtcttgttctaaaatgaagctatttctccacctaccttctcctcacaaccaattataaccattcttctttaactactttttttttcaactaatcataatcttctttcaatcatttccacatattttcttaatatccgtactaatctcaaaaatactatattttaggacaaacaaagtacgagactttacaagcaccaaggctacatagttacaggtcatgcccagcacgatgatgtgtcgagtccaaaatctggtgatttcatccccaaatttttgtcggaatgctaatcccaaaagaaatagctcatgtcgtcctttgatcaacgtgatggcaatttagcagatgacctcataaataaaaaagggtcgcaactgccatcgttagcatgaacaaaaaaaataccaggattttcttgctacctgcgatcaagtcggtaatatttcttctgattaatgaaagttttgaccttaaaaggcccaaagtagtggctactacaatacgtccataagtaatgggtaatgccaaggagctcgttctgacaatgtaactgctgaaatgggataattagcaccgaaaacaaacaaataatcaacaattgcaataaagaacctactcgagttcccacttccaacaccagtgcgaattaccttagcaatttctcgaccggcaacagaggtaaaagagcaagaggaagacgagatagtggaagaaaagtaagacaggaacatggaatttaaagaaggataatacatgactttctgtgtccaaaacttctaatgctacaaaactcccaagaattggtaaccgttatagctcacaacgcacaaatacaatagggcttctgaaatgtacaacagcggaagatccttgatgaaagattactcaagctttcttgtcagacctattaagattcaaattgaaccacttctttttacttgatttatctttaccatctatgttaccattctcgggactctcagtggggtatctactactgctgctaccagctccaacagagttcaccatagttcgttcggtcgtgaaggaggagtggatgtcatccctttctctcagcatatcatcaacctgcagaccttacaactctttagcaataatccaatattattagcaaaagtaatgaagaatcatcagggttcagcctgagaaaagaatatgatacaaactttatcatattggtagatataactatttgatgaatttttgtgaaggataaattgatgccatttggtttcaaatttttacagcgcacggttctgtaagctacactactatgtactcccttcgtcccaaaataagcgcagccatgagtttccgtattcaactttaatcgtctgtcttatttgaaattcttttgaaaaaactaaaaaccagaagtcacacgtgaagtactatgcatattttattataatctaataacaagaaaaatactaatcataaaaaaaattaaataagacggacgatcaaagttagacacaaaaaaatcatggctgcgcttattttgggacggagggagtatacttcaaactattaacagctaggacactatttaattgacgaaagctcagaagaaactgcatgtcaactgacaaaataatttaacaagtcaattcttaataacagtatttctgctgcattcactgacatggctgcaccaaccatgtaaatccactgtgcagacttaattatacgcaacttcagtttgagtgggtaccaatattcatataaccaaacatcagtgttggcaatcaagtactagctgcaaatatgcaactcacttagaatttgaacacagcatggagccgagcacttatggcctcatcttttcgcttatgcttatgcttatcatccaaatttgaattttcaaccttaaatttggagttgattttgggatttttttcatcgtagtttatttttcagcctttgcttttagatcgttaagaacacgtatataaaagttttatttacaaatatgccatttcgcttatgcttataaacagccaactgatggggccgttaaaaggttctaacaatgcaatgagaaaagcataccatggattcacacaattcagagtcaacgttcagactgcaagactgatagaagaagagatatatgctaataagaaagataacacacgactgttaacctaggctacaagttataacacatttcttgcaagttataacacagtgattgcttttcaaagtgccctccaaaggaatgtttgaaatcatattctagtttgacttattttctatgaaagaaaagtttgccggtgcaagatagacatcaagaaaatgtggacatgtaagaatttagagacattgtttgagagctagcctgacaccctctgtctagaagaacagagaggcatctacatagtcaatatgctgctgtgccagttcaaacaggcacaagctcactacaaaaaaacggtaggtgtgatatgtctaaaaaacatcactatgtagtctgcttcacccttacatagttatgttagactctacaattagagggcaaaaatacgatgactatttcttttgtctctacaatatccacaatgaagtatcaattgtgaaagaaggaaaaggcattcagaggagaaaagatgtgctcaccgcttctttttcttgggtgtatctgttggtcacttcttgaaaccgcgctaaagcctgcacaccatttaactcgatcaaagctctctccaaattgaaaagaaaactaaatacatatttcatgtgttatgtagaaaaagatgtagtggctgacttttctgtactcagtttcaaattggcgcaaatcatttctcttctctagaattttagactctatttcctttagcctctgtgttgtgtcttcgtaactctttgcacacattgcttcaattgtatagctagctggcttgaaaaaattatcacctgaacatattaattaggatggatcagaacggaggtatgtcattcatataaacagataaagtaagtttgcagaccgtatacagcaaatatatgagttccagatttgagagccgacacttcgcacggctggagaccttccaaccttttaaagaatgcagcctcaggatccttggccattgccaactgtagtaggaagcagcaaagtctcacatcacatcaggcccaaagagcataaaaactaaagctatatagcagaacatacataccgcattcactgttgaatccatacgatacacttgaaaatgcaagaaatacatgcctgcagatgtcaccttaccagtcttctgactatcttcctggaagtgcggaaaaaaactggaggttattatttttcttgaatatgcaagagagctgcgtatcatttaatcatttaaagaagaagaaaaataaagaacaaacagatccaagtatccaaccccttacaacgtttgacacataagagccacataaagaaaatacacaaccaacactagtagcaatgcaaacaacaagctctcaagctcctttgctccaataccacaccaaagggtgccctccatttccaccaaacgcactactaatacaacatccctggctacatcatttcactgcaatatgtccatatctcccaggctattacaataatcaaagagttgagccttttcgtttcagtttgtgaacttgcttgctcggtactactaactcgaaaacctaaccgaatctggttgggtatcatagcatgtagacccgagcacttcaatccatatttgccgggcgaccatgcaagaaaccagcaggtgttggataatctcatcgtcttgatcacaaagacggcaagctgctgggtgtggcaagccacgtttagcaaatctatccgccattcaacaacgattaagcatggcgccatagaaataacttacaatgtaatggtgcccaggtttaccaaatgcattattaagctaggcttctaattttttttatatgcagcacattaacatacccaaaatgaaaaaagaaaaaaactgcagattaatgtaaaatattaagatcatgttcatagctggttaacaaaaaaaaaatcattgttgaccattcatactactccctccagccacaaaaggtgagttgttttttacttttcacactcaaaagacataagtttgatcacttagtttattgcatgaaccaaaataagaacttagacaagtacaatattaatgttcttgttgtcacaaacttggctacataatgtccttatgcctaaaaacttacgttccaaataataattacggtcaaaattaatttgtgttgactgtgtgcatcctaaaacgacactcttttgtgattagaggcaataaagaagtcaatggcagaactagagacacagatgcaaacttggagacagctagaaaaacattggctcttatccatttggcagacagttatgtacagcatgcattggtcacttactgcacaattggtatcaaaattaaaattggagaagtccagaaatatcacattttacataaatgataaatttttatatacttctagtctacgccatggactcttggagagctcccacccctaccactcgcattactcataagtggtagcccacaatagtaaatgggtcaatcttggctgtaataaactgcttcgaccataagcaggtataaacagagtacaaacggtccaaaaccctaactacccactcctcttcctccctcctcaacaaccgcctctcaatcctactccagctgacagcatcccaaccactcccacttcaacaccaatggtgacgatggcagtggcctccaacgctcaacatggcacctcctctcctccaccagatggatccatcaatgagacaatgacacaccattgctcccccagcccagcagtggcaacctcaggagttggaatagatctgacaatagcggaaacctccagcgctctacaggcggccttgtctcctctagccggatatatcgacagcacccctgtcctccagcactcgatgccaccgcatccaaaactccttcaaccagatccatcaatggcatcccacttatccaccagaatggtgatgaaggcagcctactgtgctcgacaagctcaagccaccaccaccaaaccttgtcacactgttggtttcactgccttccttccctgacagagagtccttgcatgctggtccttgcagcctcctctcctatcacctcaacctcccattagagaacacaaggcagttactgccgttgcgtcaccactagggccttctttctttttgttgttggtttgggttgataacacagaatgtaatggatctacatgtacacgcattatttttcttgtggtcgtaaacaagtaccattgactgtaaggtctcatgaacatggatgtaaatagaatttgcttgattataatgaaatactaatgggattgtaatggtagaaccttttagctcaaagtgtaatcaaaatttacccctaaaaagtgccatggagctatattacaattctgatagtatttatggctgcggactacttcatttacaattatgtggtgtcattttatctatgttacgattacagccatggagaaatcatttacaatcgctgtgaatctccttcattcgagggaggtatttgtagttgcaagggaggcatttacatcttgctgtaaaaaataaaaggatcttagccacccatataaaaactcatatagataaacggtttttatatgggtggctaagatgcttgccttttttagggcaagatgcttgattcatttatggaaagataagggtgcattttcttttcattaaggtggccaagatgcttgatttattcatggaggctaagggtgcaacagagaacctcattatccaccaaaatgcaaaatgtcacgttgtttaatatgccgagtgtaaaacgccaggtatttatgaacagagaaagtaatactaatccatggccgcatggcattccattgacaaataatgagaaaaactacagaacacatcaatcatgcaattatataaaggcgaaggctcgaaagtacctgaagagctagtccataacctccattaatttcttgttcaaagaaaagcagctatagagaaatatttggcaaatgagagaattaaataatatcctgaaattcaaagagatgcagaacataaaagcttcaattccagagcaattgaaggaagaatcaacctcataccttaaatttactttgtgcggctgaggtgactctgactacaatgcctgactgagcttgttcttcacttattgttacaccataaaaatgagcactttgcttgtcaacctataaatagaaaaatatatatggtagccgtcccattataaacaagaccataaaactggtattggcagaacctttcccgttgctgatgatccaactgggagaggtctcactgtaactgttccactcatagcttcttcaagaacattaggagatactgtggtcttgattggaacaccgagcttgctaaatggtataatatgtaagaaagttagcaggcaattagtgatcctcgattctttctagaaaacaattcatacagatgctacagtcacctgaaaagtgcagcaaacattgtgttcacagttccaagattagataagtcaatttccatatccattccttcattctccaatgcctaagaaagcatattacaacagatggttagattacaaaccaacaaagttacattatttctgccaactatgtgaaacttggcaaacacatcttaacctacacgcccaaaataattgaagtgcccaaaaaaaatgccactgagttcaaatttgtaaaggataagctgtggcccttggctacttggtacaattatcatcttaagcatattatccatgacaaaggtacttagtcaaatggttttggaattaaaatagttatacatggtggaaatgcttctaatagtttgtcattgtttagaggatacaggttctccattacctcttaagtggtttccagggattgtctatctatgacaataaatatcaagctagatgagtaatctccatttcttctttgacagattccagggattaaatctctctctatgagtctacgacgttatataccaagctgccttagctaatcttcattgcaacagaagaaaggattggagataaataagcatccaaaaatctcatcagttatcacatggtctaataaatacacagcaacagtatgatacatgtcggtgcagcaccaccaaaaatcaccttgctggtcatttatcccagccaaacttctccttattgattgatcagaaaaggagaagaatgcagaaccattggagtaaaagcaaaatacacacaaaaaaaactgttcgaaaatagtctggtagtcagcatgagattatgagaatagcacctcaaaaccagcagtatcatattgcctccgtttctcaggatctgacaagatactatatgaatatgcaacctctttgaagagttctgatgcttctgggttactagcattcttgtcagggtgatacctatcaattatatcaggaactatgagtacagaaaatcatcaagactgcagatgcaggaatgaatagatagagcagccaagcacatcagtacatcacacatgtaaatacatgacagacctaattcagtaatcaacagggtgtaatggggtgacagtatttgagatgacacattaatagagaggactaataacccaaagaagaatcatgtggtcatcaaaaggtagtaaagtatagatatccaaaagaaggaaaaactcattgccatggaatttgctcatatagagcatgctaatccaaccctttatgaccaaacagtttctaatcccacgtaaataatctactattagagtacaagtcactctaatgttctcttttctgttccattgttagtattgcaccaatcaagaaacaaaatgttctatggtaacccagaaacagtacaaaaataaggaaaagacagtaagctcttatgtttgtggtaatagcatctaacaaaaaatgtatctatagaaaagaatgcaagtacaacaaagaaacttttgctctcattcaatgcttcctcccaaatttaatccaaaacaataaatacacttgattcagtttcatctagaatgatgtttgcgacatatcgtttcttcagaaataatgttacatatctactcagcacaataaagtaagagcatcattcttcatgttgcattggaaaaatgcggttgttatgcgttcagtggtccattcaataaacacaattggcacatcattagtcaattacacatgggcataaagttcagcgctgttaaatgcatctggatgagaaaagttcaagtgattctgaggaacaccacagctgatgtggtaaattgctgcagctgatccaaacaattgtgaccatgagcaatgaagccgcagagaacgcattcaactaaactagcagcacgttcacattctgcaatctgaatagcgcgatcgaaagcagcagcaagagcagggcggacaggttagggggagcacgaacttgagcgcgagcttgcggtaggcggacttgatctcctggtcggaggagtcccttggcacggagagcacctcgtacgggtcccgccgcatcgccggcgccgacggcccctccatcttccccgacgacgccatcacgcgacgaaaccctaacaacaacaacaacaacaacaacaaccacacgacaaggtcacctcgccctgcccccccgaattggcaggaaacccgcacgagatcgggccgggagatggggctcacctgaccacggcgcgagcgggagcgcggcgcaggcagatctcgccggccgcctcgcgagagagggaaggcgtgagccggcgaagcggagaagggaggccagggggaaggatgggtttgccttgcctcgaggtcggggagaaggagcacgagccgcaaggggattcagttttttcctcctcctttttttgaatttttattcgtggaattttctctttttttcttcccctcgaccttggattcggtgctcctctagtcctctctgctccaaggaaggggaggccgctgctgctttgaggggcgtgcgcttttcttttcttttatattttttttctttcgatttgattgattaccacgtcgatggattgtttctccgtgctttttgccgttttgggttttccaagtcgagctgcgaaatttcgctatgccgaaatttcgtcacttttgggaacttccgctggcgacagcgtgtcatcaagtggcgtggacggccgcggtatgaaatactcttccactttaaaattaatggtatttttaaatattatgatatttatagcaataatatcataattatataaaagtaaatacaaatatcgatcaataatattatttttttatcaaataaaacttaatttataatctaccctatagttcatcattgatatcctacggaccttattcatcaaatctaacgtccgaaaatcatccaatacatcagatctgacaacagcgcatgcacgcagggtcaccagctgaaaatcacacacgccagcaaatcaatcacggcccattttccttcgcatgccttcctctacaaccctcacccactaatcaccgcgtccctgtactgtctgccaccgaggtcgcccagatcgacgcttgccctagccttcctagatccctcccaccatctacctcctgtgactcccgtctttcgcaccctctcccacctttttttcacacgctcaatgcccgctggcagtcgcccacctcgccgatctcctctgcgtcgccaccaccgaaacgtaggtcatcatagtgctcagcttgatgattgcggcttcaccaataccagtgctatattatatgtattttctttagtattggttatggcacacataggattttgtttccagataaattgatgagtgtgaaattctcctgacttggtaagaaaatctataatttgttggccaagtagttcctgcttaagtacttactaaacaacttttgcaaagacgtccttttttatagcagactgtgagacttgtctattctcgatcaattatatagattcgacagacaaagcaagtaaattcaactaatttcttggtgttggaaaatttgactgttccttgctgcttcatgaaaatgttaaatattttgtctttccattgaaagagaggcaaagagatgatagatttaatcccttctatctgtttttatatgctgcattgcactttgactagtgcttttgcattctcaatttcggttaaagtgttggtatgaaggttaatgaattgtctaattccgaagtcacccaataatttgttccgttttgtgtgaatcttataccaatctcattatatatttaattgtcaaaataactgttaagccgtagcgtaagcatgtgcatgttaccagtaaattattgttggttaaatatttagggagttaaatcttaaaatgtgtgcacgctttattgggatggagagagttctataaagttgctattgttttccatatatataaataaatttcatgaaaccttaagtctcatatatttttatttgtttaaagaaagtattgaggcaaaaagttttgtacaagcttatattatatatttgattattatatttatactagtaaagtgtctcagcgttgcaacggaaaaaactaccacataccatgcatgcacgttgtatagtatttgggggcaacggatcgtaatgttgatgtagtacatcgtgttctctttacccgatcatgaaaattgcagggattcctatttcgcgtgcacactggctacggaagtaacgcgcagccacgcccccctcgacgccctgcgcggttagctctgtaattagtttcattagtgctaattatggtaattagcaatattttccttttttggcagggttttttactagtagattgaaaagaaatctacgttgaagtcaaattttaaaaactttcaatcgaaatttgaatttttttcaagtcaatttttgaaaaatttcaacttttcatctcaaatttgaaaaactttcaattcaaatttgaaactttcaacccatatttgaaaacttttaacctagattttaaaactttcgacccaaatttgaaaactttcaagtcgagatttgaaactttcaattcggattgaaaaatttttaggttaagatataaaaactttcaaatcaagattaaaaaacttctaactcaaaattttgaaaacacatgtgttgaagattgaaaaaagtcaaaaaaaacacgaaaagaaaacgctaaaaataggagaaaattgaaaaaggaaaaaagaaaatcgcaaataaaaaaggaaaagcgccatgtggaggggtgtggaggctaaatggtaaaagaaatctgaccattgcccttggatgtaaatgaaaataaaaaaatataaatgatgaaaataaaaatctttatttggcgatgatttcactagtgaccggtagtaataaggattttactacgttgggcatgttcgaaagctagagcaatgctgcggtcagctttaggatggatgaaacacataaggccatccctaacctaatgactaaaatggtgtcaatagcattaaataagttgtcacctaggatgaaaaatgatgtagcaagtgagtaaatgaggaaagataagaaaaccagatcttgcatgacacatagtttctacacatcatctaagacatcatgtgatataagaaacattaaatttaagtatggaaaagtggtgtttgcattgaaagagtatatctagtactagtttcttgatgatatggagtttatgacaactatgtctagtgtcttgggttgggaatggcctaagagttgcatgggaaatttagccgaaattacttgtagcttcctatctggtgcttgatgagagcagaattaatgtttcctctgaccttgttgaacattttatggaaggtgaaggatccctgagcaagtgcgaggtgagagaccgcataggccctcgaaatttagggccaagtgcaaggtgattgaagggccagtggctgcgatgcagatcaaataaaaagacaatgttagtagagacatatcaacgtttgtgaaaaacatatagccttgctctattcatataatttgtattttttaacacaaggccttattttgaatttggcacggggcccccaaattgctagggacgaccatggaaagttgtacggcatttccctaattcttatacacttgcagttgcaattatcatatcttgtagatttttttcaagtcactcggtgaacttctgttgcgacatcaagtgtatgtggtatcttcctcaaatgaaatattcttgagttctggctttgtagactactctagagaatctgtttctgccgtcaggttagaccaaactgatggcaattgagatgttcaattgatagttcggtttgggcctcttgcaaatcgagaaggaaaaagtctatattatggtattacctccttcgactatggaccgagtcagattttcctctcttaaccaaaaaaacagacacatagtctccctcaatgatgtggccatcaagtatatgcatacaaccaagcatgagaaatataaaacattgccaaagaatacgttggatgaatggaggatctacaagatattaaagtccaatgagttttggaacccaattcggcctccggagacagcactgacttcaaacggacctagcaccttcatgccaactcgaatttggatgatcttggacttcgtggaaagcttatctcgctacctttcaaacgcatccagtctcatgtccaaattcatctcgagtcaacgggaatcgccaaaacaagacagtgttgttgctgaaaccgaacttgggccttgggccttgtaatagactaggcccatctcggaagtgtctccctccacctccacgaattagcacttaaccctagctttattttcctctacaaatagctttgtacatcctaaaaaaataattgggttttgtttagttgaattttgccaagtgccattcaccttgtctctagtcctcgttcgattagtcggcgactattgattcagagcccacaatagttggtgtgttgatttgccgggtcgattagatctaccacttcaatcgcaactattcctttgtgcttaatcacctattcgcaatatttagattgcatcttatcttgttcttgcagtgttctctcgtttgcattgcagggatcatcaaccgcgcgtcacggttggtatgacatcgtttgtggtgtagcgattgcacgacgtcctagacttgttctgttggtagccacgtcgcaaacgtcacactcgatcaaagcgagagttatcccctcaccagaagatcgggccacgagagaaagcgtcatcactcaactatcaaaacggtcagtttacctcatttagtagttagcacaacagtctcgtctaacgtgacgcattgacttggcccacttgtatctacgtgacatcatagtcagtacttcaacttttttaaaatagctgccatatttgtcccccattcctccacctctctcctctattccttttgtaacagccctacattcataaccaggtatttagaagtgcatttgttgtcgtttagatttcatatttactatattgcaatttgatcattggcgataacaaaattaattctaatcggtaaaattgaaaccacttctatttgaacaataacttgaacagaagttacatgtgtaataatttattcaaatactagtttatttatcaccaacaaatataaattttgtggaatttttactctctgtttaggcctcctaagaattcaaaccaactttcagcctaaccaatttcatcttttcaccagaattaaaatatttcgaatttttgagtgaaactttgaaaaatggaacctagaaaccaacacctatcaccacaacaaatcccttaatttttgaactagttttacctagtcaaattgaatttaccaagagagggaaagaaaataaatcctggaaattgcaaaaacgaatatgtactcagtttttcacctacctctctcaccctcattaacagccacgacttgggcccacttgtcactgaccttgggtgcctctttagccccacaacacacccatgggcgtgcttccacctcaggacttaagggggggggcagagataaccccttcttcttcctcccctttcatcttcactgcttgttctttcttttttttcctcaagctgagctctcatctcacttctcctccccaaatcccatccaatagcccaagatcaattcatgcatgttagatcacaacaatccccatcatccaagctttccatccatcccaacatcttgcacatgcatggagagttgagagagattgaaataggagaagagagtggtggtttcagcctgcatggttgcagcagcaacatgactttgtttccctctatttggtgagcttccttgccatccatggtgcctttttttttatttcccttcatgttgaacatctacagcaacattcaacaggtcatccatctccattattgcagctaggaggtggctgcagctcatccggtgttaatctcttttgatttcggttgaagcagccctaggcaacgtctcttaccgtcagcccgaggccttgctccgtctcttgccatcagcccgaggccttagcctcatgaccctacgtccaggttgctaccatgtgagcgaagtctggtggaatttggagaaaagggggagcgaaaatagaaatcgatttctgagatagcttttgagctgaaagaggtttgcgctttaaaaattcataactagttcatatgaactccgaattcagtgaaccaaatttctgtggattaagaaaaacgtgatcttcaatgttgtaaaataaaaatgaccaacatttgtactggttttcccagtaaaaatataaatagctatatgtatcccttgtgtggtctagctcttatgaaattcgtaagaaattattggtaaaagctaaaattatgaaaccaattttgttgagcttatattttagtactctttgctgttgtggtgttgtttttggaaaaactacctcttaaatcatgtttaggagtttatttagcattcctatgtttctaacttgtaagatctataaataaataatgacaacacatatagctgtgaaataatttttcataggagctgtgagtgatgtaatttactctaaaaataatcattattatgaaatcttggtttgaaatgcattttacttgtaatgtactaaaggaaacgttaatatttacagaactgccattttcagcacctaagagcttgtcattttcatatctcccaaaccataagtgataatctggtgattctttcacctaaattcaagttaaaatatgatctacccactgtatttatttcataatttattgatcattttgcatgtgcatgtttatttggctcttattcgcatattgcttcttttcgatagattcggagattccggagagtaacgagccatatcccgaggaggatagtgactaccctcagcagcaaggcaagcacctaagcatatagaacctatactttctctaaaaatgatttggttgcaatctatacgtatatatatgcatgcattgcctagatattaatattgtcagtttatggtgtatgggtagaacctatttatgcatttagttcttgtgttattgctgtccttatatcctattaccacttgttgggattacttgggatttcttattcattaatgcttagccatgcttagtgctaatagaactatagggatggacagtgctattaattgtggtatataaacaacttgcattattgggcataaaacttgagcacttacactaaataatggttgatgaaatatgttggacttggacgggtgatagggcgatgatgggaggttggtttcccctgatgcaagtagccccgtctaggtcgttaaggaccgaacattttgacatctattcaagcacccttcgtacttaccacatgtcttatttgggaccggcttgttcttactagttctactgtgatcatttataccacattggagagttgtgaggcaggtagcctttggagggcctcgggtgcctaggtttggccgggggtgcctcctgcgtggcgcgcccaccttggtcacatcacgcacgcacgtgactgagtcgtcgggaaccccagcgtggtataggtggttggggtggggctaagaaagggcatttaatgagcttgaatcacttgtgtaccgcacttgacggggtgtgtagcatttgatctttgttcatttcgtgtgggtccaattgtacacctctgatcaaagtataatctattcgaatagccgcgtcctcggttatggacaatgcttgatgtgttagctagttatgttagcatcaaatgtggattattatggatgtgattatgcttgatggtggtgttggcatgttgtgccatgttggtatggactttggtagtccatggatgatgatgagagcgccgtttgggctcatttgcttatacatttcagaattatatacttgctgtccataaattaaaatgatgctagatttacttatccttgcttattttactcattaattgctcaataaaattagctttatgcaaatgttgaacctagagacccactgtaggctagaaagcttgcatatttctctctcccttatgtatatataattttgggtaagacttgcgagtacaatcttgtacttaaccggtgtctgcaattttaggagaggattccggttatgagttatgcttcttgtgtggtcattgctctgccgagggcggcgagggcaatgagtgatctcttgcagcttggctcttgctcggttggtttgccctagtggagttgtggcaccaccggttttatcttttgcttatgaactctatttgagacttccgctgctatatttatgtgttgtatgttgagacctcggaccctattatgtgtcatatacctcgctgcactttaaccctattatggtacttgctatgtttattaattgcttgcgatgaaagtgtgagactagtcgcattcctagggactagctaagcacgagtaacgggttttgatcgcttgagataattggggatagcgctttggatcgagtcactggggtatgcttttggtcgccaccttcgagtggttgacgggcatatgacgtggtggactggcaagctatcttacggttatgtcttgcgctcactactcgacatttcgtttattataatagaaggttgtcaaccgcgatcatggacacattgaggacgagtggctatttatgcgtgtatggatcccacttctccaatagtatgtggtggtcgcgttggacactggatggtataatactcggggtgtccacaccttttatctaccatctctctataaatgggtgacatccaagcaaagccataccatcattgtcaagtcaggtgtactctcgtcagccttcgtcttcctagtcaagtctggtaccccatcattcgcttcttgcgcctcttcttcgccaccttcttgcctcctctgccgcatcccatcatttctggccgtcgatagatgcaggaacaactgtcctcattgttggatatcgagctcgttgatgctcctcctccagtcagcactcagacgcaagcctatccccacacccccaccgtcgaaggagtcgatttgcaccggttttgattgatgtggaaggtgttatacccggttttatggttagagagatgattcgatcgagggtaagagacgagagaggcaaagtagacttattctatcccacgaccacacccacccaggacccagctatcgaatcgccactttgccagccgacgaggcgacgatgcacacagccacgtgccatcctggcggagatgcggactcacacgaacggagggcgatggactggggcccgccgggccgtgctggcgctggtgaacggaggccggttggcgcctggcggcggaagagcggtgaaacttgaaagatgcagtggatggcggagtggttcggcatctgaccgtggtggcgcgggaagccaacggccgctgcgctcccttgagagttgaagccgagaagtcgatggctcgcggacgacgcgaccatggatgtggtcttctcgttgcccactgcccaggcatggagaaggtgattcaccggtgcttcggtttaaactaaaaactttactgtagttgggggttttcggcttgggttttatatttttttccccttcgtagtttttgttaaagtaactagctgggtggcccgcgcagttgcgtggctagcaccaatataaaattatatattttttacagaactttttatttttgttgctttgaaaagtcacaccagtccactacttattcctttgccatccctttattaatttgcttgcttgatctaccgcaacttctatttattcttgttggaatatttcaaaattaggtttttagagttaattgtctcattgggtttctttttataacttttagaagtccgtcaaatgtcgctattgtactcgtctacggcctgcccgctgcctcccctctttatcattgggattttcaaaatcgaatataattattgttgggttcattttttacttcctagaagtcccgccaaccgtcggcggctccaccactatactactctacaacctactcgttgcctcccctctttattgtcattgaaattttaaaatcgaacataattatcattggttttttttttcttttgctttctaaatgtccggccaactgtcatgacagtgctacttaatggtttacccatcgtctcttttcttaatcgtcggattctatttggggttttgtttatagcttttagatgttcaatcaaccgccaccactctggtcctttataggtttgttgcttctcccctatttattgtcatgtgtcatctttatgttctagatgtactatttttaaaaaaaatccatattttttattccgatatcttgttgtattcctacttgaacttttataattatttttctattttggaattcattttatattttatttcaaatttcaattaatcttcttgtcctttaagcaaattatttgctttctttttctaccattgatatatagaggtagatatctatatctatactaatataaaaagggggagttatctccttgcaatgctgcaggctaaatcaacatgttggtcctatcatcatctgcatcctcatccgcatagctctcatccctaccgtccactgcgattcaccctcgcacagcaactccatggagaccactacacttcatacgtccgatggataacagaaaaacggacgcttgttatgttatatttctgacacatgcactgatatgtgcaaaaacactttaatctattttttctcttaaattatgtatacaaattatgatccgattacactattaaattcgttgcaattaaatcttcaaaacaagaccacacatgaatatattctgacgaaatttttttagctaattattgaattatttttaaatgttgcacgatgttccaccaggtatattggaattgtttcactgaatagatcgaaaatgtttcaatcgtttaaatcaggctttgtttcaccttatataaaaacaatgtttcagcaaataacgaaataatgttccagttcacggcaacatttgatatatacatagtgaaacactataaatacactaggtgaaacatttttggtagaacaaaaaaataaaataaattctcttaatagagggtttctaaaatatgtgggtaatttgttgcaaaagaatgtttcaattcacttcaacattagatctatacatagtgaaacatttttttgaacaaaaaatgaaacgaattcccttaatatagggttttcaaaatatgtgggtgatttgttgtaatggagtatgtggtggagacacgtggcagtgtgaccggggagacgtggtgggtcccagggggagcatgtgcgcacgtggtgggggcggggggagcgcctgattttctccccctcccccgggcgaccaaggcgggatctttattgtaaagatttaattgaaacgaatacactgaaataaacggatcatagactgaatgagtagttttggagaaaaatgattttaaagattacattcaacttacgtatgcatatatacttgcacaaaagttgcatcctgagtttctaacatgataaagagatgaggaggtattagcatgtaacattaaaaaggtgattcaaatgggggaggaaatgatgaggcgtccgaagtttcgccgtgatcggacgctagatgggaagtatttccgcaactccatcctatctccaccgtgattttcgctcccatcaccgcacgaagacttcgcccgcggtactcgctactaccgctctcgaaccccttcctgccacacccccgcgccgccgaatctccctgacctgccaccgtcgccgtgtcctcctcctccccacccaccgccactgcatcgcctcctccccatcgcctccgcgtcgtcctccttcacactcaccgctgctgcattgcctcctccacaccgcctccgcgttgtcctcctcctcacccaccgccgtcgcgtcctcctcctccccatcacccgccattgcccgccattgcctcgccgatctcctctctcagcgccaccatcaatcccgcggcggtcaccatccccgagtccccttcgccggctcaacagtcgtcgtcagatccgccgacggggtgaactcggcaacggtggtccagctctcgatccctaacacatgtcgcgccgtcctgtccaccgccgccgcgtccgcctccccatcacccaccgcgtcgtccttcgcctcgccgatatcctctctccgcgctgccatcaatctcgcgacggccaccgtcgctgccatgcagccgtcgtcgtcagatcctcctccactgccccaacgccggttgtgtcgtcctgtccgccaacacctgcgcaccctccgtcgcttgatattcctgcgagttttattaagaaaattacttttttcctgctgttgttacacttgctgtgtggagagaaaactttgtcagaagctaaatattgttgttaatgttcttggtcaatcttttttcaggcattacagtttgcaaccaactgatgacgaaattgtgatggctccatgttatttgcaccaactgattaactgaactatgctatacacatgggagactttggttaaaggattagaaatcagagtaattagaaaaagatacatgtccaatgctaatgcaaaggcttgtagaaagattatgtagagtgtttacccgaaataatctctagacactacaacacgatcatgtattctgagagccttctagctacttcagacggtgacagtgcttacctctaaggtattgtttcccttgcactctgaattaacatgacaaattctataataaattatatgcagcaatcaatttgatttatctccgtacatgctgcaatagaaaagtgcaggagctgaaatatttcttcgccaggtcaagaagaataggaacctaaacggtcaggtataatcctaaggttctttattatgtttcacccgtgagtggtcatgtggtggtttgtgtgcatctaactactgtatcgactaacagttcaacatgccctattgatccggtgctaatccccaagagctacttgattaagctcactacacaaaacagcgtggatatgacttcatttggtgaatattcatgtatatacattatgtttcgtgatatgtacatatagacatatcaaggaatggttttgttatttatttgtagttttgttccatactccacaaaagtagaaaatcaatgattaagctcaattatgatttattcctagtagcttggtttatgtgacttgggactgctaaacagtacacagctagcatattttgtttatagtgctctagataatatggaggctctagacaatggtgtcttggagctccttttggttaaacaacatatccacacaaacaaggtacattatgcttgctctcaagaaaaaaaagggttcgtttattcagtgagtatgcttttcctctagaaatcattagctgtagtgttagattcacaatttcattcatttgcaagatattcaatggaatttctatgtgagtaaattgttgtgcatatgaaggtgcatttgacaaaggtcaaggggaattggcgaactaatcagtacgacaactgttagtcaactaattagactgtctagtgtttagttttaacaattccattgtttcaggctacccaaacttcagacagaggcagaggagcaggaccacatgaactccttaatatagatgatcaacatgtctccatatctatccaggatgttggtcgaggagattttgttcttttatttagcattgattggtctctagttgatgtatctaatttcatatactccgtaagcacaacatgaaggtaatatccatacgtgcaattatttctttacttttagtttttactattttataagataacggttcactggtcaagcaagggcaaagacctatatttgagtagtacctattagatgaactaaacttggcatggaacaattctaattctgactatgaaaattgatccatttctctggtccaggaatttgagtgtttatcttttcattaccaaggcttagattgcctcacaatgaacctgcccaaggaccaatctcttaaaatttggtttgagtggatccaaagacagatatattaaaagaaatgatgcatctttctttagagacattttattgaagcacaaggtgtgttgtgttcccgacctccgtgctaggagcgtgcaaccgaattgcattccatgaatctaattaattttgccttcatattggcttgttattttcaaccttgattggcatggtccggcatagtagtagttctttaaatttcacaaatacaaaaaggtaactactgtttttcttgatattgttgtctgattgctcttatgttgtcccccttgaatttttcttacatccctgatcaagcaaatcaatgatgtgttgaagaatattatcattgtgctgcaggttcgtggtacctaagtggtccttatgtgtacaaggatcaatctgctgatgatataaagattttgggctactattaaaaaaaagtgtagcaggtacccaaatctcacaccttattatgacatagctagcagaaaatagcttgaattgatattccagtatcacacaagtataagacctcatctaatataaagatctactgttgccaccttttcttttatcacggattggcccattggattggttctgagttattcgctacctgtaacctgttgacctcaataaaagttttagcagttgaactacagatcataactgattttaatctgaatgttttctaaatgcatccttgcttgatggatctctttagcataatctggtgatcgatacgatgcatgcacttcataagtacagtgcaagttgtgttagtttttcaatgttgctagctagcttgagggaatggtttgtttcaaaacaaacgagttagttgtatcttcaattcttctcattcttcatattctgcggaattgttcgttaaaatctctctatgttcaatcagatattggcctagcgattcactgccagtaagcttgggattacattggctaagtatcattaagtgtaagtttttttttaaaaaaagaaagctattctaagagcaggttgcaatatatgctacttggagttacaagttagctgttctttttctagaaatattgcagggtttttgtattttctaacaaagctgattgaccatgctatgctgttttgtcaggttcaaaggatcataatatatatctgcaactctactttatttaaaacttctaggagaagttgaggatcacacattcacatataagtgaccatttcttatacaaatgtaagcacaatttttttatgaccagtagcatcggatgatcaaagtgtcttttatctccgttttccacattctcttgaaccctgaggtttttttttctgtctaatccttaattcatacaaggaggaccttgtattattttatcttatgcttttgtatttcaatgaaacatggcttgaatataagtttatttattctttatttgatgtgaaatgaatcgtatactttaaatttaataaacttattgttgttgtaatatcggtgatatgctaatctcaagttaatttatatttgcatgacgtgccttgcacttgcacgattactagtattattcaagctttgctttcacgatgtaacacgcaacatgcaaagacgacaagacattcagtgcactagttatcgtgcagatgttttgacaatagaattaacaaatgaagaaaaatctatgcaatcttttttaatgtaatgcactccataatctgaatggttatcttataaaaccactctgttgaatcactactttctgaccaacaaagataaaaatatttagagggtacaaaattgctaagcacaatttatacattgcgatgttgctactttttggaagccaacaattatagatcagagcttggatgtggacataggagtacagaattcattactttcatctttgtccgtgaccattttcattatcttgtcataaacagttcacaaaatacaattcggtaaaacaaaagaatcaattctaaactcactatttcttctccatttattcatcagcaaagtgactcttcgacattcatgtatgcaaattgtaacatctgaaaacaacagcccaccataaaacatacctatcatctagtaagagccatatctttgcaaggactctttgctgcaatttctatctattggtattccctcttaaggcaataaaaatatacaactatctgtgctgaataacaaaccattaaaagtatataacatctttactcaatcattatctaaaaaaaatctttactcaatcaaccaattcatataataactgcgacgtaacgtcaacaaaaagaggcaaacatgggccaagagaaagctacagagacctagtttggcacaattttctggaacggcaagatgcagttattgcagatatcaaattaccatcagtcaataggtgcaggttttactaaagccaaaagtacatcaacagaaaaaagaagccatgacatgcactgtttataatagaaaaatcgaagctccatttatcaattacttctgtgttgaactgaaaccatccatgtccgtgtaatatacaacttaaaaacaggcaacaaggccattagttgatccatctcaattgatttaatcttcagactgacagaccatattaatagcaaagcacatagttacctatgtaaaacattctgcatctgctttcaattcgcataatctatacaatacaaacgaaaaaacagtaaaaaacatgacatgtggtcaatggtactctaacttctacacctactgaaaggttcaatctgaggcaaatacatgatcaacaggatatattagatttgtacccttatggagagctcgacagctagcttctgcctgatcaagtgatgatggggatgggccaatatttggtagcgctataatcatatactcgatatgtacagagagatttggaatacctatcgagagggtttaactgttaaaatcagggagccagttagagaccataactgtcttatagaatagcatcattcagtggaatgaaaacacagatgtattgagctctttcttagccttcaaaaggttatcaatttttagacaacaaaagatatagataagtggcagtcatattaggaacgtcaagcagtagtcctaacccaacaaaataaagagcagcaagtaaggcatgaagagggtatggtcagaaatgaaaaatgagagtcagctgcccagcaacaagtctcgtaaaatcactttttaatacacacactacagttgagtatttctataggccaataaaaattttctgcaagtaaaataaaggtagcaaacaaatcaaatgtcagacaaaaaataatagtacctgtcgtggcacaattttgcattgtagggcttcgtacattatccattgaaagtaatcagaatgaacggctatgtcgtggagcacgattatggtatagaattgcaaatgcaagacactcttgtgcatcagtacaccatatgacacaaacttcacgcgaagccctatccaaagatggttcactataatgtctttgaatatatgtaagccatatagggtcctatcactaaacttgttgaacacctggcaaagatggttccctataatgtagaatcctcctagtccctgtatatgcaagctcaatatctatacataatgattcaagagtgccaccataaaacaaaataaagaattctcatcaatatgccaaatcaaggccaaaagataattaaatagccaatgcctgtgtctaaatattccctactgtagctgaaatgccatgactattaagaagtttacacttaaatcgttgccggctattattgtttgacaattctagtacaaggcatcacttctctattctcctctgtaagtattcccactgttggaagttagttcatattggatttgttataaaacagtgatttgctatacagccatgtgaatcgccggttccagattatatccaaattttggtacgaaatggcatattcatatgttatcttcatgatctgtcattgccaaattttactgtataaatagaaaagaagcttactttttaggtcaactgtagaaatagaaaatacatgttcatatatatgttttcttacttatctacatggctggattttaccatagaaatataaaagatgaagtgaagcagaaaacaagcttacttttaatttcaattgtttgcttgtttggttctttccctctcgatttcaatgagaaacccattaaaaaggaaccgaattaattacaaacttcagaaaactgtaaaatcctctaacgacaacatgcttaccagtgacaacaaattaggtatctgtctatgtgaagctctagttttctaaaaaaacatgaatatgtacttacctcatgatttcattaaacatggccactaaaaatctttatagtagatgagatttatttaatttctgtaacatcaaaatttcggttcaagttaatataacattgatttactcacattgcaaggtggtagaaacagaagatgaaactgaaactgcatatagttatacaaagtgcaacatcaaattgaatccaagccagacatgtgatgcctcatctgccctatgtgatgcttcagttgtagctcttgtaggtgtggttgtcggcagagctagaagagtagtgggctgcagcaatgaaatagcctgcaatatgaaacagaggaaccaaaaaacaacaaatttagtatttagaccattacaaagctgagaaaggtctgggtatgtactctcctaacaattgtttttgaagatccaattgtaggaggatcaaatgctgctccctaaaaaccaaaacatccattcaggataagaagctaagtaagtaaatatgcaacagttgaggcggaactgggaaaaattattattagaggttagaaagcagtacattgcaattagcctgaatttaccaccaagaaatttactcttctgaataattctaatagaaataccattagtccactaaacctacatagccattaacaaacaaataccaaacattaattttctgattcatggtgaaattagcattttcttattttgaacgaacctgaatgttggtactttcacatgtaaagtacgatgattactaacatacacaccaaccaagaaatttatcgagataaagtttcatgccttgatatccttaagatattcggatcagaaaagccagagaaattcctgtgtttgtcacgcataaaaataagttgcggacctagagttgaccatggattactacatattttatatacaataatcctaccatggcctaatacatctcaacaatagagtcaaataaaacaaaattatcaacacggagatcaaatgattccccctatgtgcgagttgtagatgaatctaacgtacactctatcagacaaatatataatgatataaaagagacagagaggtataggcttgcctccatggctatcatggcttgcatccctaccactgctattgtttggctaattgcctcatccagtcgaaccaaaagtaggtgcttgagaaaatcaaaatatcatgtctcggtgcgccagtaatggaagcaaaccaaacctaatggagtatatataaaggggattcttctttttcacctgggaagaaatcaccacaaacctatcctctggtctcctcatcacctccagtataccggccgcagtcgacggcttggaggcgatgtagccggaggcgtcgtccttcacatgggttgctcaggcttgtgaaggggatcaaagtgacttcagaggaggagagtcgcagaccagaatggcgtgtgccgcagctagtccagggaaagggcataccaccccggcgccgtcggggtagtccaggcagggctccagtggaaagggggaaccaccccggtgccggtgggggcagaccatggtcgcgacgacgggaagaagcgaggaagcgcggagcgaggtgtagcgcggggatgggaggagggagcgagtagcgcttgggggcgtagtcatcgcgtggggacgggaggaggcggagtcatcgcagcgcgcgggggcaaaggcggagtcatcgcgacaggagtgcgagcggtggggaggatagggtcgtcgaaccacgaattttttttaaaagcaatatgattttaatggaaaatcgcaaaactataggtcagttaggcaaaatcgcaagtttagcaccctgtcgaacaaccgcggttcgacagggatacctatcgaacaaccacagttcgacaggtacatgtcgaactacgtgagttcgacagggtaggtggtccaaaaacaaataaaaaattacatgaacagtatcactacaatgctagtcagggacatatcgaacagccaaagttcgatagggttgcgtgaacagcgtgctacagtgatgctacagtgctcgcaggcacatatcgaactgccttagttcgatagggtattgtgaacagtgtgcaacagtgatttttctcttttttttaattattttaatcacctgtcgaactaccgcagttcgacaggtacccctatcgaactgtggttgttcgataggtaccttgtcgaaccacggttgttcgatagggtgctaaacttgcgatttcgcctaactgacctatagttttgcgattttccattaaaatcatattacttttaaaaaaaattctcgaaccactagggcgcccggacctgatgagattagatgtgatggcagatggacgaatgagatgagatggggtgatttcacctttaggattggaggggtgcaacttcgaaaaagctaatcggcgaccagtcgcgcgcgccctcccctgcacaactggacacgtgtcgcacgcgaaggaggcggcgaacggcgcccgcgcgtgagtctttttttttcggtttttctgttttggttttttttgtttctcttccgtttttttgggttctctttctgttttggtttttttttgtttctcttcccttttttcggttctctttctgttttgtgttttggttttccggtttttttctcttccttttccggttttcttaagatgtacatatgcaaagtttatattcgtatgtatactaaattttgtatttgtacacatacaaagtatgtattcgtgtttttttctcggtttttaatatatacatacaaagtttgtatacgtgtatgtaaagtttatatattcgtatgcaaagtttgtatacgcgtatgtaaagtatttttttagtacacataatttttttatatacgtatatatatactttgtatacacatatataaactttgtattttattaatataaagtttatatatatgtgtatacaaagtgtatataaagtatatacatacgtatatacacactatacacatcgtagtagtattgttgtagtagtactactactgtagtagcagcagcagcagcgcgcgccagtagcagtagcaggagcagagtagcagcagcagcaggagtaggagtagtagtactactagtagaagagcagtagcagcagctgtagtaggagcggactggtcgcgcgaccagtcgctcgttagggattcccgtgcaactcatttttatattactccctccttctcataatagggattttgagtttttatttgtaacgtttgaccactcgttttatttaaatttttttaaaattattatttattttatttatgacttactttattatctacattattttaagcacaacttttcgttttttatatttgcaaaaaaaaaattgaataaaacgagtggtcaaacgctgcaattaaaaacttaaaattccttatattatgggacggagggagtagtacggaagtactccatttttcgtgtacaactttgactgtatgaaatttttttataattcgtatttttatttatgttagatgataaaacatgtttaatattttatgcgtgacttgtctttttaaatttttttcataatttttccaaataagacggacggtcaagtgtttggcacggaaaccagggtttatctttttttagacggagatatatattattatccattattgtaattgtagtggggaaagtatttcgtagtgctagagatgggactagctagctgtctttcgacagatttcacagcccatatcacacggatttatcgatcattagattagaatccaacgtatattaataaacaactatagtaactatctaatggacctccatatgaacgaacccaataatacacatatgggttgcaaaatatttcataatgcaccagtctattagtaaaatatatatcatgttaaagttacaaatgtaattacactatagttacgtggtacttacatcgtagttacaaatgtaattactatgtagctaaattgtagttacgtggtagttacaaatgtaattacactatagttacgtggtagttacatggtagttataaatgtaattacactataattacaatgtagttacgtggtagttacaaatgtaattttagtatatttacaatataagttctaaaattacacatgtaagtctctaaattatatatataattttaatgtatttataatataagtcataaaaattacatatgtatatccctaaattacatatgtaattttttcatgaaaatacatgctggcgaaatgagaaatttaaatttaattgtttggatctcttaaaatttggattgagtggatccaaatacagatatattaaaaaaaatgatgcatctttctttagagacatttttttgaagcagtgttcccgacctctgcgctaggagcgtgcaaccaaattgcattccatgaatctaattaattttgccttcatattggcttgctattttcaaccttgattggcatggtccagcatagtagtagttctttaaatttcacaaatacaaaaaggtaactactgtttttcttgatattgttgtctgattgctcttatgttgtcccccttgactttttcttccgtttctgagcaagcaaatcaatgatgtgttgaagaatattatcattcagctgcaggttcgtggtacctaagtggtccttatgtgtacaaggatcaatctgctgatgatataaagattttgggctgctattaaaaaaaagtgtaacaggtacccaaatctcacaccttattatgacatagctagcagaaaatagcttgaactgatattccagtatcacacaagtataagacctcatctaatataaagatctacggttgccaccttttctttcatcacggattggcccattggattggttggttctgagtcattcgctacctgtaacctgttgacctcaataaaagttttagcagttgaactacagatcataactgattttaatctgaatgttttctaaatgcatccttgcttgatggatctctttagcataatctggtgatcgatacgatgcatgcacttcataagtacagtgcaagttgtgttagtttttcaatgttgctagctagcttgagggaatggtttgtttcaaaacaaacgagttagttgtattttcaattcttctcattcttcatattctgcggaattgttcattaaaatctctctatgttcaatcagatattggccaatcaattcactgccagtggatggatgtactgatattgaattttaagacttgtgaaatgtgaaatgcatttgatattgcaatcatttgtggaatgttaattcatttgaatctgattttgtatgtactgaaatattgtatctgggctgaattgtatgggctgaaaaaatcagatgagttgtgtgggctgaaaaaattatatgggctggaaaaatatatgggctaaattgtaggggttgaaaaaatcatatgggctgaattgtgcgggctagaaaaatcatatgggccgaattggtgtgggctgaaaatttgtacaggctgcactcattaaaaagaagcaaataatatactgggccagctagaaacaaccccagaaaaaaaaattttgtagcccgtgagctacatgggctttagcaagccgaatcttattttgtgactttttttttcaaccatgtcaactgccaagtcagctgccacgtggcaagccccaggattttgtgataataaagcaatgtcatatgcttgtgacaatagatgtacaaacgtcacatactaaatttatgacggtggctttttgacgtttgaaattacgtcaacttcatatattatgacctaataaaatgtcaaaaagccacacacctctcgtagtgttagctgtgggattgcttggtatttattggatgcgaatccgatcagcataggaatcagccggttcggtgaatagtagtagtaatctgtaaaagtttttgctgtaaaagttttggccataggaatctctagaaaagctattgcatgtgaatccgtgtattatagcgtttcgtagtagtatttttatgtcatgtgacaggagtagtagtctgtaaaagcttccaattccataagagctattggaatacgtgtaataaaccttttcgacttttgaacttctaaaccggttctgacttgatattaccttttgtccggtttttattgttgtgtatatactttgcgaaactctgattaaatcttaccgctaaaatctagatctattatgatccaatggtttagatatttttctttttcttcgattaatgtgggaatttttagcctgcacaataaatacggtgtctcctttaattttaaggctgttttaataatttaatttaatagatagatagatagatagattttttccaatcataatttcagtttacttttcttcaatgttaaagttttaccaaacatagaccatactagtgtaaaccgaatcgaatacccacgcctaaaagcaacgacgatatgctggcgcgtggtagcccaacaatcccaatccccaaatcatcccaattttctggccacacttgcatccctctgccgccctcctctcttccacctggcctctgccactgctcccagctcccttctcatccactgtcactgccactgctctctcgctggccaaaggagaaggagaagaagagaagagaagagaagagatggcagcgacctcatcatcatcctccccctgcatgattgcctcgctacgcagcagccatcgctgccgcctttcgccctccgccaccgccacgtcgccgccccgcctccgcacgcttcctccccgccgatgccgacgcaacccctcctcctcctcctcctcctcccgccaagcggcggcaatctccatggctcccgccaatcctcgccaccgcctcatcgccccgatccacgccgccgccgccgccggaggaggaggaggaggcgcgggcgccacctctccctcgggcctacccagcgtgagtcgtcaatcagtcaaaatgcacgcagcctcgtcgcgatttcgcatgacctgccgatcgaactgacatgcgtgagctatgtatggattttatagctcgtcgggatcgcgcacctgctggtgtcgctggggatcgtgctggcctccgacaagttcctgaagcaggcgttcgcggcggcgtccatcaagttccccagcgccctcttcggcatgttctgcgtcttctccgtcctcgtcgtcctcgacgccttcgcgcccgcgctcgccaaggggttcatggacttcttcgagccggccaccctcttcatccagaggtggctgcccctcttctacgtcccttccctggtcgtcctgccgctcgccgtcagggacgtcccggctgcttccggcctcaagatcttcctcatcatttgtatgcacatcactacgctcctatcgttgcatgcattctgctacttctttcttcctcctgatcatcgtgcttatctgctccgcctctgcttcctccggattttacattctactacttcgtatttgatatgctgatcaattaacttgcagtaaatattaccacaccaacttgcattgtggattggccccattcataaatcacaacaattttacttagagggtgtttagattcaggggtgtaaagttttaccgtgtcacatcggatattatatagggtgtcgtaatagggtgtttggatactaataaaaaaaactaattacagaatccggcagtaaactgcgagacgaatttattaagtctaattaatccgtcattagcaaatgtttactgtaaaaccacattatcaaatcatagagcaattagacttaaaagattcgtctcgcaaattagtggcaatctgtgcaattagttatttttttagcctatatttaatacttcgtgcaagtgttcaaacgttcgatgtgacagggtgtaaaattttagggtgggatctaaacatgcccttggtttcagattaatttgcattcaatctgaaaaaaccgatggtgtgatgttatctggttttcatttcccagttggtggctggtttgcttcactcatggtggccggatacacagcactcaccgtgaggaagattgtccagacacagcttataccagctgagccgatgagcaagccgtctccgttcgcgacgctggaattctgggcctggggtgctgtctttgtcgcatcgtttgctgttgcgtatgttaaccccacagcgcttggcaccacggcaagaacatgtcttcctttcctcctcgcttcaactgtactgggatacatggttggttctgggtaaatacatatgctttttgtatacacttaatctgtaagatctgacgaagccaccagctgccttgtttactccatttctctaacaacatacatgggtcttattgattacttggcaggataccatctggtgtcaagaaagtgcttcacccaatcatttgttgtgcactctctgcagatttggcagcaatagcatatgggtatctctcccggtctggagttgatgcagtgctaggttgtaaactaaaccctgatcaatagtgctctaatcaagttgtgaattctgaaataagttggttttaattgccaggtgattacctcacaaaggcgccatctaatcctggagctggtgacgtcctgatgggatttcttggttcagtcatcatatcgtttgcattctcaatgttcaagcagagaaaggtagtgcttgctgctgtttctgcagaattattctcagttagcatgcatggttatggtgtgagatgattcatatatatcctgaggctctgtgtttgttgttgctggtgtgtgttggctaatcaactaataatgttttgcggtgggtaaaactcagcttgtgaagaggcatgcagcggaaattttcacatcaattgccatcgcatcaacattctcgttatactcaactgccatcctaggacgggtgatagggctagagccttcactgaccatatcaatattaccgaggtgcataaccgtggcgttggctctgagcatcgtgtctttctttgaaggtacggacctagtacatacttatattgctggaaatcaatttctgttcttgctggtcgatcagctagatatataatatggagtactcagctagcttattatatatggtatggatgacttagtttgtgtgtcccgggcatgcaggtgtaaattcttcgctaaccgctgcggtcgtcgtcctcaccgggctgatcggcgcaaattttgtgcaagcagccatggacaagcttggcctcaacgaccccatcgcgcgaggaatagggacggcttccaggtacatatatacctttgagttttacttttgagatttgttccggtccaacaaaaagtatttcgagataccgatacctcacgggttcacagtatcaaatcgtttccgatcgttagatctaacaatgtccatcctacataactagatccaatggtcggaaacgatttagatcaaatgatcgaaaatgatttggtataccacgagatagcaaatttctttacttttacctacctgctggctgctttttttagtaagttaagctgcatatatatacatacatacagcagtatgctctatgaataatgtttgcatttacgttgcagtgctcatggactgggaacagcagcgctgtcggccaaggagcctgaagcgctgcccttctgcgccatcgcttacggcctgacggggatcttcggttcgctcatttgctcggttccggccgtcaggcagagcttagtgttcatagctggctgacaacacgcacggtacatcagttttgtttttgtttgttttttctttttcactttcttttgggtcgtcgtgcgtgtatagagcgatgctcgcaagattgcaagaatatatgtatacagacacattttttgtgattatgtctccgttgtaataagaagcaagagagtaattttgtacccctcggtgctcactaccactaaactagctccaacattccatgaagcagcagcagcactgcagcagccagcaggtgagcagggtacagacagtgtcgtactgctagagcttgcatttgaccattttgtgacccaacgaactaaatgcttgtaatgtcttaggtcaaacatcatgtggcatatatacgctaacaaaaatcttgaccgtagcaaatactccctccgttttttaatagatgacgccgttagactttttcttacgtgtttgactattcgtcttattcaaaaaatttaagtaattataatttattttgttatgagttattttatcactcataatactttaagtgtgatttatatcttatatatttgcataaaatttttgaataagacgaatggtcaaacatgtgagaaatgtcaacggcgccatctattaaaaaaacggaagtagtatctacttttcagaagcaccaatgatttagccttatagcaaaacttgaaatttactgaagaatcaatagtcgtgttgtgtggagttatggatgcatcctaatcggggtttaaattttgatgcctacaaatattacaaacatgcagttgtgctttaaataggaactagcatggtggcccgcgcagattgcgtggttagcatcattatattttctctcatgtaatagcatatatgttttctcattatattattcaaatatattaaaataacaatataattttaaattttgcaataactttacaaaactactaatgtgtaatattcatatcatatttattttaggggtaattgtgttcttacccttgctttacagttcaattgtgattttaccccgctttacagttcaattgtgattttaccccttttttttttagggtttgtaatattgcccctgcttttttaaatgaagcagctgcttgcccctactatgttacctcatgtaatggttttaaatgtgtagtgaatggacaaatatacctctactataattttggcatgaacaccggacatgtttcaagttaaatttgtgcgtatttaatatgggacctaaatgttagacaaattttgtacaagttgacagaacactatatttaggatagttttgacagaattttagcaataattttgacacaatttaaaaaagatgacagaacacattatttgggacaatatgtacagcatctccgtcatatgattagaacacattatttgggacaataaactcctccgccgtcgccctgccgatgccgctggcgccgccggtgatgacggcgaccttcccagtcagcctacaaacccgcaaatcacattcacatccatccccgattcgcaatcaagaagatgaaatcagcgtccccaaccaatggctcaatgcaactccaagctgaatcgatcaaatcacctctgcgaataggaggcggtagcgaaggcactgacggaggaagacgaagctgcaggtgtcctcctccccctgaattacaaaagttttgatccctgcgcgtgcgcccgctgctccgcgccctcctgcgcactggccgcggggctgccgcgcctccctgcgcgtgcgcacgccgcgccgcgccctcctgcctgtccgcctagcgcgcgacgatgccgctcctctccccagcgcctccctgcccgcgcgcaacaccgccgcccttctccgccgcgcctccctgccgcgcgcgtcgccgccgccgccgcttgtcgctaggttttcgatttggggaaatcgttccagcaagagaagtggttactggctagcccttttagtgaaccaagggatggtcattcacaaactataatatcattttctttcttcgttttattgggaaattccgggcccatcaaactaccgtgaaaactaggggtaaacgggtgcttcatttaaaaaaaagcaggagtaaaatcacaaaccctaaaaattaggggtaaaatcacaattaaactgcaaagtagaagcaagaatacaattgcccctatattttatatacatgttagttattaattatttttactatcaaattttagttatttataaattatatatattcctatatggactctagactcgtcttttaatttctttttttattctgaattttctgtaaattgtatttctatatagactctatgctcttcttccaatattatttatttttatttatgaatttttatattatattttatatacgtgttagttaataattttttttaatatcaaattttagttatttgtaaattatatatattcatatatggactctagtctcgtcttttaatatttcttttttttattccgaattttctgtaaattgtatctctatatacactctatgctcttcttccaatattatttattttatttttgaatttttattatttctaattgtatttctatatggactctaaactcatctttcaatattttttaatttttaatttcgaatttcacttacttctaaattgtactctgaccttaaactcttcttcccatgtttttcttaatttcgaattttagttatttgtaaattatatttttatatggactctaaactctacttttaattttattatgtttattccaaattttagttagtttttaaattcctatatggactctatactctacttctaatattccttattttttaatttccggatttctattttttttcttaattgtatttatatatggactctgtactctacttctaatattccttatttttaattccaaatttatattatttcctaattgtatttctatatggactctatactttacttctaatattccttattttctaattccgaattttagctattttctaaattgtatttctatatggactctgctttttctttttctcctattaatgtaagaatttttagactatgggagtgaacgtggaggctcctttttctattctgaatttcaactatttctaaattgtatttctatatggactctagtctcctcttctaatattccttattttttaattctgaatttcagctatttctaaattgtatttctatatggactctgctttttctttttctccgattaatgtgagaatttctaggccatgagaatgaacgtggaggttcttttttctattcctttaataatataatagatagatttagtgaggttttgagatttgctgccgacctctggctatttgagcacgtgtttaggggtgggttcgtggatgtgtgaatatggtaaaccttttgtataatcctcacaggatattgatgactctaatcttactcctccatccaacatatgaaataccccatgcttgcaggataccaagaatcctttttaacagaatttcttaggtcgccttagtacagcgactccatatgtgacaagccctagctcagttgctatccttagagcaaatcaatctaaatcgttttcgcaccagtattttgaattttttttaaagaaaacatgaatacacctagaagggaaaatgctaaagctatcttcacgaaatctaagacaaactatgaagtccaagggaagagccaaggtagaacgaaactagtggggttagaacgttaccaagagatattaaaaaaatatatcctcaaaaaaaaaatttgagaaccctaaacagaatttgatgcatgaaaatagtcgtcttttccaatggatgcctaaaactgattccctacaattgataagtgagctcggtagagaagaaatctgatttttcaatataaaaaatcacccattcctaccaacagttcctcgtgctcgcgttcggatccgtggatagaaacaaggaggactcccaacttatggagagcgagatatgtggagatggggtttttaatttttttttggcacctctctagtggaactggaatcctatttaacacatatgcactagcaagataagtagcgcacaccttatccaatctcctttttctcttgttgaaaatttttaactcggatttaaaaaccttcaacttaagatttgaaaacttttaagttaagttaacttaaaagttttaaacttagatttaaagactttcaggtcaagatttaaaaacttttcaactcagaattgaaaactttaagtcaagatttgaaacttccatttcagatttgaaaacttttaaatcaatatttgaaatttttaacttggatttgaaaactttcagctcagatttgaatttttgagttgagagttttaaattttgagacgaatgttttgaaatctgagttcaacattcgaattgaaaattttcaatagaatattttaaaatttaagatgaaacatttaattataaaatacaatgaaaaaattgccaaaaatcggcatgctaacgctaatcgctattaccttaacattaatctctactagcgctaagcgtaggaggtatgctgcgggcgggcttgctggtgtggtgtgctctaggaaaatgcggaaatccaaaattatactccctcagtaataaaaaagtcaaatctagtccataaaaaaaatcaaatctaggacgtacaacgaatctggacaatcagattcattatattaaacgggaaatctatttcgagagcgctctcggtttagctgtatagtgcgacacatctcagagccgtctaatcgtgcacgtcatcgtggcgtccatccacgtgggtgtctttttcctcttcaaataaagttttctctcaaattacttatccgatctataatccgattataccattgtgttcgttacgataaatcttcacaacaagatattacatgattatattacgatgaaaaaatatttatatttgttaattacttttattatataaataagttacttttatcatatatatataagttagttttagatttgactaaattactttttagacatataaaagtaaattcaataaagtctaaaagtaatttacatatattataaaagtaacttaaaacaaaacggaagtaactttgtcacaacattagaagtaaattcgttgtagggataaaaatatgactttatctagaaattaaatttaatcagcacagatcaacacacgtaagtttaacaatttttaaaagtaacttcaatgtttttcaaaagtaacttcaatgttaattggaagtaacttttgcatggttaagaagtaactctctataaatatgtttaattaccgattttttttcctttcatttttgtttttcatgtagaaagagaaaagaagataaaacctttgatggattgtaaataacattgatggaataactaatgagaattaaccatgtataagatgtaatagttacttcctgataacatagaagttactttctaacatgtaataaattacttttaaattaattaaatgtttgaatatattcaataggaaaaagtatgaattaccccctcgaactatcgcggtcgtctgaattaccccccctgaaccacaaaactagacattcttcacccccaactatgcaaaccggacgaattacccccctcgacccaatccacggtggttttggtctacgtggcgtacacgtggcagtacagtcagtgtttttttaattaaaaattgtgcgtcccgcatgtaatactcttcttcctctctctctctctctcgcagcgcgcacggcgaggacgagtgcggggacgggcggtcggcaggaggctgcaccgcgtcagcaagaagcctttggctgggaagaagcctctgctgctaaggtggattcagacgaggatgacgcggcggaagagtgcgacgatggtgcggtggtgctcggcggcgttgagcgagaggtagcaggcgaggaggtcctgcaggtcctccagccaccagacgccattggtgcacagcatcttgatcatgctgtccaccagcttgatgaggacatcctctactattacccactggcaaagacgcaaaagtcgagcgctaaccgtatgagcctctgaataatcctaccttgcttagcttgggagaaggaagacaccttaaaagggagagccacccttcccctattggactatttttttaggggagattgggcctttccccgagtgggtgtgcctaagaactgttggggtctgggcaaccttaatttgttgggcctcggccaaccccacctgggccagatctttatcatttggtatcagagctgggcccttgttaagagggtgggaatgatgaggacatcctccactattatccgctggcaaagacgcaaaagtcgggcggcgaccgtgtgagcctctgaataatcccaccttgcttagcttgggaggagaaagacaccttaaaagggagagccacccttcccctattggattagtcttttagggagattgggcctttccccaagttagtgtgcctaagaactgtttgagtccaggcaaccttaatttgttgggcctcggccaaccccacctaggccggattgttatcattttggtggagatgcggggtattcttgaatacaaagaatacaataccgtgaatagattattccaatttgcttgcaaagctgaaagagaagtgcagggacgcaacaagcataggagttcttttgcaggtgctacttccacacgacaatcaacaccacgtcaatttactacggccgttcgtccacctacctccacgccatcccatgctcaagaaacaagcaaaaatgcttcagttcagactccagccaagagtgcaacttcggtagcttccactggacgtacccgtgatattacatgtcataggtgccatggcattggacacattgcccgcgactatccaaatcagcgagctctatttgtgaatgatgatggtgagtatacttctactagtgattgtgatgatgaatatgctttagttgccactgaccatgtaggaggacaagataacgatgacatcgaggaagtccatttgcatccagagtcgctagatcagtatcctagcctaattgtcaagctagcacttagtgctaaagagaagtgtgaagagcaaaaccaacgccacaatttattccaaagcaaagttcttgtgaaaggccataccgtcaaagtgattattgatagcgggagttgcaacaatttagcaagtgaagagatggtcaagaagcttggcttgactacccatccacatccacatccgtatcatattcagtggtttaatacatgtggtaagatgaaggtaacccgcttagttaaaatactttttctataggctcctaccatgatcaaattgaatgtgatgttgtgtatatgcaagcttgttctgttattttggggcgaccatggcaatatgatagagaagttgtttttgatggtaggactaatacatataaatttatattcgatggtaaaagagttgttttgcattctatgactccagccgctgctttgaaagatgatcttgcaagtcttgaatgtgaaaagaaagcgaaaagtgaaaatcagattattactaagaatcttgcttcacctagtacaacagaaccaagtgccacaaagaatgaaattaagttgacgggtgctttgttagcttctaaatataatatttgtgcactagaagagctagattcttgttgctatcctctattttgcaaagatcatatacccacattggctactgcttccagtactttatattctttgctactcgctgttactaaccttttgcaggaatatgagggtgcttttcatgatgagatacctccaaggatgacccctggacgacagagtgaacacgatcaagaagatgggattgagtcgaggacgactccaattcaagaaggggaggatgatgaggacatcacttcgtcggaaacgcacataacttcacacgttccaatgataattccaagtccaagtccatttcggcctccggagacagcactgacttcaaacggacctagcgccttcttgccaactccgatttgggtgatcttggactttgtggaaagctatctcgctacctttcaaacgcattcggtctcatgtccaaattcatctcgagtcaacgggaatcaccaaaacaagacagtgatgttgctcaaaccgaacttgggtcttgggccttgtaatagactaggcccatctcggaagtgtctccctccacctccacgaattagcacttaaccctagctttattttcctctataaatagctttgtacatccttaaaaacaattgggttttgtttagttgaattttgccaagtgccattcaccttgtctctagtcttcattcgattagtcaaggactatagattcagagcccctaatagtttgtgtgttgatttgctgggtcgattagatctaccacttcaattgcaactattcatttgtgcttaattacctattcgcaatatttagattgcatcttatcttgttcttgcagtgttctctcgtttgcattgcagggatcatcaaccgcgcgtcacggttgatacgacatcgtttgtagtgtagcgattgcaggcgtcctggacttgttctggttggtagccacatcgcaaacgtcgcactcgatcaaagcgagagttatccccctcaccagaagattgggccacgagagaaagcgtcatcacagctccagctctgctccgtcgactccatcaccaccgcctcgctctcgcgcagccacatccgccaccaccgcggccgccggctcggcctccccgcgctcaccgacgacgacgacgccggcaccggcgctggcactagtgtgccggcattgttgctgtcgtggccgccgccgctgctgccgacgcacgcgcggccgccgacccaagctccatgtgtcatcaccgagctcgcatttggatctggggtggtggagcgggattcccggtcgccattcacgcctgcgtcctcggtggaaccgcgtccgccagtctccatcgccgatcctggcacggggaggtgggatggggcgcggcgcgacggctcggaggaggagctgcagtggcggtggtgtccccgtgcgtccccgtgcgcccacaacgaggagggggagcctaccggccaccgcgcgtccccgtgcacccggttggcctccgcctccggtggccgccgtcgtcctcgggcccgctccgccacccacaactggctccgccccccatgcgccgccgtcctcacctcgccaatcgaatcaacgatgtgtccgcctccgcgccgccacgctcgcctcacctcgccgaccgcccacaccgaccgcccgtccccgagctcgtcctcgccgtgcgcgctgcgcgagagagaaaagagcgagcgagagagagagaatagagagagagagaggaagaagagtaagataggcaggccccataattttttattaaagaaacgctgactggactgccacgtgtacgccacgtagaccaaaaccactgtcgattgggtcgaggggggtaattcgtccagtttgcatagttgggggtgaagaatgtccggttttgtgattcaggggggtaattcagacgaccatgatagttcggagggggggtaattcgtacgttttcctaatcaatatgaatctcgttttgtcacatattttgggtggagtacaatgatgcaaatagatcttaaaaacaatatgtgatttaaaatatataatttattaaagggattagaaaaagatacatactattgcatttttcaagttaaaatgtgacattagatggagtacaaaccagctatcactaactgtgtagtcacgtccacaatgaaaaaagtatgcattaaagttactttctctttgttataagttacttctataatatatgtaaattacttttaggctttattgaatttacttttatatgtctaagaagtaatttagtgaaatctaaaagtaatttagatatattataaagtaatttataatttttcatcaaaatataaccatgtgagattttattataaagatttaattgttacgaacacaacggtgtaatcgaatcataaatcggataagtatttaagagaagattttatttcaagtatagatggatagggtttctcatagatgatgtggtagttgatttagacaaaacaattaccactagatatgtagtcacgtcctatattaaaataagacacattcaattctatatttattttttatgggatggggtaagtatgattgagtgttacatttaactatttgccttttttaagatgtgacaattacggatttaacactcactatttatgacatgtgtaccatcatgtgtctataacatatgagtttaatggcaaatcctttatgaccattcgtaaaagtggaaaatagttaattattcctgattgagtagtatagggcgtg

SEQ ID NO: 9580 - DNA, 11924 bp, Oryza sativa
  unsure (1)..(11924): unsure at all n locations
tactcttgcgagtatctacaatgttgtcctcctcaggattttcctcaggcgtttgatcattgtgttctatcggtgcaaagtgctcatggggcatgacagtttctttactagaagtgctaggtgtatgtttcatgggaaattcattatcaaagaatgtagcatctctggactcaagaattgtaccaacatgcatgtcgggtacaccaaagtttactattaagaatctataacccacactgtgaatagcataaccaaggaacacacaatcaacagtatttggtccaagtttccgctttttggctataggtacatttaccttggccaaacagccccatgtttgtaggtatgagagatttaatttcttcctttgccattcctcgaatggtgttacttccttatgcttcattggaattttattcaggacatgacaggcggtcaaaactgcctcaccccaccattccttggaaagccccgcagtgtctaacatagcattcaccatctcaattagagtatggttctttctttcggccatcccatttgattggggtgaatagggaggcgtcctttcatgaataattctaaactcttcgcaaaaagatgcaaactcattggaaaaatactccccacctctatcagacctcaaccgtttgattttcctttcaagttggttttctatctcagctttatagattttaaagtaatgcaatgcctcatcctttgttttcaatagatacacatagcaaaatctagtgcaatcatccatcagtgtcatgaaatatttctttccccttttagtcaacacgccgttcatttcgcacaaatcggaatgaacaagttctagaggtgccaaattcctcgcctcagatgccttgtgaggcttgcgagtttgtttcgattgaacgcaagtatggcacttggaacctttgaccaaagtgaattttggaattcaactcatgttagctaagcgcgtcatacaaccgaaattcacatgacagagtcgcgaatgccacacattagactcatcattctcgctaatatggttcacagcattatgattattacacatgtcattcaaagaaaagcggaacaagcctctgctgtcataaccttttccaacaaaagtcccatatttagatacggcacatttattggactcaaacacaagtctaaaaccttctctacacaatagagagccgctaacaagattcttctttattgaagggacatgctgcacattcttcagctgcacggtctttcccgaagtaaacttcagatcgaccgtaccaacaccatgaacagccgcaagcgacccgtttcccatcaacaaggaggaacctctcccgacctgataagaagaaaacagagaaatgtcagcacatacatgaatattagcaccagtgtccacccaccaatcaggtgagtgaagaacagagagaactgtaggtaatattttaccgtaccctgatgttcctccgccctcgctaatgaccatgttggcagacttcctgtctttgcgctcaggacagtccttggcccaatgcccagacttgccacacacaaagcagtctccctttgactttcccttacctttcttcttaatgttggttgcagccttgggtttgacatcaggcttgactttcttgttgttgtgggatgcatgagggttcttcttctgtaccatattggcactagaacctccctcaacctttttgccccggacgtcctttgccctcgccttctcctcaacacccaaagagccaatgagatcagaaacactgaactcttgtctcttgtgctttagagaagtggcaaagtccgaccaagaaggtggcagtttggcaataatgccacccgccacaaacttgtccggcaactcacagttgttgttctcaagttccttagccagcatttgaatctcatgagcttgttctactacagaacggtcatcgaccatcttgtagtcatataactgctccatgacatacagctcactgccagcgtcagaaactctgaacttggcctcaagtgcatcccacatatccttcccggaaggcatgtgcatgtacacgtccactatgttgtcagtgagtacactgatcaatgctccacggaacaggcaatccgaagcctcgaacttagcctcttcctcaggagaaagaggtggttcacttcgtttgccccgtgaaacatagaagcactgcatcgctgtcaaccacagtagtgcacgtgctttccatctcttatagttagaatcatcaaaagcatgtggtttcagtgcagcagcaaagccaactaccaaaaatgacctatcagatttttggattgttggaaatatagtcatgaatcggcatattttaatccaaaatgttaaagcaataatcatggcataagcggtgtagggtgctcttaacataaccagtagcataccatgcgcatcatgaatgtcaggaacaggaacattacagtaacgcaataacatgctagaggcatcatgaatgtcaggaacaggaacatagagcacataacagtaaagcgatagcgctaacaaagggaataggagaaggatatactccgaggatggccctccgctggattgtgaggcagaattgcctccgttgatgttgtcgttcgcggcaccggctccagctcctggcgcaccacctccagctccagctcctggcggcgcaccacctctgccatctcctccagcagcggcggcggcaactccagacatggcgagcagtcgtgcgggaggcactccccaaaagcctgatcacccgcctacccggtgcagatctcaggcgaagatgtggtttcggaggcactgctccttccaatctctcgtgcgcgcaagagatcagaagcgaggaagcgataatagcactggcgcggaggaggaggaactaacaccgggaaagaagcaagtgtccggaacagatcggactcgcggcctccttatctctcaggagagagaggcagtcgtgggaacgtggacgcgctgttgcggagagagtcgtgggaacgtggttagtggctgcaaaagaatagcgacgtgacgcacgcacgccgccgccagccaggcacgccacgcctcgcccacgcccacgcccacggcctcggcctggcgcgcgcgcgcgtgtggcattccgacctccacctcaaccagtcaacagggggcctccaataactccctatttaggttgagatattcctcgcttaaatcctgaggtggtattattatccttaacacttattatgggcctttgagatttaataggataagttgggcctagcccaattattctaacaatccccaccaagtttcaaggctcataagaaatgttctcaatgttgtgcctgtttgatataccagggttttggtggagactgttaagttgaacttccacctaggaaatgagctacatcagaccacaactgaacaatggactatgccttgaattgtcagttttgtgtgatcaggtttcactcagaaccttgactggtactgggctgccgttcgcatcccctctgtttggagcatataagtcaaactccaggcctttcatgagtatctagtgatcgcccaaacctcatagactgtgactagcagttgaactcatataggtgtgttccttctgagatgttctgcaggtcaacatctctgcttggagaagccactcggatcacattaaggcatgagccatcctaccatcctgctcggagtatctgatatttttgaagcagaaaacttcgttctcaaacagagactcaagttccatgaaatttcgtagtctctgtatcatcggactatctgatccaacatcggatactccgacacttagaaaaactcactcaaaagaattttttaaacaaagacagagagtgaagttctgtgaaaaatcggatagtccgatacatcggatagtctgatttcaaatcggatagtctgatgttgctcaagtaaaaatgaaataactttttactccgaactccgatttcgaagatcttggactctatggaaagctagtttcatgggctatcaaacccaacataaaacatggtccaaaaccttcaagagatgttgaaaaacttgcaaagaaacccggtgtaagtgttgtgacaagtgaaaccactcgggattaaaaattttggcttaggtttttcaactcacacaaacatgaagcattttgagcactagtattcaaccaattatatgcatgtggtatccctcttaatagtacggcatcctaaactcaaatttaaaaagtaaagttataccaataggagtaccttcacaccatattgattcttcacttggagggttaccaacgtcaaagtcatttgatcatcaggaagatctcatcttcttgatctttgacagttcatcttccatttctcaaatgattaatgtggataatccatggcttcaaatggcctcgcacggttcatcacgacacagtcttcacttgcccttcaccaccggtttcggttcgtcggcgccaagccccttgcttgcccttcaccaccgcatggtccatcgcaactgagcgtcacttgcgcttcaccgtcttgccataggtagtcacttcatgcccgcatcttcaatatcttctctttaattctcatccatcgataagtccatttcctagtttcttcatcggactaatcacttgcttatacactccataagtgcattagtcccttaatcgtttgtcatcaataaaccaaaacccactaggggcatagatgctctttcaataacttgaaaataaatttatttgcttttttaagttacttttatatagattttttttttaaaaaaatgcattatttaacagtttgaaaaatgtgctaaaggaaaataagaaagttaaattttggagttgaggaaaaaatagacttgtcagggttatggataccacatacctaatagtagttgactaaatctcggcaggacccgccacataccatgtcttatacgaaaacaactttgaatatagaaggagttccgcataaggaatgatgaatagagttctacatgaaaacgacaaggactacttgaattgtatccatattggtttccctagttctacttggacaaggggacatctatgggtataaatacaaggccccctaggaggagaggggacacgaaacaatagatcaagacacaagatcaatatacaagccaatattcgtcaagacaagacgccgaatatcgacttcagagataagcatggctagtcccctacggtgcctacggataccgtcaggagagacataacgctatctttgatctcgccggatgcaaattcgaggaggaaggctaccctgttgtcgactacgaatcagcacttcagaccgccaagtcgacaacagttagataggctaccccaaatattgtactggtatgattatggtgaataagagcaacgaccagcttcggccaataggagtaaggttattacctgacaattcaggggcccgaacctgtataaaaatccttgtccccatcttttttactacaatctcgcatatatgatagtaccaatgatccccatactatgcaaataccggaatcgcgacatcaaacgttgacaagactcttggttgtatcttttagatcacaatggtatgagatgttgtttgatttatgctgtgaggaaaaacatgtaaacacaaggttttttttaataaatggatttagttaatttacctcatgttttataaggtctccctccgcctcttttctacgtctccacttgccatcatcgctagttcatggtcaaaattagcagccttgagctcatggccatcggatccgacagtctagtggtcgggaaagaagaagggcagcaaggaagaggagataaatgacagtggcgacatcgatggcaagaagaggaggacagacgatggcgtctagatttgacatcctcctcgagtttttcctcccagttagtaagaccttgcgacttgcaaaatctagtggccccgagctcactagacgctagtgccatactccctctgtccataaatataagggattttgttcccttggtgtgtccataaatatagtggatttgtctcctcccaaagcaagcaggcactgcctgtcagccatccaccatccatgaatcgttttcaaaaaaaaacataccaatatgatgtacatagaactaaagaaatacaaagaacatctagtactcatactacttcgccccgtctatggctttgtttagattcatgggtgtaaaattttgacgtgtcacatcagatatatggacacatttgaagtattaaatgtagtctaataacaaaacaaattacagaatcctcctgtaaaccgcgagacgaatttattaagcctaattaatccgtcattagcaaatgtttaatgtaataccacattgtcaaatcatggcgcaattaggcttaaaagatttgtgtcgcaatttacacacaatccgtgtaattagttatttttttatttatatttaatactccatgcatgtttccaaatattcgatgtgacagggtgtaaaattttgacaggatctaaacatgccctatgtcaaaaagggaaaaagttacagaaaacatactaatactagtgtactacaaatttgtttattgtgtcaatgatgtacacagatgtactacttactctttcttaatttgtgctcttttaggcataataccttatattcatggacaaagggaatatttggctgtcataggattatggctgctcgctgcagctactcaaagtgagggcgagaggctttacaggtgcagtgatggagacaacaacggattgggtcgatggaaatgagcaaatgaagcggaggcacaaacccctcctagccttttgtatccacacgcccctgcgtaaccccacacctacatgggctcatgcgggatgagttgagctcgattcaagcttttctgctcaacctagctacgaaggcagttttgtaactgctcattctggctcaggtcaatgttcaagcaactaaatatacgacacgctgtatctgatatacgagcaagtgcgagctagataactagcaaaaccttaagatgtttacaacagacagttaccttttgcatgattgaatatggcaaccaatgaacgtctcaagggctatatgctcaaactaagattctcatcggatagctatttcaggcctcatcggatggcatgaagctttggctgatcagccaaatctgccaagttcaatttagccaaagaaaaaccattgtttgggttattttgcttatatggctggtgaaggattttctgtggccggtggttttgggatttttattttttgtgtatggtcactagagagttcacataattagccactgctgatgatccaactcccttgcgggtcccacttgtttggctgaaaagtcttagcccaagcctcaaccaaacaagccatccggtgagacccttgggctgaagattttcagccaaactgccaaagcccatctgagtattttcaaccaagtataagcaggagatccttcatcaaatccatccaaacaaaataagccaaccaatggaattgctttggctgatttggaaaaggtctgtccgagcatgttgattaccaacgaggccctaaaattgtagctctgcttttttccaatgagccgagctatatttctatacgaaagttgcataaaaaataatattaatttattttttttaaaaaaataataaatacttaattaatcatataataattggtgttttgttttgcatgtcggcccgaacacagcctttagtcacgatggaccggggcagttcgcacaccgagccctgtgcgcgagacggcgtggtagctcagggctaagcgagcgctctaggggacggacgcgtgtagctccgccgctcagccccccgctggctgagacagcagcagcagatcgagactccaagagagcagcaacatcgacggacgcaccngtnangtccccccctcccccccaccacccgatcaatcatcacgccttccccctcttcccaagttccaactccccccgccgccgacgcctccctcccccgtccccccctcgaccgttcccctcccacaccgccggccgcgtcgcccctcccctccgcctccgccgctgccgccgccgcctccctgcggccccagtttccgtttcccaagcgagtgtcccaagccgcgttgagggagcgggcggcgctccccccgtcgcccggcgcgtggcatcccgcccggccgcccgcccggatccggccggggcctcccaccgcgggggacggagcgcgtcctccgccgccgccgccgccgccgccatttccggtggtcgacttcgccctgaccgagggagacggtctcgtccctctcttgtctgctgcagcttcctagctcctgggctgcctccccccgcggcttctcgggcgccgcgatgtcggagggcaggggaggtaacggcgcgcgagtgatggtccgggaggcggcctgcaacgccatcgcgggcggttcggctggtaattctgctctcccctgcgtatggttctagccagggttggtgggttttttttggcttcggtctcgggatggtggcgtggggttttgatccttctgattgctcttcgtttggtggctgtgttgggcgcaggtgtgatctccgcaacggtgctgtgcccgctggacgtgatcaagacgcggctgcaggtgtacggcctcccttccaacctctctagcacggcgccacctggtaactagctctcttctcttctgatgcatggtttatacgtaccgtttgcctactttgcactctgtccatacgctttctctgggcttgttgccccatgaaatttgtgagttagcctgttttggtctcgctgtaagatcaatttgtcgcgttgcgatactaaagaacatgatgaaagcctatatgtttgcattataccagttatgctggacaatggtttgattgcaaaagttggcgcttaatggggtggggggctggtctgacgtgttggggttgataaaggggattaggagctcaatgcatgcttgtaactgaagtactactgtcaaaattgaggaatggaagggtaggagtgccaaaatagataatctaataatccatgcttttgtatgcttgaatagttataaattaggcacatgaaattgtgagctaagtctttttccctgcaatgctgcacatgcagtgcgtaatgtagctgctgctgcagaatctcttatagtcaaccaatgcaacatttcatataagattgttttgacattgcactatttcctccatttcacagtatctgtcccattatctctggagtatctgtttcaaaatacttgtccattgcagagatcaagatgtacttcttgcaaattttgcccctacttaaatgcatttcccacctacttaaatatttttgaaaagataaattgtctgtattatgagtatattagggatatccacagtcattttcattatgttttcttagactgtgctttcttggtctgtgtaaagtgggctgtggacaaatattgcaaaatggaaggatgtcttgagtaaaatattataaaatatttccatatattgaatattttgacaaaggcatattagcattcatataaatcatatgattcgctaagtttgaaaagacttgcatgttcatttgtatattctaatgtttttatctgaatctgaaatgaaaaaaaaaacctgttatcctcatcaagtttgcattacaaacatgcacatttctctgtttgaaggggaactatatgtcctgtgcatatgtgtcactccaatggcacaactattaataccataaaacctttcacacttctatagacatcttagtttaacatgctgaacaatatagtgcttatctctgtatgttgatgatcaatctagtacaattataaattaattttggatactcagaaagtattgttctcttgagcatgtattactaatttttaatccttctcaaacagtcttattttatctcttgataattcatctattcatcatatatctgctccatttatctttttttctgacttctgtttctcttccgtattaggtagggtaataatttcaggttttcagcacatattaaaaaatgaaggcctgcctgggttgtatcgtggcctttcaccaacgatagtagcattgtttccaacatgggctgtaagtaatcattaacattatacagtcagtcagtaaacagtagcattatttccaacttaggatgtgagtaatcattaatgtacaaatacagttagtaacattacaggattgttttaatttctttaatccacttttagatgatagcttgctacatgtctataaacaatgagttttgaaaacgcctaatgctgatgttttatgtgatttcactaaattgaatacatgttccgtgcaatgcctaataacagatgtacatctccacgaagcgtgtttgctgtttgaacactttaatgcatttcgcttactatctagatccacttgtgattgcgattcaataaaaaccaatttcaatattacagatctagctatatgtatggacatttatattgattttgaggagtttgttgagattttggctgcagaagtgaatttgttttagtaggttgtgtgggagatactgtcagggttgaactgttggcactcaattgtttaaggggaaacatgagtcggttgttttctcttggcgcttaatagtaatatactccctccgtcccaaaatataaggtattttggagggatgtgacacatcctagtaatatgaatccgggcagtgtcacatccctctaaaatcccttatattatacgacggagggagtagtatcatgtgacttgtggaggaagatctggcaaatttgatgctctcctttttatgataaaaatcagtgattcccatcctcttcaataagtatgtcatcaaatagaatttaatatatgccacgttcagaatgtgatacaggaggttttcaatatatatgtggtctaatccatagtccatactccctatgaacatctaattgtgcttcaaaactgcaggctaaatattgctttatgattgatgcttgtttggtgtgtttgattctgttgactcataatctcataaatatgcatgctcagctattctgactgcgtacactgtagtgaaagaaacaattctgtgcactgaagccatggctcgtgggctgtgtgctgttggcgtttttgtttctattagtggtggctgatcttttgtttagatgctagttaattgattgtttttgctgattccgtgatttatgtttgaaacatgtaacacgtgaaatgtattaacagagaaaacacacaaaatatctgtctgattctcttcatttttgttatctctgcctttgatatatattttttgaatcacaccttatataatgttttgtctgttgcactctgcaggttacgttttcagtttataatcacttgaagggtcttcttcattctcaaggttaaacacaactgtgctttaccaatgttggtctagatttgtcagtttttgtgcttatgtgtaaaatattgaagaaaggtgggcagaagcatcaaatccttatttaagggaatcatgtgttggattagattctattgtgtttccatctttgtttttgttttcagttaactcaagcatctcaaggtcttgagcatttcagggaatgctatggacaattctgacatgccactatattagatatttgtattccttgaaatgctcacaaaagaattagcattaaatcatgtttaacacaacagcttagtgaactataaggaattttcccgaggatctactgtttgcataatgtgtccaactttccctgtatcaggaaatcatttaaagcgcttcagctaaagacttgtta

SEQ ID NO: 9581 - DNA, 20311 bp, Oryza sativa
agttagagttcgtttagtgctcatatatgcgtggtggacgaaaccgagatctcgagtcagtctcagtcgtcgtggtcataatcaatcatgcgtattcaggagaaaataaaaaagaaaaaaaaggaccagctgatggactgccgctaccctctctttagtcccggttgataacaccaaccgggactaaagatctttagtcctggattggtagtcccggttttatctcggtttgaaaaccaggactacagagggttatgaaccgggactaaaaagcacttctccaccagttataagtgccgtgctacttacgtgtcagggtctcagggacgactaatatggcgacgtcgatggagctggcgcccggcgacgcgcggttcgcgaagctggcaaaagagctcgacgacaaggcgccgcccaaggccgcggccgcgccaccggcagcatcagaagaccaagcagcagcgagctccgggaagcccaagtacaagcacgacttctacaacggcgcgagcgaggtggtggtgacggtgttcgccaagagcgtggcggcggagcacgtgtccgtggacttcggcgagcagatgctgagcgtctccgtcgaggtccccggcgaggcgccgtaccacctccagccacggctgtcgggcgcaaggtcgtcccggccaagtgccgctacagcatcctcccatcgaagatcgaggtgcgtctcgccaaggcggatgagcaagtgacatggacgtcgctggagtacacgagcaaggccaacaacaagctcgcggcgacggcgacgacaacgacgaggaagaaggtagactgggacaagctggaagccgaggtgaagaaggaggaggaggaggaggaggtggacacggcgacgccggtggtgaacaggttcttccagcagatgtacggcaacggcgacgaggacatgcggcgagccatcatgaagtcctacgtggagtcctacgtgctgtccacggactggaaggacgtcggctctaagaagattgaggccagcgcgccggaaggcatggagctgccaagtgggagtattgatagtgttattattatatatatagtcgggctaattaggaatggatattgtccgtgagttgcaatgagattttattttaaaaatatttttaatccagtattagcattattttctatatacatcatatatactgtttcttacttatatgtggatgttctaaactctgcggggtaatttttaccttttcatataaagtagggagttgatagtgggggtggttgacatatagaccctctgaccctacatgtcttttcttttctaaaaagtagggagttagtggtgtcttttcttttctaaaaagtagggagttagtggtggaaatggtgacagattcacttttcttttctaaaaagtagggagttggtggtagaagtggtgacagattcacctatcactaattcaccaccatcattactctcttttataggtattataggtatataattcttgttatttgtaaccttatataatttttgttatttgtaaccttttctgtcagtatccttaaaaatgtggtactgtcttattaaggtatcattatacacatagtagtacatgttctttgttgggcgtgttactaatgtgctacaagtttaataaactcagttggaacttttattatgtgtaagttagcgattacggtggcagagtcgtgccagctactcgtggtagatggcaaagctcctgcctgcatgcctgaatggaccagaccaaatcatttaacatattgttaagtataattcaaggcgataatacatattgataagtgaaaatattgagtttgttctggtccattgcaaaacttaggttaaaaagtgaccctaagtgaaatttattttaaaattattgagcggataaattggatattttagaaaatatacttagctgatagcttaaaataagtgttctaagtaatgtaatgtagtgggaaaaaagggaaactatttatgatccctcgatgagatatctcctcgtttacttaaaatccatccaacagttatgaaaaattcttaaaagaaaaattgacaacactcatacaacatatacaactccacaagatcttaggtccaaactcaactcacatattgagatataaaaaagacaaattcagcatatgaatagcaacgtactgtttacatatgaatctatctttttgtttttcaatgtgtagggcgagtttgaacttaatttttggtggaccagtagataatacgatactcttcaatgtcatttttagaatttttcacaaccatttgtatcgaatatggaaggaaaaggtacatgaggggacatccccacaggagattagaatccactcctgggaaaatggatttttgagacaacattttctttaaaaaaaacataaagcacatagtttcgataattcgatgaataatctaaaaataacaagggctaaaaaattgctctcccccctccccaagataatatttttttttcgaggggacaaacagggagctcctgcaatttcactatagaagaagagagttgattcagtttgtaaggaaaaccggacctaaaaatcttacaacggcacggtttattaaaggaaaaccggcaaaaacctcgacattgacaaactgaacctaagtacaaccgtccaacaagaggaaagctcctaaaacgaagccttcaagaaggttacgccgacagaacagcgacatcatccgatcctaatgaatctaggttttcacccggagaaatctcttgaagtggagttgaatgagggctccagtagcaacgccttcaagaaggtgaacggcgcccaagggcgtcgccgttgctagcaccgagagcggagcaaggctttcgccttggagcacccatcaaccatagcatctacgacgggagccaccaaatgttacctgcacaccgagggtacctgcaatattcccatccccacccgaggacgcgccggatctgggcaagagagccagatccggccgttctcctcaccaccaatgccagccgacgccaaaggagtgccggagaacgccagtggcagccgcgggatgcctgcgtgcgctgcccaccgccggccgccacgccgccgccggatctgtggcctccaccaccgccgctccatcgccatcgccattcccgccggccatcacccacaactccacccagcgcaactcacctcgaccgcctccatcacccgtccccaccgccaccgtccttgcggccgcgcggctttgccggcggtgtggagattgtgggtacccaatacccacacggcatggttatccgactagttataggggataacttatatctatagaatatgtaacagatcatgacttgggtattatgtttccttgtatattacggaacggcctaaagtcctggtttgataatattgtaaagtagatttaggaaaccgataccgtattggttaaggtttctatcttgtaattctgccccccaccctatataaggtgggcatgaggccctctagggggcatgagcacatatgatcgtcagatctatactacacccggcagattcaaatccccaaacaggagtagggtattacctctcatcgagagggcctgaacctgtctaaatcctttgtctccgcatccatccacttttaggtctcgtgtgctaccccgttttattattgccaaattcatgtttcgacatttggcgcattaggtaggggtgcgtcgagtttcccgtcgaaaagtgtgatggaatcaacttgatgagtagctcgcttcgtcttcgctttgggagctttttgcttcctcgctgccgacgactacaacaaactctcgctctttgacttggattcaaaccagtcgggagagattcaatctagctaaggaggagatgcaacttccgtatcatcttcatcaacagcatcacgcctcgccaccgatcgatctccctccgatcataggaggccacatccacatctcccgccagcatcatccacaatgacagcaggccaagctgcagacggtggtcggccttgtcgccatcctctacggcacggacgcctgaccttgccgatctccccgatgcccatgcgcacgtgacccgcgcatgacgcccaagcgcgagcgtcgcctctgtgccatgcatggcttatggctgggagatccaatccttacactatagaccatggcaacatggccgaccaatgaggtgaagacacatcatcgccaggctataggaccatacaacaccttgcaacaggatcttggctaggagtgctttgcacgccttaattttttcatctacacatatacatatgctttaatctatgattgcttataagattgatttctccttttttgcatgtacactcggggaacggcgccgcacgcccgggggcttcatcctttgcgtggctgacgcggcccgactacccccgtggcacatgcgtccaaggcatcacgtcgcatgcccgggggcttcaccaaccggcttgctttcaccgccaccgactggtgttttcgcctatatggttggcggacttcgccgccgctgttgggcgtctacgacttcaccgccggtctgcctccgtcgccgccgactggtgtcctcgcctatatggttggttggtcacaccaccgttcatgggcgccatatcttcaccgaccagctggcctttagcgccgccaactggtgttttcgcttgcacggctggcctattatgccgacactgttgggcgtctacgacttcaccgccagcctgcctctgtcgccgccgactggtgtcctcgcctatacggttggttggtcacaccaccgttcatgggcgtccacatcttcaccgaccgactggccttcaccgccgccaactggtgttttcgcttgcacggctggtctattatgccgctgctgttgggcgtctacgatttcaccgcggcctgcctccgtcgccgccgactggtgtcctcgcctatacggttggttggtcacaccaccgttcatgggcgtccacatcttcaccgaccggctggccttcaccgccgccaactggtgttttcgcttgcacggctggcctattatgccgccgctgttgggcgtctacgacttcaccgccgaccgcgtagactgcctccaagacggtcgttggttgccatattcaatcatgcaaaaggtaactgtctgttgtaaacatcttaaggttttgctagttatctagctcgcgtctgctcgtataacatatatgatatgatattttccttttcctctgcctcactccatcaactggttctccgttgagttgttagtcgggggctatagacgttatgtcatattttttcaacaattttcataatatttatcttgatttgctcgcgacataatctgagtacaaaagtgcctatcgagttatggagttccatcttcctatgctttccgtttggtttgccaatggatagttgcctttgggccgattcctagcacccggaggctcgttggatggaccgagtaacgcaaggtgctaagtattactcggaagaaatcaaaagcataaagataagataatttattttctactcttaacaattgcaaaagtacccgagtagtaaattccaattcgtgaaacttcgttccattaatgacaaactcatgtcactcatatgcatgtttgggaagtgcctaggccgactcccgatgcttgggggctatgactagtcggacagagtgtttaaacgtaaggagtcatccgctcggggaaatcaaaatgcaaaagaagaaatacatatttataaatattttaaaatacttgaattttcctcgagtattatatttacatcagatactactcatcctatatatttgttctgcaggatccagatccagatatgcataaaagggattcatggctttaagcttatctcttacgctccaggaatggatcagtcagaacatcaccaccggcttgccgtcgtcgccgccgactggtgtcttcgcctatatagttggttgatcacaccatcgttgttatgtgtctacatcttcaccgccggcttgccttcgtcgccgccaactggtgtcttcgcctatacggttggttggtcacaccaccattgttaggcgtctacatcttcaccgccggcttgccttcgccgccactgactcgtgtcatcgcctgcacggctggcctattatgccgccgttgttgggtgtctacatcttcaccgccggcttgccttcgtcgccaccgactggtgtcttcgcctatacggttggttggtcacaccaccgttgttaggcgtctacatctttactgccggtttgccttcgccgccgccgactggtgtcaccgcctgcacggctggcctattatgccgctgttgttgggtgtctatgtcttcaccaaccggccgccttgtccgccgccgactagtgtctccgtctgcacggctggcctattatgccgccgttgtcggacgtctacatcttcaccgaccggccgcttcatatgacgccaattgatgctatcgtcttcacggctggccacgttgccgccaccacaaataggcgtcatcaccttcaactcaagttgtctatgtctgcagccgactggtttcttcacttccttgaatgcatgattctgccactagttattggccttattgtcttcaccgccggtcgtctcgtctgctgttgactgctgtgcaactttgtcaccatggtggagctacttcatatttattattttcgacatcggcaaactctatagcctatactttgcatgatttgccacttcaccaaccacgatgtctacaagagcgagcatctcggcatgtgtcacgaaatattatgccgtgttattttactacaacaagtggtgttccaatctccaatatttctactcggacatcttcaacacgtatcttcactcaagcaatgactattcgacgacaagaagctacagttctcgactctatgttcagttgtttctcaactaaccaaagagtcgggagctacacaaatacaagactctcaaaattcgacaagccttatgtcaagatgaagcaatcaatcaatcaacgaatcaattcggggagttattatcttcgtcttcgcttcagagccgacatttaatttcagcgactccaattattacatcggcaattttggcttcttcatgccgccacaatctactccaaatttcttaagtttgagatttaatttacatgtctgggagtttggagtcatcaaccaatcaactcagatcagatccaatgagttgaacaacagtttctactttcattcaagtgaagcatctacattagctataacactaagttttgcagtcatcttcgtaaatcaagaagctttgcatcagtcttctttatgcacacactcgaatcaaggaaactactcgagttttgatatcttctcaacaatttgatggattattgtcactgacatcatcaccagcacctctacttcatcggccctgacatctctaccgttgctaatggatgactacgttttcacctccggctgcttctgtcattgccgactagttatttcgccttcatggttgacctactatgcaaatgctgatgagtgtcttcgtcattatcattggttgctacactgctattgactggatcaccgacatcgtcatcttcatcatgtcggttgcgtttgtcgtcgtcgactatttttcttcatcttcatgattggtggatttcgtcatcgcctttgatctgcctcgtctgtcactgactgattatttcgctgccatggctacacaactttatcgctaggcgccttcatcttcattgatggctgacctgactgctgccgactggtttcttcgcctccacggctatgcaacttcatcacttttgattggtatcactatcttcactaccaccaatatttttgccacctctgctgggcaatattatctctatattggtcgtcttgtctctatgccaactgcgtcagctaccatcaatgaacaattgtgactacgtgcttagggcttactagctcaaacacaagtatcataccttcaatttggacttgctccgaatacatgcaacatgaattcatgatcatgggtctattttctatgctcaaagactggactatttattattccccataagggttatcaaccgaatacttgcgccagtcgggattcaattattatatctattttggagtatcccataagggataatcactcagatcagaaactattgatatgagctacacttggtctatatcacccggaagatgtattactcgggagcatgttatatgcgtcatcctttaaagggtgtcgaaggcatattttttggcctaggcctaatatgtctgcagcccatattttcaggtgtggcctgtcacgttcttttagggacttaggcatttttgttaggccaaagtgcgcgtgatcaaagtgtcctaataccttaaaatcattttataccgcagttactcaactttttaggagttagtacaatgcatcttaaaaggtgtcaaacagtaaagctttatatagctgcctcgctgacttttttatatagtcaaggcactgtttgggtttatcaagcaattgattggatacaatatcgttgctttttgccacgtaagtgtgcatttttattgactaatattatggcttaggctgattatacattgtggtcattttccaggcggttggtaaatcatttatgagtttatttactcagattttacaccacatatgccatatatttccaggtatggtgaaaccatgtgttttttagggacttaagcacatctgttaaagcagtgtgcgcatggcgtatgcccaatactttggaaatttctttattcgcagcattcaagcttctttatagctgttttgctatgtgaatttttaatgatgtaggcaactttaggttgtactcatcatagtttacaaagcagtcggtatatcacttggatcatgttattcggggattcacatcgcatatgctatatattgatatcaagtcatttggtttattacaattatcaaaaccactcagttagttagattatttattccttgactatatgcttggtttgttcaactaatcacatggtcggaggctacacctattaggtgcatatactcgatgcacctaaatttacattcaattatttttcagccctccacagtcttcatatttggtaaaagtactcgggagaccatggcaaagatgattgaagcacttggctttggagtaatctggttcgagagaagattatcttttcgtctgttaaggtcttaggggctactgtggagattatgggtacccatacccacacgtaggattgcaagtgggacgggttgcgggccgtcccgccccgccccacaaccatgccatgtgggccacacggcatggttatccgactagttatagggaataagttatatctatggaatatgtaacagatcatgacttgggtattacgtttccttgtatattacggaacggcctaaagtcctggtttgataatattgtaaagtagatttaggaaaccgataccgtatttggttaaggtttctatcttataatcctgccccccaccctatataaggtgggcaggaggccctctagggggtatgagcacatatgatcatcagatctatactacacccggcggatttaaatccccaaacaggagtagggtattatctcccatcgagagggcctgaacctgtctaaatactttgtctccgcatccatccacttttaggtctcgtgtgctaccccgttttattattgccgaattcatgtttcgacaggcggaagccgtgtggccgctcaagtgacggcgaggcagagagggaaggtgggggagagggtcggctaggtcgtcgcctcccgagccgcgggagagcgacgcgagagatatctatgacccaagataatattgaccttgcgcatctgcaacagcaaaggaggggtgctgtccagcaacgacgctgatcaacttgcacaagacgatagatgactagcgaagaggcgattgacagttaattccgccgcatcaacaacaattcattagttgattggctactcgaaactcttgtgctagacagcgccaccagtggcgtaacaatatctcgcatggtttcgcctttcacaagacctttttttttgcttggccttcacaagttaatcaggttaggatcactggcatatccttcggcaatggattatcgtgtaaaaaagaagagcaggagaaaaaaagaagagaacgcaagaataggatattccattagcaataaaggcaccgataagttacaaataaagaataatcggactatcatactcaactcgcgagaggcaagctgcagttagttcatgcacctacaagagaaaaatggagacatactctattcactcgcttcacattttcctttccccaatactacttacaacacggcggctagttcctcacataataaattaaaatgcaacctaaaattatccgaatcgcctaaaatcgagagagagaaaaattgtaacacaaagagcgctcacaattgaaaaagaaggtgagtttgcgggagctacaatggtggctgattgcaagtgatatcatagaaccttgacgccacttggtcgtttaccttccatggcatccttcttgtcgcggcaatcggaacaaaggaaagggccttcccatggcttagaggagctggaagagaagattgaaccagcatggactgatataccttcacttggttcaaggtccacctggcagatggcacatgtaaacaagcttgatgatgttctccgaccacttgagtcattgcctaacctgcgtagtaaaaagcatatgaaatcagaaaatatattctaaagtgcacgtcttatggacagaaagcataagatctctgcaaagaaagatagtgaacgaatattagaaataaaaattgcaaacaacccgagctgaagagaaatttgtacatcacattacaaaaaacatatggttgcattattcttatgtgtagcacagtatagtaccaagctaacagtcaaaatagtcagcaagaagggtggtaaatcagcagttacatggacttttgccaacatatagactaagcataagctgatctatatatataaagcagcaagcaaacaagctcaaaagagcttgttcaagttattcatgcagattagggaaatcaaccaagacgaacagctgattcaatcaaaacgaacaagttaaaatgctaaagcattataatctttatgtgcatgacattactaaccactcccaaaacattggatttgtctcacacaaggcttgtacaaaccaacttgtggtcctttcaattaaaggatgaatgaagagggtattcctctaagctgtacaaaataaattgtgatctaagtgctcaaacagaataatgtacacccccccaccacccccacaaaaaaaatgtagcttatctatttccaattctccatgttcctcatctcattcccacgttgaaaggaagactctaagcattttggcaacttggtggaccagccaacagggttcctccaatcctcccttatatacgagaatacgaaggggacaaaggaatggttgattgtgtacacatacaaagaattgttttaatagtggactgagagcaccatgttagcaagacaactcagtataagttcagcttggtggctatctcaatggtgaaaactagtttacccttgtatacctatttgagaatagaacaagctgaccgctttatcagggggtgggccctgcattattcaagggtattcagatgtatacccaagatttttagcaaaaaactaacatatatctatgtatttggtatatgtgttaaaaaatagaaaaaagacctcaatcagcccatagaacaaacaagccacgttactaggccgtgtccctcctcccctatcttttggcccattcgctagcctaggcccaacttttcccccactcccaaacagccaaacaggccggccaggcccacccaccaccaaggcacccacataaaccaaaccctagctagggcagggacagtgggtggcggtggcgtgggcatggcatgggtggctggtggctgagcagcggcaatcgggtgacggcggcgcgccaccacgcgggctgcggtggccgggcggtgctgcaggggcggccgagggcgctgggcggaaacaaggcaggggcaacgggtggcggtggctggcggtgtggcacaggctgctagtggctgattggcgacgaccggcaatggcagcacgcctcacgcgtgctacggctgcacgatgttagtggcaaggaggtatgcacagtggccgagcggcataggtgcaggcgccgagcagtgacagggcaaggggtcgggctggacggtgtgctaggcggcaagccagtgaggccacaagggtgattgggttgggtgagctcggctgacaactattgctactcatctgctctgccttctaaaatctcaagcagaagttagtgaatttttctgaatagttgatttgctctactcatctgagttattcacaatttcacacttaggatttagccatttagggaagtaggaacttgtgcttgtggaatggctttagatgcttactgtatatataccaggatttagacttgtgcaatggcttaatttctaagaatagaagtacagttggctattaaattctaggtccaaaaatgaagagggacaaggggctattagcacttctatatgttgaacaatttcaagtaatgatcaattctatgaaaatgtgaatttagcctcaattttgtgttatatatatgttagatatcgtacaaacactagtgtttgatgttatagaagccaattattaggcatttgggtgtttaaaagaacttacattacccttcatattttgaacgcccaacctctaaatcctgggcacgcccctgcgctttatcattgtcttttggcatgaacaagtatgcgatcgactggctaggaaatgactggataattttatcatgatgtttttctaactagagatatagggggacaaatagtgttttcacgataaggattgccatctgtcttgcccacatggcacataaggtgggcccaagggtcatattgacccaaaaggtaaagttaaatgactggtttggacaaaatcaaatttcaaggaccaaagcgaccctggaatggaacttgatggaccaaattggcctattttcccaaaccaaaaatgctatttatctaagcagtccattttcaagcatcctcaccttgttctagataagcatgaagcatgcaatgtccacctataagatcagctcaagttgtttgtatttgctcattattacttgatcgttacttaccaaggtagtaatagttactgtctaactctcccagagctaatattaaataataagaacaatactaatgccagggctcaatgagctcatcccatctgacaagtgtgtcaccacatcggaacatattgctcaagtattgtgcttgcaggaagtaagttgcgccaatcttgggccaacataatatagtaccatcagagaactgagtaagcaataaatgtgcactccaaaattaggagtacaatggaccagaaaatcataggtgagcagactaggattattgtgttctgttatcatctgaattgaaccaaaaaaaagtaagatctgggagggaatgagatggataagaaattgaaacaaaaacgcagccaatgagccaagacgaagcacaattttaaacaatgtgttcaaaccaaggtctaactattatctgaaaaagaaagggtctaactggcactgtgtcagtggccaatatgtatcaaatattaattggatcttgtttccagtgctttcacacgggggctgtgatcactaatttattccttttgactatgataaccactgatgtgaacttttgcatagtttgaacacacttattgcttagtcaaactgaactaatggtgacagtgtgacactaaaccaattgggtgtgacttgcaagaaaacaaaatcgatctggtatggtttcaaccagagttgtcactgtcaggatagggatcgtaggcatagtttaaagaactgaaccagatgttagcctgtgaataactcactttagtggttccccaataggaacacaggtttaccagttcaaccgactgttcaaagaattaataaaacaagtcattgtcggtatggcatagaaaacaggccttacagtacatgtttccctcctaaggcaataccatcgtgcgctagttggttaaatgggttgtagaacatagactagtcgggttccacagagagaccttattggcttcaacttcatccaactgctccagtaataatgtcagttcagcacaaaaccagcccttcacagtggtcactagctcagggagactcccttgctgaaacagtcttggctcaaaaccggaccagactgtgctagttcctgatcactgctgatagacaatagaggacaagatgatagtgaacctgaactaactagctacaaatgtcagttaacacctccattacttgctatctccacccccttgccatcactgcttgctagattcatcactggcaaagttgctgatcaccatcatcacggcttgctagcttgagagaagagaacatgagaaaagaggatggcggacaacgactcatactccattcacattcatggcaccagcggcctgtgtagttgcaatatatccataaaccctccgtgtttgtttgtgtttttaaatccaaaaaaaagcctttatgggctgttaggctacaggagtggtcaatgctgctcagatggattattaggctcaaggagaacagcttcttttttttttcctatatgtgggttgtactatgataaatagctttgtacttcattgaccttcaacaagaataccacggccaagtttatggactcaatcaacctgtgttaatggtcttggtcaagcaagagactgggtcatggcgatccaatctgactgggtatataatccacagggtgtcatggcgtcatgctatacttaaaacaggactactggactaacatagtggttagttagctcaagaaaataaactactgatgtatatacacataaacactgatgtatggttgactatgaatccagctgcttacacccaagaacagggagctagcagtgaaacacttagaaagttcataaacactcttagaggagagctacaactgacctctctgatagcattgctgaaccttcttcgaataactcttccaccatacccgctgctgacagctgcttagtcagtttattaggatggtcttttgtcttttttctaaagattaaagacttcaacttgtttatcttttttggtggagatggatgacgtattgtttgatcaggtgggatcatgtcaacaacgatgcaggtcgtatcatcttttagccctcttgtcctgagcgcctcctaaaaaattagggaaacaactcatttataaggaaacatgtctgatgatgcaacattagtaatttggtacccattcgaggcacaataactagttttacagcaggattgctaagaatttagagaacactagatagtttcttaccttaacaacttgcttagcagcaagctcagcaggcaaacctctgcaacactttgcagctgcctctgatgacaaggcatcccaaatgccatctgatgcaataataagcctccctccagcattcgacaactacggaaaataacaataaattaataaagaaggcagttagctatcttccaccaataacataggacatcgagcaggaacatgtgttcttgtctctttgttgttgggctgtcaaaaatatattattgccaaacagaaacctaggaggaattccaggcgtctatttgcaaagtgtcaaagttttaccttcacttgcttgacatagggaacaggaactataaattctccaacatcgatatctccaatggatcttgatagacataaacctcctggccagcatctcagtggaccaatctgataaaagggtgatacagcttgttagcattgttttgtaatccttccaaaactaagcacatgtatccaatggagctatcttacatagcatagcaagctatgtttgcaaccatatcgttgtaagttgtaacagaaaggcagtgaaacacacctctgccccaccaacaacactaagccttccaacttcacctccactcgcagtgacacgttccctcctacaatcattttatatagaaggttggttaaagcttacaagttacttttctattcagcagtcaaccaaaaaaaaaaaacatgctattgctcagggacaaaggaacttaacagaaaaatataaaacaacaaatcacttggagttgtgtaagactacgagtctaaatgaaaatcaagaatacagcaaatggacacattttcactccataccgtttaattgttgatctgaggaactattttagtagtaagtacaactccagtaattgtagtagcatggtccacttaatttgtgtgcaaatagaaacaggatatcattttttttattgaagggagaagtagcagttgcatgaagacatatgaacattctaaatagaaattgaatagaacaatacaaataactaattagataatatatggaaaacagtcatgcaagatattctagttaaccctttcatattccatttgcaaagcaaagaatatgcaatgcatgctgacttgcagagcctctaaataaaataccatattaatggtaagcgacagatactcactcctccacattttcttctagtctgtgatccacagtaagcaaagaaacagcgccaccctgagcatccaaaatacaccgggaatcaccaacggaagcaacggtgatagtccatccgtcaatgatcacgaatgtggcagttgtgccagatgtttggcctggtgcatagccaaaaaggaaaattgcctcaacgtttggcataacttatacatagaggtaaatcccaaacaccaaatacaggatcatgcctttgtgttggaattctttgtcagtcttaacaaaccctgcgacaagcgcacgtgggagcgcatgcaaccactcctccctggagagtcctcttggcattgcgctaaggacatgattgagcagattgtccctggtgtatattgcggcggcattaccattatggccatcaagaacctacagacagagaaacacccaattagtgaattgtgaaaacagtccaatcccggcactcacaactcaaagcatctccatacaatggttacatgcgtagttgcaatttccaaggtctcactagcatgcctaaagccatacaaagaactagcataccaagatctgaaactatataacatatacatagcacagcatagcaatttagcaaccacacaccccataaacgggagcgaaatccaagcttcgcatgccacggctgatggtaataccccactagctggctatttagctactcaggagcacaaacccaaggaccggaaggggaaaattcgaagcaggcaccccgaaatgccaaatcgagccgcactgccatacacacactcacgaacacgaacacgaacacgacggtggagcacacaaactcacggcgaagacggcgaaggtgtggggaggcgaggacgccaaggaggaggaggacgacgacgaggtggagggccgggcgcagtcggtcctgaggaggaagaagtcttcccccttcttcgactgcgccgcgcacccgtaccgcagcagcggcctccgccaccgccgccccccctcggcgccgccgccgccgccgccgtcctcctcgtcgcgcgcgcagatcctgctcccgctgcccatcggccgctccgcgcgggcctcctccttgatgagcgcggcgagcggcacgagcccgctcccccccgcggcgcccgcatgctggcgccgttggtggtggtggtggtgcgccgccgccgcctccgatgacggcgacggcgacgacattaccccgcttcccccgatcggatcgaggcggaggggagggcgcagggcagggggcggggcggggccgaaggggcggacaggcacgcggaaaggtgggggaggaggaagatggcgaggcgaggggcgagacgagacgagacgcggttttgtctcgtttttattacgcccttcttttttttttttctattagcggagtccagcccagttgctgctctccccctttttttttttttttttggttttaatttcatcgccatccacctggacctttggtacctcatgctcgcctcactcacgacgtgttcaccgggatggtgtcacgcctcgggtgtggtaaactcgattgtcacctagctactcttcatggaccatggcttaggccccgtctagttctctaaaaaaaattttcaaaaaacatcatatcgaatctttggacacatgcataaagcattaaatatagataaataaaaaaactaattacataattagagaggaaattacaagacgaatcttttgagtctaattagtctataattagccataagtgctacattaacctacatgtgctaatgatagattaattaggctcaaaagattcgtctcacggcttccaggcgagttatgaaattatttttttcattcgtatccgaaaaacccttccgacattcggtcaaacatatgatgtgacacctaaaaattttcttttcgcgaactaaacaggccattatcgtgccaatgctagagaatattttcttttatcttctctcaaaaaaatattttttttatttataaacctttctaaaattatttccaaataagattttagaaaaaaaaatacttttattggcaagtggcttcaaatagcttggcaacccgtaagaacagaagaagccacagaattagagagtgtatgatttgtgtaccatatataataaggttaattggatctatgttattataactcttgtcaaattgaaaatcactattattcacaattcggttgtgtgtcattagtattttataacatttgaactatgctactatatatgtcttggacacagtttgattgggtttttcataacgtgttttcgtatgcaccaaaatactttcaacccttagaggttgacaagtggcacccataagtcagacttatcttcttccccaactcttcctctagcttagcaaggccggcggtggtagggcgacatctacagcagtggtggaggggtcgtcggcggtggcagtggtaaagggtcggcgttggggctcgttgggatgacgagacgaggagccaccgctgccactggggttgctgctactactgctcctcattgccctgatctggtccacttgccccgatctagctgtcacgccatcaggaagctagcggtgggggtgtcatgagaggaacatccgtcagctccctcgagcttcgtgacagttaggtgatcaaggggtcatcgctagggcttgctaagcgaccacaagaagaggagcgaccgtgattgccaaggctgactagggctactgctgctgcagctcgacactcgagctcaagtgcaccgccgatggggctactgctgttgttccttgctgccacgatctcgcctccacaatgtcggaaagccagccacggcccacgggggcattgtcaatctagcggtttcacgtaagctgaccaattttcgtgaaattccatcggtttttgaaccctggttttcactggcaagccccaacgccgatgtcacgccccgattttctttcggggattaaaaatcatttaataatgcatttctagattttacattaaatgttaaagcaatttatcaagtaaagttaatgtgggaaataaaatttcctttagaaatcatgacggtgaatatttttttaatattctccatgccctaaaatactctctggaattttccatgaatttttagagctcaacaagtaattttaataatacaaacatcattacaaacaagaaatgtttcatgccagtccactctttctccctcgtcctcggcctcggcttcattctactccccacgagcccaatccaattcctcatgcctagcctagctcgcctcctcccccattgcgaagtctactacacctccctcctcccttgagcgccgacaagtagggcccacctatcagctccaaaccctaacctctagccgctcgggccgacaccgccgaccacttcccccacgtcgccatatctcccgcaagctcacgagccccctcccccctcccct

SEQ ID NO: 9582 - DNA, 8171 bp, Oryza sativa
tgcataggatatgttgccctcttatatatacctaactacctaaagtgtctggtgatcctgaccagatatggatcattttctctcaaatgtggttgccttctatctgtagatttcacaattcacatccccaaacaaatcaaggaaagtactaagtgcagatgtccatgcaattacactaaagaaaccaagagaattaagttgaatcaaactaggaaagactaattgagtcatgtggaactgtggattctattagatctatcaggtgtatattttggtgcattaatatgatccgataactcatatatgctctccatcctgtattataagttcatttttatgaaaaatgcatgctttcacaactcaagccattgtggaagtcaagtactctgtagttattgcagcatttgcggtctatatctctgctttatttgtagttattgcattatttcagtctactctttatttcctttttcgaagatgtagtacaaactgaggttaaattgttatttagacatgtatataaggtgtaaaatgggtttttctagtttgttacttcatgaagagcatatatgtaacagttaatatatttacaactaaggactgttataggataggagacaaaactatgggcaaactagatcatgatcctatattttataattttgctggaaacttaacagggtgcagagtgtgcttgggggtcatttattgtttcgtgcaattatagttgtaaaatcatggaaatgagaaacttcgattgagagtccgatgactttatgcacataagcaaatgaggagttaagcctcatctctatacctgtcttgtgcgcacatgcgcgcacacataatcctaaattctactcaataccataggcttattaataactaaggctctaccctacagaggtgggaacataattttttcatggacaaagataacaatgctatatctaccagtacgtgcttgttatggtaatttattggtttaattgcactgactgcttttgctagtggttgctgacaattacaaaactcaattacttcgtctttttttgtcctattacatactccgtattttgcactgtctttctgcgcctgtggttcttacgtgttaacattattgtcctttagttggcactagtatatatacatatgtccaaataaaactgcctctttctgtcagttgttaaataaagttacttctttctgtcagtagccacctcccgtttctcttaactagtccttatagtcctacagctgcagatgtcttctagttttgatttatggtcatagttatgcttttaattcagggatgattacttatattaataacatatatttgatgcatcaactgttgtctgcatgccttgtcataattttgttaatgtagagaatcatagtacaaactccggtaccaattcctaatcatttatgttcattatgcaggtgataacactggcgaattgtctgtccaagcaaatattctagctgcttcatgtgccgggattgcaacagctgttgcaactaatccattgtgggttgtgaagactaggctacaagtaagctatatcgtagtaacttatatctgtttatttttccctatatggtatttattttcaaaacaactttctatagatttgtgactttgcaattttattaccttacttttgggggtgggggtgcggctatggttcttcttgagatgagagactaataaatatccggcaagtttgtagaagatggtgatacaacttggctcacagtagtatatactgcttatacgttgtatttgctacttgcttggtacatgatggatatatgtattaggccttacttgtgaatcctaggggcagatatgaggatgcttgatgttgctagttagaacttaagatttttatgagaacagaacttaggtgttccatggggtgtcaacaacattgtgaaggtggctgcgccaatcatcagagaaatgcttacaaatttacaatgttccagggttttgatcatgtgccagaatctgtatttcttaccatcctagagacctgaaatgcgtgaaatgccatacatttgtttgggttaatatgatatgactatatatgagctgttgagctgcagcatttcctgtgtaagacatttattaactaattcttccatgcatggagaacttcaaaatgatgatgttcccgatggaatttgagaacgactgtattcaacacattttgttaacatttttcttgggccacatattgggcatgcaattctatcttgggtagttctcgattctgagacttcaatgcatcaacactagtgcagtagatgtaaccatggttccagaaatcagcgctagtcagtcagtcagtcagtcagtaactaacaacttggctagagagggagaaactgggattaactaacatcatgaagggatttggttttccttcccccatcccctccttaattttcaagtgtgaggatttggaacatatgttattaataactaataggtgcacattttaatagcaaagagattgcatttgtgtgttatcacaagcaatatggttctaagaaacaaggaggttacaggccagcctggcagctacgccaagccatcgtaggagatgttttgctgtgtttgcaccattcaataaactagactagaactttttttagacaagcatgcataaaagccttcttggggtattcaattataccccttagttctcatgaacaagctgccagtcttctcttgctttgttatagaagatgtcatgcttggttagtaggtacaccaactgcacttttcttgtcaaattgtggcacgcagtctctagcgaacaaattgatcccttgcaactgtcccatcgttatggatatgacttgttggacatgtgaaggatgtttagtatatgacaactgtgacaacaaaacctaataatagccattgaaactcatatttcatgtgattgtggaagtgtggcaatgggccatataattccctttttttgggaaaattgtaactgtgccattataattttacaaaatttgagatatgccatcctgacccacatgtcattgactcacgtgggtcctacatgtcattgagctttttatttttgatgttgtcttgatcagaaacttcccttagattgaagagtcaaacctcattcctagacaactaactcacaagtgagagacagggttggctaatcatttagttaatatgagtccattcaaaattagtaaaaataaccacctgtttgaagcatgttttctgtctagaaatcattactctgagaatagggtgaattctagttactttgtcattacatgaacgctgttatcaatgattcaacataattaaaataaatctgagaatgctgcccactaaactattgaaatctttgtgaattgcatgaatgtttataaccaatgattgaaaaactatttggcatagtatattttgacctgataattacagcctgacgtgaccctgcttgtttctttaatcatttttgcataattttgggcataggatcttatttatagcaattgttacatgtatatatgtgtcacgttggatgatgtttaaaattatttatgtactctatttacatcttgtagacacaagggatgaggacaggtgtggtaccttacacaagcatttggtctgctttacggcggattgcagaagaagaaggtatccgtggattgtataggtaggttcaccttaatcatattgcatactgtcttggtcagttcgtttctcgttcttttcattaaaatatatgttgtctatttgatctctgttttatatgatgatagtggtcttcttccttctctagctggggttactcatgtggccatccagctcccagtctacgagaatgtgaagctttactttgctaaaagaggtaaaaaatcttttttactatacgaagtttgagtaaaagactgagtcttcatggcttgaagatttacaaagatgtgcacatgcttttcagacaacactacagtcgataagctcagcccaggaaaattagctatttgttcatcaggatctaaagtagcggcctcaataataacatacccccatgaggtatttttgttggtcctatgtttttcgtaataccttttcttttgagtactaaatggttttctgttgaatacatgtgtctcctgctacagatacctgaatagacacattgatctcttctgaagttgacactttatttctttcaatttggtcacatgttttggtatctatattttggattggtgaaatgtttgttaaaatgggaaagtgagttgggttgttgctaaaataggaaagcaaggaatgttgttgcttaaaatgtcaaatctattctaaagtgaataaataagcagagaggcagagaggcgtagatgaataaataacctccttcagacactatttagtgaaagagaagatgaactaacctaatgaagaaaagatcactttctagtggaatttacttgacttctttttggagcaccagtagctaggaacttgaaaaaccccttacgttttattttcagttatagtaattggcttatattggcaggttgtacgatctaaattgcaagaacaaggtcgtgctcgtcatggtgctgtgcactacaccggtgtaatcgactgtatcaagcaagtgtatcagaaggagggaattcccggcttctacagaggttgtgctacgaatttgctaaggacaaccccgaatgctgtcattacgttcaccagttatgagatgattaatcgactcatgcaccagttgctgcctcactaagcaaaagcttaaaaaccagcatatctccactgagcttgtaatgctggctgagactatcttcgacatagcttgggtgtaatggttggtgatcatggttgcattgccatttgcccattattgaagagaaggcggctgttaagcacagattttggtgaaagagatcggcatacgcagaaatttatgttttggtgcgaggttaaaatatttcccttgtttcatgtgttctaaattgttgataggagccaattgttgcctccttatatgctgacctgctaattgtctcatttgtttcgatttaaacctttctgaagaatactgaccggctgttatagctgaccaatgaccatatattgtcagatgcgcctagagttttacaagaaacaaggcctagccatcgggatcggatacaatgttttgtatatccctttgttatgtattcccagtgttaccgttgactatattattcaaccagctaattgctcgtttgttgctgtggtcttctgaaaaaacgattgtttgcttctatggataccggtacagcaaaaataagtgtttttatgtagatgcaccttttgccctagcagcaagcatggtttggagttgatgtgatcttacatagttggggaaacatactaggaatcgaagattaagatggccatatggccatacaaaccaaatacggtgtatagctatgtgatcaatagaattgtaggtactgttttttttttcttgcgccgatcacattggttgggaggcaaagataagttggggctgaccgccagcatctgtcagtttcacatctcttgaggaaaagattgttaggttagatagccataatacaaatttttttataagctaagcaaaatctgagagatgtaagacaatcactcatgagggacctctaaaagcaagtgaaaggggtggcgcccccggccggcctgccaactgggaggcagcggtgggcgcccaactgccaccggcgatgaccaaaggtgcggcggcgggcacgggagacggtggaaaggaaggggaaaaaagggaggggatctcactgagcgtgggcgggcaaagtgacaaagggagcatgtcggcggagaggattggcagcgatgcttcgggacaccgatgaagacggcgctcccgcggaggtcaacaagcggggagcggtgaccggggacgcacaagacctaggaaaggttgggaggggttagggagaaggggatgcctggtaactacaataagtgatggctggagtccgacgatgttggtattttgttacggtcatagataaatccgcaaccgcatgaatatcgctgtagcacttcacattggaatattctaaggatatcgaatcacaaggaacatgtgagtacaatctaagaacatgattcaactaaggaaaacaattaaatggtaggcttacgatagagatgattcttatggattaattatcttaattaatttaaggtacaattctatcagttgctttgggcaccgactttcctttggttttcaggctgagtccgacttatagctctatgatgtacccaaacgtggagtaacacgaagggtggaaatgactatcatcacttgccgcctgtctcactttctgtggagcacacaataaatgaaggtaatgtctaacctagacaccacatctacgttatcgattactactctagcctcgaccaagaatttcctttttcatccagagtcttagtactagagtgctcagtataaatacgaagcgacgagcccacaatgatgagaagctaccttacttaaataagaaaagtaaataccataaagaaatctcaaatacttattttattgaagaaaacatccatcgaggtacaagtcgaaggagagagtgccgacagctccagcactcctccgggactccacttgagagttgagagagtgtcgacatctctggcactcatcggaactcccccgaagagtactgtgacaaccggagcactcctttcaaagcttcccctcactctcctcctacattctaactctacaagaaagtagcctaaatatgaaagtaagttgtactccactcaagttgtgtaatttgagagtgagagtttctcctccttatatagtgtcaagtggttgttactatggtggttgtgaggtcggttcacccacaaccgctatagggaaacaatcaccatcctccaagtggaaggtgtggatgaatgggcacaagggtggtttggctgacccttggcaccgccattcaccctctctttcggttgggtcactgtccagtgggccctcatgacagtgcacgatggttatcctcaaatatgtcagttttgctatggtttgtgaacccttcaatccatgtactcgcttctaattggccagaggtatgtttcttcgcatggtgggtggtttttgttcataattcacctttatacaaatattcaccaagacttatggaaatggttagtaataaccactacctctaagtttgatatctattttatattctttcatttgcttttatgcatgaattcacaatcagatctggtacttaaggactgttaacaacacccccacacttagcttttactcgtcactgagtaaagatcatggatcacaacaaagatatgattctctttgtaatgatacctgcataataattattccaagccatacttgtacttgtgaatcttgaagtatctaccacgtcatcttgggtgattgaagaacggaacggtcttgattcaagttacctccactcctcctgatgagtacattgggtttttcgttttgctcataaaaacataactctactttattccttaattgtttgtctcggatcactcaatgtgtataattcttcaccaaggtattgattttgcgttttttttcttatcctacttctaataaggattatgtggagctcagggtaggggaaagaacaaaacattacttacatcacatatctatactttctatatagttagtacccactaactcctaaagctcaacatgcaagtgtgccacatcatcaccgactaacaattattatctagagtattttagatctcatgctaacatgacatatcatttgtaattttgttgtatgtttagaactcagcatgcaagcaatgtcaaatcaccatcttcacatcattttcacattatttaaacatatactcgatcatttttataatgtataacatgcattcatccacatattccacagcaaagcgcgtggtatcaattagtattgcaaaatcaaagagtcaatccatggagaaaacaagacatacaaacttgatcaagatgtgcatagtgtatggatatgtggtggtaagtggcactctaattttgttgctctctcatttt

SEQ ID NO: 9583 - DNA, 33427 bp, Oryza sativa
caccaccaccctgcgctgagccacgaggtccacgaggagtcggctggcagccatgaccacgacgacgacgaccatgtggacgacggtgacaacaacgacatggccatcgccgacgtgacgccgccgcgggcgggatcggaggataccgaggtcgagaccggctcacacgtgagccaggccgagcagagccccgtgccggtggagcacgaagagggggaggaggaggaggtcgggctggagctcacgctcgggttccagccgctcgtcgtgcgcgcctcgaggaggccttcgtcggcggaggcgcgctgcgaccttagcggcttgagcgcggagtcgagtcgcatcggcctgcggctcgagctgccagcgtgagaagcggcgtcgcgagccgcgagctttcttttagctgatagtagacagttttggtttcgtgccagaagtgaaacaagaacagaggaaaacatcattattagttttctttttttttttcacaccttttctttttgcttgctctgcatcgttgtaggattcccatgttcctcctgtcatgtacttgtgtgatgtctgcctgtacagactttctcagattcggctgtgacaaaacttgttcaaaatcgatagaacaatccagatttctggagtgaaaaaagaagttgaaatccgattattctccaaagaattgtgatataatttatctttggttatttccttgtttcgcaccttattttaacttgtgcgatattcgtcctaagaactgcaagcttgttaaacttgattggatattaaattactccattggaacttttatttgtgattcgttgcaagtcaggccaggaaggattggaagcattaatcccagcaaataaccaagaaggtcacagtcccatagtccaaacattcagtgagatcgacaaagttgctgatactctgtcgcagccttattgttcatttcatccactcctcgcaaaccagagaactttttcctgagaatgagaagcaattggatgacttcaatcccaacaacaagactccaccttcccaacatccagtcagaccaatacaattgagaggattcatgaaatgattttgcttagacctgattcagataggcaataaaaatcatggggatacatggcagtatgggtcgtatggcctgcagtaccaggttttccatgacctgaataattgggcattcgatgatccaaggaccacagtccacaggagaagagcactaacaggacctatcacctaaccacatgaagatcggcgttttggagaacatagcaaaagctgaaactttaagatgcttaaatcatgactggaagcagcgaagtcattctaacaccatggagcatatgagatcaaccttgcatgctgtcttcctccactagtgaaatacatttacatatgtaaagcacaacagtagggttgtgagacaaatttcttctctatgtccatcttatttcttgtagtccaattagtcgaaacaaaaactgcaaaagaagaagaagaagaagaagaagaagaagaagaagaaaagtctgaattgatagtttccacaccccaagcatgagaatcggggatgccactccatccaaacccagaggctaatgaccatccaaatctacctgatgaacaacaaaaatttgtgtccccggcatcttttcttgagtttcttgaattttattgtgaaagagaagttgcaagaagatcttaactttagatgggttctacagtgccgaagtttttcaaactatttactcaccctctagatgaaataattttgtatgagttggatacacattgatgattttgagtttacttctgaaccacttggccctattgcccaggagtttgtgaaggagttggacattgaaggagtttgtgaaggtcggatctcaccttcaaaagggaagagatactcttggtggaaggagtagtgcatttgtgcagcctcagaggatagggtcagaaaagactcggctcattgtgagctcttcaaaggagagtagaatcccctcaagaatttgaactttggtaacacatcgacttgcaagaatcccggtgatatctctctcacactcttatagctttgctatttggtgctgctagtagtttaattgttgtttgaacaatcctttccctacatgtgtggctatcccattgtgcttgccttgctaacttgcttgaaaatatgagattttcggaatatccgaaaatattccgaaatatccgaacaaattctaggatatctaaaaagtttagcttctgcattttattaaaaattttaaatgcctattcatccctcctctaggcagcatcaaggtcctttcacaaactcttgaaatctacagtcttggaaataattcagtcaggttgaaaaccatttcagggtgtgaagaaactcccattctgttttgaaaagaattaaaaaatagagaagtcttatgttggtgagaagacaccaacgttactctttcatcattgatttgagcaattatatcatccaaatctttttgtagccattgcatggaagaacttcgtgttttctcccccaactcgatccgtctattagtgcatctccttttccaatataatcttctaaaaagatagagctttgagatttgtttcttgaccacttctctaaaattccattttaggatagtgagacttctgcgttcttctatcagatatagaaagtctaaacccttattatagatagagattaactgaagtagcttggagagacccttactcaattattttaagaattttctcagtagctccggcttatagatgatacatctagcagggtcaataaaacctggatcaatgttccatatccaagcaccatgataaaaaaaacccttccatatcaacccaataattctcaaaatgaaagacattggatatggggatagaagagtattttaatcatttgaactgatattgctcttgttagggtaagaacataggactttggatatcttagtgtccaagcattggaagttaaaagctagtcaagctgctctaacaagaggttagcttgtatattactacaagtaaaagattttccttttataggaaattccactaagcctaaagaacttataatatcagtgaaaatgataatatcattcatgtcaactccaagtttgttcctattcttggtggatctataaaaattgaaattcccttggaggatccaagcttcatcactttgcatatgaaaatttctcaagtagtcaacaaaattgtctctttcctgtcctctacatgggccataaatggaagccataaaccaagactcagaattatgctttgagacagaattcaagcataaagaataattattagcaagaactaaagaacccacaaaatattttcacatcatagagccactagaggcccccatagaaggtatgatctgaaaacaattaaatctcttagggaccacttttttgaggaaatttatgtcaattgattctctcttagtttcctgcaagcatatgacctgacatttgctatcatcaatgcattgtttcaaagcatctcacttgtcctctgagttcatccctcttatgttccagcacaaaatattccaactacgaacttgatggatattcattgataaacagttagttaaagagaagcacataacaagcaaagcaggtctgaataaaactagactagcacattacaataaaagtcttaaatcctctgaacatatttagaggcacgacataaatagattcacaaaaggaggaccactgcaaacacattatctttaagacaactgccattaacataatgaacatttgctactcatcatcctcagttggccttgggagtttttccatcttgtctccacccagtttgccctcagccacctcgtcaggagataggccacacatattaactcccatcttttgcagaaacaagatagaacaataagaagaggaggaatcaacatcagagtaaaaatcacaatcaaaatcagattctgtatggatactgctagaagattatgcaaaatacctactagttccttaagttttttggccgacattcccctaggctttccaatacccattcttggatcttgctcaagataactttcagaagaagccctcacccttgcactctgcctcctctctaggttaaagagtatagtcttaccatccctctttttaactggagttcctgggaggataagggccaatatgttactctgatacggggatacggatacggatacgcgatacggggatacgaggacacgtcattttcttaaaaacactgatacagggatacgtctatatatatttaaaaaaataaaaaatacaaatgaaaaacataacacataaataactataagcctgcaaatagagttatacaaattacatgacatcattagagataattagaataaaactttttctggatatcaagctcaactcaatagaagttcaagagctgcttgcattcatagcaagcgatgtggctgaaagagctacatcccagacatgtcccatgcaccagatcttttagtagtactatcccaggagatcaagctcatcatgtagcttgcccctcgtaaataatatgctcccatgcctggtcacaagtgatcctgatgaatttgtagccgcgctagcagtacatactagtgctagataagtggttaagcttctaattccaaaattcaccggatctaaatgacaaggaaaaacacataacaaaacaaccagtgcagatcgagacttaaaaggggaaagaaccaaatagccggtgatgatggactgtacgcgttgggcttggtagccggcggagaagctgcgcctggtgacggagatgccgcgactaccgacggcggaggccctgcgcctaggggaccaggggtggcgacgcgacgcacggcgggcggtggaggccctgctcctcaggtggcgagtggcggcggaacccggtggccaactggtggaggccttgtgcagtgtgcccctggtagcgatgcaagcagcgctacaggaggattggatctgcccttctgtgctgcgagcgtgggtttgtgagttcagacgcatggggaatgtatcggagaagtatccgagtaattttcttttttttatatcatggtgattagggatacgtatccgtatccaatacggatacgtggcttgtgagccgtatctgggtatcctaggggccaactgagttgatttgtggaagtgaagaaggctgctgttgtatagcctagagctgcaaatgtatgactaggaccgattctttagtcactggtggcaaaatagccaggggagttggtggctctatcaagaggtcttaagtcatcatgacgtcatccacaataagctggcttgtttgcacggcccaactagaggcctcatccaaatggtctgttttaaaaactagcgggaggatcagaaggagcattcctctttgggtacaaaagctgaatgaaaggggttgcaatctgagttggctttgaacactaccccttccaccctatccacaaagttgtttcaaaagttgtgttttaagcaccaactcttcaatttttccctgcatgtcttcagagatagaagattgaggaagtgtgagctgttgttctggggtttcatctgcatacataattatgtgcttgtgaccctcattggcatcatgagagctcacaccagattcaccagttgcctgctggttttctgcttggtgattccaattgccccaaccttcatcttgctgtggtggctcctcttggtcatcccaggttgaaccctaatgaggaggttgttccggaggtggaggtggagcacccaaagttggcaaatcttcatcttgcgcttgtgtatccacaaaatcattataaaggacaaaaacacaaaaggtccaagattctccttgccctcgctgagtcgggatttgcttaaaaacaatcctcctaggaacctgatcaacatcatcaaagaaagccctcatcataactttgtcgggaataacgtcaacttcctgccaatagtccaaccagccaaagagcccaactcctctagatatataacttgtagtgtgaaaatcaagtgggcagccaggaacatgatccacccaaccctatctacatacgctgccctccaattgagcctctgtcatgatttctaaatttgaccacattaaccccattgtaatggaaaccaaaagcctctaccagggtatctctggttaaagttgatctaacaatgaaaaaaccaaccccaaaaggatgaggagagcaatgggtaaccataacacctaattcattttgcagatgattgcgaatctgaagcagatgaccatccaaatcatcttttggaacccatggctctatgtctgcaagcatgtaagactcatgctacctttgagttatacacgtccccggcgcctcctccataccgttataccatccgatccgacacaggtctcctcctcgcctcgctggaagaaggtagtagtagcctctgctctgctcctctctctctagtttctctctctagccccgacacattgtaataagggcacccgcaatggttatctataggctctctacaagagatccatgtcagcatattttcctacttggaagagattaaatgaagagagagagagtatagctatctactaatctggagatagtctatagagaaaaacgagacaatagattagagagctatagatatccatgtagacataccattgaagtgatttactattaatttagtctattgctgagatgtacatgttttatagatagcactttacattaacattgcgggtgctctaagtgatcaaatatagtaacctttttcgttttagcaagaaaacttggtttctaagagcgggtacaatagtgctattaggaacgctccaaaacttgttaatcagtctaaaacgagattaaggaaagaaaatcagtgattgagaaagaagccgtcgcttgttctggcgccggcgcttgtacagcgctccacgctgtatcggccaggagatacaataaaaaaatttgtttgtgggttctactgcttgttaattcgtttgaaccaaggtagtttatagctaacttgtagttagcttgttgtatgagatgctttttaagttagctctacttgagacatgataaaattttagagcctactactagctgcactattgaccttgctctaatggccgcgcacacgccgactgcttaactcgggcaacgcccccctctcccacaccctgcgcgcgattagtgcaagacgcccgccgctaattatagtcattagtgataattacagtaattactgttaattatcataattagcatttttcaaaatacataaataattttaaatttgagttaattttttttaaattttgatatggaagttttcattaagttttcagttagaaatgaaaatttagaattttgagttaaaagttttacatttttgcgatgaaaatttttaattgtgagttgaaagtttttgaaatttgaattgaaagttttcaaaatttgagtcaaagttttgatttttgagttaaaagttttgaaattggagttaaaaattttcgaaacttgattcgaaagttttcaaatttgaatcaattttgagttgaacgtttcaaaatttaagttgaatgtttcgaaaaataaaaaaacgataaggaaacgagtggagtcgaaaataaggaaacatagcacgtggatttgtgggccgaaaatcatggcgaaaaaaggaaacaacaagtaggctggtgggccgaaaatcacgggaaaatgtgaaaacagcacgtgggctggtgggctgatgcgcgaccatactgacgcgtgtgcggcagataagaatttcgcaagtaaacaccctagagagaagtatataaccaattgctccctaagctaggaatatatcctacgaagtagttttctattttacgagaaattcttgattcacaaacgtttcccagccacactcggtcaaatcctcttctcgtcggctccggcgtgcatgccagcggcggcggcggcggcgagaaacgctggcgaggaggcagcggcgagcgcttagatgctagcgaaccagcgaagagggcactgcagcagtggcggataggcggaggctagaagggagcagtacggccagagagctagggtttgggtaatttggcgagcgaggagcgaggggaggcgaagggagaagaggggggggggggggggggaggagaaagagcgggggagggatgagcatagtgcccaaagagacgattgaggtgatcgggcagagcgtcggcatcgccaacctccccgccgatgtctccgccgcgctcgcccccgacgtggagtaccgcctccgcgagatcatgcaggtccgtcccccccgcgctcccgaatctctcgcttcccttcggttttagtttcgtgcactttgggggactaggaggcaacttccaccattcccttcgtaggaaaattgcctgcccccccgaggcgtggatttgtagtttctgggtgatttgggaccgcagggagcaattgcttgctctttgttcttcgttctctcaattgattgctatgctcaaccattgtgctaagttgtgtggtggaatatttgcgatagacctattccaatgggttttgagtttgctggacgagatgcgtttccatcttgttgtttgaacatgctggttcacactgactgcttaactgtgtcctgctcaatatatgttcactgggtttttgtagcaatgcaatatattggacggtcttcatagcaatgcaatatattggacggtcttcatagcaatgcaatatattggacggaagatggttgttttttttgttcactattgtctcttcaaaagcattgaagcacaccattacagagtttctggactgttcaatcttctctcattcgattgcatgctatagcttactggtaacatatgttggggttttgttcctgttttatcaccattttttttaatttgtatatatttagtgaggtagtgagtctaagaatttgcgttctatccactatttacacgataaattcatcatttgaggttttctttactgaatcttggaaatatgttattcctatctgatctttactcataaattttggaaaactatcattgacaaactacagagttgtcacaaaaaatacaaatttaacactgcattaccagaaaaatacatatttgagccatatcacacaattatcgatttagcaccgattttatcatgaaactacaaattttacaggtttcatctatcgtgatgaacttttcataaattgtagttttctcataaagtccgtgctttatctgtagatctataatctcgttgcttaagttataaatttggtgttacatctgttgttttgcgataattttctggaagtatatgttgatctgcaaaatttgtatgtaagcatataaatattcagtcacagaaatgccattccattttctcctaggcactatatgtattttattatgctgtggattgtgacaggaggccatcaagtgtatgcggcatgcaaagaggacagtcctgactgccgatgatgttgatagtgctctcagcctcaggaatgttgaggtagtttctatttcgttgacaatattttttaggactactaaataaaggttttgtagatctagtaactgttgtatgcttgaatgcatcaaacttctgagttggatagctaaatagtcgagctcagtatttctcggaatcagctcattattaagctaaaagtataaatgtttaagaaacttagagttgacgatcttttcatggagacatgttagccataaataaggcaaactctatgcctgtatctgtttttggtatgtctgttccctgacatataaatgccattgcaatcatctcttgtttgaaaactgatactgcaattggtagaggcttttggtgtctgggtgtattcggtggtttcttcccctctcttcttctttaatacaaatatacaatccttctgttccatttgagaacacagctctcctgtgtgttcgagaaaacaaataatgtctttaaagcttgacatgtaattcctcaagggaacagctgaactgagcataggggagaaaccatatccttccattcagccccctatttctctgacacccactagttgtgaggttactgcagtccagtaggatgctgattttactttgcgtggaactgaatgagagaaagctgaataagtaggatgaagcccaatagtgtacgctgggtaagatgggggaaataatccatgtgaaaatacaaaataaaatatgagatatgtattcatgtcaaatggggtgtgctaagctaaatgcactttatgttagaatttgatgattatgttttttgtttcaaatcaaggactgagaactatgtattaaacattgccaatgtgtttatatgctgttgtatatgacttcgtatgtaaaagtttcctactttgcttacaagtaacataatgcccctttgccacgctcaatgttagaactgggaaaatgtgaaactgtttttcttttaatttcagattaagaactgagaagtatatattaaacattgccaatgtgtttatatgttttgtatgactccatatataggcgtttcctccttttttgagtaacataatgtcctttttggcactctcaatattatcactgggttggtttagcgtgctaggttggtttctttgatgttacttttgctacatattttcgttattttggttaaaatgttactgtagtggagtttaggtgggacatgattgccttcagtgtctaagacacaagctaaaaataatagcattgtattggatcataatctattaccacaaaaactgatgcatatgcagcaccgctggtaggaaatttgttgacattagtttttatggtggttctatgttatggtgaagttggcattaaaaagtattgtttcagtgcatttatttaattgctttgaattttcacacagcctgtatatggatttgcttccggtgaccccttgcggtttaagagagctgtgggacacaaggatctcttctatattgatgacagggaggtagacttcaaagaggtaggggctctactaatggatgaatcaaataacttttgtacttattttattatagggatcaatttgaaaattttcttattcattggctctgtgcagattattgaggcccctctacctaaagctcctcttgatacagcagttgtagctcactggctagccattgagggagtccagcctgcaattccagagaatcctcctgtagatggttagctcatatatcttatcttattttactctttaaaagagggagttggggggttatgctaggttctacacccacccccacgttgatcttttgtggctgtaaatatgtaggtatgtgttattcgtgagatttttatagaaaaatattgaatctttgaatatgagtatacgaggtggttagttggtgttcaattggaggatagttaattacctgttgcattttatattctagaactaacatttagttaggatatttggatccattccaacacaaataccttctagttatctgtatatggatttgcttccggtgaccccttgcggtttaagttatcttcacaaaacttacatcatattgttacctgctttatgtatacaatgttccttgggtgaggaagagattagttgtgggatctattaacagaccttagtgtgattaaatccgtgtttataatgttccttgcttgttcattatttgtagattttggtattatctgacaattagtgtttcacttcagctatcgtagcaccaacagagaataaaaggacagagcatgggaaagatgatggacttcctgttgacatcaagcttcctgttaagcatgtgttatctagagaactccaggtattgtggttactgtatattgttagagccttacataagatttatattcttctttactggtttcgtttgcagatgtattttgataaaatagcagagcttacaatgagtagatctgaaacctcagtttttagagaagcattagtgagcttatcaagagactcaggccttcatccgttggttccttacttttcctacttcatcgccgatgaggttgttatcttgctcttagagtctatattgtgcgagctggcattgccttacaatgtatatccttataatttcaggttacccggagtttaggtgatcttcctgttttatttgctctcatgcgtgtagtccaaagcctcctacacaatccccacattcatattgaaccatatgtaagtggttgatcagtcaactttgatgcttctactttctagttgttttgtttttagcattgcacacttatgtttgcagcatatttctgctaaagaaacaaaatttctcttgattgccagttgcatcagttgatgccgtcaattatcacctgcatggttgcgaaaaggcttgggcataggctttcagacaaccattgggagcttagagacttctctgctaatttggttggttcagtatgtcgaaggtgagtgaacacgaagagtactactcaaatacctatgcatcgcaatgggcttcaaatagacatataataagtaataaaaaatatgaaaaaggcgtatatatttcgtgaattaatcttgttacaagccatacaagcgaatgatcaaatagtccacagaatatgaaaatatcccactaactcaggatgttaccactactaggttcaaaaatatatatcataaattttaaatttttagaagttttaaagctgcatgcacaaggatctacttgtagagaaactcaactggagaaggacgagaagaaagacttgagtagcttcttttatcagatagtaatatgtgctatctaacctcattctactcagatccaagaatgttatcagaatctaatctgttcttgatggttacagtttctagacataatctttagaatcatttccacaccattatcatagttcttcatttcttctattccctccattctcttatacatgacatttgttatttcatttttggatgaatggtgtacggactctctgcactgacttctggatgaatgggaagtcaatagtggtttgacctccatttcctactgtgtcagttatttatttctaggataagtccattttatccccctcaattcttgcctttgtaacacacccccaaacttccaataccatacaatttacccgcttggaaattcggggggggggggggggggggttgcaaaatacctggttttgaagttcagtggtgtgttttagacaaaggcaagtagaatggacttatccctttatttcttggcgagacaagaacaattaccatcagttatggaaccgtttcctcacttgcataattctactaataaatagaatgttaggtagtatttgttttatgttacattgatttttgcatttttctaggccatgtagactaaaagctccacgctttatctcgatgcatatatttagttggcggtgactttgtctcatgtgaagtccccttagagaaacgataggggagaaccccacttagaaatatagcatacagtagataataaagcacaaaaaatttcaagacccaacaagaacaaggtctacaagatcataaaagctaggaaactggacactggagagtgttaatacagatggaaactaataaccaaacatatttccatgtggggcaggaacttgcttgaggcttattccttacggatttactatgtgtgatagcacctcttcttagatttatgtttagttggaggagctttgtcacaattactaggggtgggcgttcggtttcctcggtttaattggatcgggtttttcgggttgcttggaattcggttttcgtaaaatgtaaaccgaaggaagttctagaaaaatatcaaccgagcaaaataaaccgaagaagatcggttcggttttttcggggttcagtttttaccgagaaagatctatgccacagaccgcggttgacttcacgcgagtacgcacggcctgcccagctttgcccgagggcgtgtgcttgatttggagagggaacaggatttgtggatctattagctgtcatgtatttgagtgcttatgttaacacacttctgttatgaagtccctgcgaatggttgaacattacttaagttgctctgtggctagaggttaattggtttctgctgcttgtgctgattgattgccttttgatgttgctttcattgaaatacaaacatttctttttgtaggtttggtcatgcgtatcacaacatccaaacccgggtgacaaggacgttggtccagggatttcttgatcctcagaaatcattgacacaacactatggtgcgattcaagggatatctgcattggggcccagtgcagtaagtcctgttcaagctaatctaattttatatttcagcaaaattttgctcacaatttttgttctttaccagattaggcttctgcttttgcccaacctcgagacatacatgcagcttttagagccggaattacaacttgataagcagaaaaatgagatgaaaagaaaggaagcatggcgtgtttatggtgccctgctggttagattacaagctttcaatgaatacatgttatctatttttatgcaccagcttcttacctgtggaatgtatttttcagtgtgctgcaggaaaatgcttatatgatcggctcaagttgtttcctaatttgctttctccatcaacacggcctcttttgaggagtaataagagagtcgtgactaacaacccaagtaagttggtacttctatataatatatgtgttgctacttgcttggcaacgcacaacaaataaaaatggttattttatcggctgaacaatttcttctcagatacataatactgcaaaatgttgaaattattaaggtgtgaaagtaaggctatggtcaattcaaatttcagataaacggaagtctagtacagatctctccacatcccagccacctctgaagaagatgacaacagatggtgcgatgaattctatgacttcagctcccatgccaggaaccatggatggcttctccacccaattacccaaccctagcatgacgcaaacttcatcctctgggcaattggtggaaagcaccgcatcaggtgtgattcggagggatcagggaagcaaccacacgcaaagagtttccacagtgctgaggctagcctggaaggaggaccaaaatgctgggcatctgttgagttcattgtacgaggtattcggtgaagccatcttctcctttgttcaaccaccagagatatcgttctttttgtaggaagcaaatgcatagtgttcagagctatgtaatatgcattgtaccattaggctggtcttgtggaattcttgaaactgaaattgacgtctaggaatcttgtagtgatctctgatgctagatttaatcgcttggtgacttgctgctgcaatattttatgtgctgatttcttgaagttttatgtttattgtagtaattttatctaatgtaaacattttattacgctctactggtgcgccattttatggcatatgtacatttttgaaccttactgattaagcagagttgtcgttgacatgtgctaatgccaatgtattatttgcgttgatgaaggttgcataaaacgagagaaaaaaatcacccatatgagacttacctttttttaaatactttttaattttcagggtttagctaggtcacatacacaactcatgatatttttttttcctacataagttagcagctgcagaaccgaacaaaacaatagggatgcagagtgggagcagcaacagctgcagaggccttctctgtgttttgacatttttaacaacagtctgttgaacatttaaactttgttgtgaatttatttttttagcctttaactaaaagaactatacctttttacttccaagttttctttttttaggtaagacctcacaaaaataactaccgaatatagctatcaaaattacattcttcctttaaaatatggttgatgtaggccaatggaactgacagccaattcgatgtttcgcccatcacgcatccttccttgcctatcaagtgagcagctttatatgctgatcgtcacaccaattggaccttcatttcccggaacgattttaacctgctatcgaggttttggattattgtcccatacatagaacagtttactccaacctgtgttagcatccccaccacctccaaattatctattttaattatcactctatccaccccttctccatagtcagttctgtggcttgcctacatgccaacacttccgtctgtggcatttgctacctgtgaataaaaactagttgttgcagccacaaaattcccaaagcattcctcatgtccacccctgatgctcccttatgtttatttgatgaaaatgcaccatccgcattcagtggcggaggacggaaaaaaaattaggtgtggcggtgtggcccatgatcttctgcttaagatgcacaactagtgcccgggtttcagtaactcttcaaatctgcaaaatacattacacaaatgcaattttagtatcaaatttgtatacttcaaacccacaaaaatattctgaaattgttaacatttgaagaatatgtacatctttgtgaagccaatgcttttccttttctctttctatccattttttggttgataagttgattgcttggctagttggctgcttgcctgcttctgcctgactgcttgccttcttcctgctggctgctgcggtgctgcctgccgcctgccttgcctcctgctgccgcggtgttgcctgcctgcctggccgccggcccgccgcgccgctgccctgcgcagccgtgccgccgcgcgctgcctcgcgtcgccggctcgccgcgccgccgcagcgccggcgctcgccctgtcggccgtcgcccgcagcgccgcctctcgcctgctctgccgatgaggatggatcggggattggggattagagaaatttgggttagggtttcatggtaaagagcctaatttacacaagaaaacaagccgcacacggctttggcatctcgaaggtcgcagcgttgttcagcctgcgctctatcgccgtctcgcggtcgtcgcggtctctgcgtctcgcactctgcagacctgaactcccgggggtaggcgggaggagaaggtatggcgagcgccatacctcgccctaccgagccctccgcccctgtccgcatttacccatttggtggcttcgtccacccctgtgccggacttggaatggtgaggttcttctgctccctcaggttcgcccactcttccagctggaacaacaccctttccgccacagttgagggatggtccggagttttaatactccagcacataatggttccgggttacttcctccatcccaaaatgtaagcatttttgaggctggcacgggtattaagaaagtaggtgagaataattgaagaaggtgtgtgattggttgaaaagagaatgtaggtgaaaaagaatggttgtgattggttgagaggagaaggtaggtagaaaaatagcttcattttgggacaaagtactgtgctaaaaatagctacattttgggacggaggtagtaactagcagtctccacccctgacgagccagcagagcttgattgaaatcatgtaaatcccgaaatcccgatccaccatttctcttcgttcgacacgtacgttgccattctatccagtgcgtcttcctttgtcctttctttgcaccccaccaaaaatctgagatcattgaatgtaagtccgtatctgagaacataggcctttggagatctgaaacacactcagagtacttcctcagtccaaaaaaagtcaacgaatcttgacaacgaatcttgacatactctatgtccagattcgttgtagtacgaggttggtttttttacagagaaaggacgtcggtatcgtcaatagtacaaattttatcaaattctccttccctgacttcgacaaaccctgccacttaagagtcgaaattttctcccacatcttttacttgatgttcttaaaagcaccttcttttgatctaccaaccagtgttggcagtccaagatatttatgatatttttagaatttgacaaaaccacatgtgggatatttttttaatagaagtacttgactactaccataaaggaatactccctgagttccaaaatataagggattttgatcggatgggacatatcctagtactacatatctggactgtccaaattctcccattcgatcaaaatcccttatattttggcacaaagggagtagtttactgtgttacgtgtgttttaaaaactgaagaaaaataacatatttgctaaatgacatttgacaaaaaaagaatcaatgcaaatcttactattttgtgagcttcatacatactccacaatttgtatgccatgacctccttctctagtctaacattatcatttggagggtgggcatctccagcgagtggttaggtgacaatggacagtggcagtagatttgacggctggagttggcggagacaagagagaatgacagtgtgggagaatcttcccagagttggagaagaagaggccggaaaagaaagtggcaatagatagaggacagcacatcgtccggctcattctaggcataagtggacatggcacggagcagtcaacgattgcctctgaaattgaggcaggaggcttggtgggaggtagataggaactagggttgattgtaggttggaaagagaagtatgtggattgtgggatctcaatctaatataggaaaaaatttgactaatatggaatggggatttcacgcaaaaataataatgtagaatcgatgaccattgaccaattctgtagttaaatacgaaagggatttgaaataaagttttaagggccaaaaaatgaactttgttaatataaatcaccaatgattttgaaatattttcatgaaaaatgatttttgaaataattatttctaaaatgttagcacttgatatatttgattttccttaaaaatttaatttcaaaaatttattagatttgtgtaattattccacataaaattgtgataaaaattcacctcaaaaactgtgaaaaaagacataatttcttactttgaaggcatttattctgaagttttatgtaatttactcaaagataaagtgatatccgtttaggagtgtctatttcactacctaatacatttgttggcaggggcggatccagcatgagggcggcggggtctcgagctcccaatactgccgtgaagactatgagagaacccacgaagagcccactaaatttttttaccataggtagataggaggagggactgcaactctatctagctagtttgctcagaccccactgctatttctttctagatccgtcactgtttgttagttgcacaaatcttcaacataaggaaccttgtttagtgatatagaatccggatggttttaaacaaaagtaggggttttagaatgcaatatagctcaggctcgtcttggctcgcatagtcgcatgccaaatgagccgaagtcgctagcagctcagtggctcactctggcgcttttctttaaaactcatgaactttattgaagattagattaaaagcatattacatgagcgatgattacatctcccaaagggagtgttgaaaggattcccaaaatgggactgcttggaggataataagcatgtatgtctattgttatgacaattcagatcagtttaaagttggctttgagatttctagccttttttgcaaggctatcagcgtgcttgtttgcttctcttggaatccatttgataatgatttgtgttgagttttactggaagtatagtcatcctgttgcaaagtttgaacaatgatcccgcaatcggaaaggaataccgtggttcccatagaaagtgcagagcatatctgataggccatgattattcctacaagttcagcaagcaaagacgaaatatagtttttggaatatgcttttatcagataaaaaattccaaatcatgcttcattgtccttccaatatgtgtaaacatagcaacgggtacctgtaggtaagggctgaacagaatgtataagtgtttggtcttgattgattacctgttgctcttgttgtcggttttgcataatgtgttcataagtttttgccatagcttctgctgcgttacagacctaaaaaagcttacaagtttttgaattgaaaatatggtcatttctagctttctagattttccatagtaaaactgaaatttttaaaagaggtttggcattagtgaagttgctactacctccatcccaaaatatagcaatttttggccatgaatctgaacatatagccagaaatacttatattttgggacgaagggaatagaagataagacaatgtctcaaatagcgtgtaaatggttaagggcatctgctttgagttgaaaatcatagatgaaccaaataagcctgctgaaataataatgaaaacgcagttggaagttttcggacataggagcttacacgagtaagtttacttaccgcacctatttcactaggtcaataaaatttgagagaatcccttatataccactctaaattaaccggctcccttatatgccacttcaaatcggcttctcccttttatgccaccggttcaagtttctcctcccttttatgccattgccgtcagtccacagtcagttgaccgttaacttcattgtaaaaagacgcatttgccctttagaattagtatgcaaccaataataggtattttagtactaatatagctaccagatacaacatatgaaaattgattttttctgcatcacattcaattttagccattaccatcacaaataaattttcaatgtaagcatgaaacatgcagttttccaacaatatttttaatataaagagcatttttcactggttctgacaaaattttgttcactaaaaaaggatttaaaataaattagttatgatttttttgaagtttacacttttttagttgagagggcatattggccatttacggaaaaaaactaacctttgactaatagtcaactgtgggagtcgcttaaaagggtgaaaaaacttgaattagtggcatataagggagaagccaattttgagtggcatataaggaaactggtcaaattctagtggcatataagggattctctcataaaatttgccctacggaagagaacatacatgatttgggcggcccttaaatgtaagttcttttttattggtagtgaataaccgatgttagacatcggatcgccttgagaagtttgggatgtcacacccggatgtttgccatctttgtgatcaacaggaggagacagtacctacgttacccagatacggggatacggatacggatacgcgatacgtcgatacggggatacgcttatatatatatacatatatacatatatatatatatatatacatatatacatatatacatatatatacatatatatatatatatatatacatatatacatatatacatatatatacatatatatatatacatatacatatatattaaaaacacacaaaaaattaaggaaattgtatttatatatattaaaaatacaaaaaaatcaaggaacttttgtaaagaaatagtgatataatactagtattagtgtagccgattccatatcaatattctgcaattttctcttctataggcaattcaaattaagaagcgattaagatccccaaaaccaaagattaatagttcaatcatatatttcttgatgactttgcatcaacattaacagccgcactaaccagtaaccactaggattgctagatgcactaccacttgtaactaacaaaaacggtagtactttgtcctaaggaaaacaagaaaggcgcagcagattcaagcatgaaacttttgaagagaatggattacccggccaggcggtcaagcgaagaaagaaaaagttctgctgtcgaggttggcggcgaaagaggtgcgccgccgcccagcagcggcggctctgtcgtctcgcggaggggacgttgtggccccatgcacggcagcgacgcgcgcggctgcagccggcgtccggcggcaacgccgggcatgcacgagagacatcagccatcaagttgggccaaagctcgtgcggtggcgcatcccagatgcgagcgaagacagaggaaggtcgtgggcgtatcgctggcgtatcttgatttatttatttttttgcaaatcacaaatatgtgggatacgtacgggatacgtattggagcgtatccgatacgtatccgtatccgttgccgtatccgacacggatacgtgactatacaagcatatcagggtaacccacaacacatccttgtgtcttacatccgtcccataatcattgtatttctaggattctctaacttcctcaaggcgattctctaactgatgatcccaagtggtcagaggtgtttctaagaaagctaagaaatggctaaactctctaattatcttagtggcttggaaaatttggaaacactgaatgattgtgtctttaacaatgccacacctagtactgctgccgtattggatgctgtgccaagagagtttattatggtgtactgctagagcctattcattaactcttggtccggtcactccccatgtaggagcttagctcctaatggagttgttgcgcatcgcttcggtgaagccctttatcttttttttagagtgttcttattgaagttgttggtcatatgggtccggggtacccatgctgaggggaaaaagtcctttcccccagccacgtggccgagcggcccggatcccccctcagggggtcagacgcgtgggtaataaatagccaagaggcgcccgagtccgcctagggggctcggggtatcctgtcgcaccccgaggccctcactcggttgccacgtggcggtcgagtgggcggagataggggcgttgccaggcgtatttacgggcggcgccccaaccgccccccgtcgcatttaatgcggtgtggctggtcgtgcgccgcccagtgattgacgtgcatcaatttccttgaccgggctctgaccggccaccggcagatgggacaggcggcatcgcacccacgtcctaccctgtgtcaggcggcgtggggcaaggtatgccccgtctcatcaacggcagaggatcgatgttcgaccggtgcatcccatgcgcatgtacccacaaaagtctacaggaatttatgaaggaatgacagggatgtcccccgtgtcaggcgaaggacgacgctggggcccacctgaggacgagcggccaccttactttcggcctaaggcatgggcggtagctcgacccaggttgatgtgggcccctctctaggaaggagatgtgtagaggcggtgcatgtggtatccccttgaactataaaagaaggaccttgcccaccgagcaagagggtgactattgggagcttgagccttaggagaagactagccaaccgtctctcttgggtttgagatctcttgtaatagcgtaaacagaaatccacacaaaggagtagggtattacgcttcccagcggcccgaacctggataatctctcgtcgtcctcttgatcgccatccaccacgctagcctaatccacggcgaggttacgctcttgatcatcgtgccctatcccctggccgaactcacaaagaggggtctcacgtcctcccgctctttgttgtacaaactttctattctcttctaagaaataaaacaatgagcaatattttttgggtcagttgtaacctgtccattcatgggggttcctaacgcgcgcgtatgcgccgcgagcataagtcatgcacacccgctgacgcgtacgctgtgccccgtcgctaaccatgtgattagcactaatgatgatgtgattagtgattagtgctaatcataattagtgcctacaagaactttttattttttctaatagattgaaaactttaagttagatttgaaaactttcgacttaagatttaaactttgaagtcaaattttgaaatctttcaactcaaatattgaaaattttcaactcaaatttaaatttgcaatataaaatttgaaaactttcaactcgagatttggaaacttacaactcgagatttgaaaactttcaactcaaatttgaaactttcagctcgagatttgaaaactttcaactcagattttttgaattataaaaagtattttccattaaaaatatcttacttcctccgttttatattataagattttctaacattgcccacatttatatatatgttaatgaatctagacatatatatatatatatatatatatatatgaatgtggacaatgctagaaagtcttataacctgaaacagagatagtataatagaaatttttaactttcactacatcctaaattaattaagatgaaaacattaaaataaaagattatgcatgcatgcgtgtgtagggacatgcatgtgtgggaccaaggtggatgcgcagttgatctgccgtgtgcatgcgagataagcatatggcgcatctgcgcgaattagcaaaaccgccattgatgaggatacttcaaatattttttctccctttcctatttagaactgcttgttgaaaaaaaaaggtgtttctatctaaaatctcgcacggttgcacccaatatttctgcgggccagccacacgcagtcacgcacgcatcgccgcatcagtaaacgagctggtctgctatgttagccgagccaaagccaggctcggctcggctctccgcagagcagatgacgatatgagctactagcagcagcagcatccaacgacagaaagggaagagattttcccttatcctcttgatggagctcctcctgcgtccctcccctccgccgccgtgggcgattccacggcggagctctggcgagagaaccaaaccctgccgctcccgctcccgctcccgcacgggaacctctagtgcgtgcccatttccttctccctttccgtttcttggaagcatttcttggatgatctttcgagctgtttattgcgatgcgagctcgtaggaatttgctggattactttgaacatgtatgtatttgtgtgagcatctttgttgaaaattgagggtactttgtttttttttctgagcttttgcttgccactttttcctacgacaaacatgctggttccgtttctattttggtaacatttatttttcaactgaaataagataataaatccttcacaatttggagttctaccattcaaggtttgttttgtggaattataggtgcaggaagcttacctgagttagcccatatataattttttatgcttaacacaacaagctaacttgtcaaataggaaatgccaatttatgtgtttcaccctactttggttgattctctgataatgctaagctaactttgttgcagtggtttgaatacataagctgcggagctttcttgctttcttgtttttcttgcttgcaatattagtacacatggtaaacaggaacccaagttcacagttcatgtagttgggattgatcatagaattcactgtagcgaattttatatgattgataatggagtggccgcctggccggtggacactcatgttgcgccgtataaatatcaaatagaaacttacacattctgaagagcgaacaattgttttgaatctttctgacatgtgctaccacttgttttgcagagcaaacatttcctgtccctttactggttggcaaggttggaagacgtccgtttcctgtgcagtgttctatagttcgatgctgcttgtcatcaactgatgccatccattctacaagtgatgacatccatgaagataatggacacggccattttcttatgaagtctacatctgaccttcaggtatgatggtgagtcccatgatatatatatatttttatcctgttatgtttcacctgattcttaattatataatgctgtaaaatacccctttattcatttgcattatttttcttaaaatagtattgtatcatctcgatttttagtacaagtcaatctttactccttgggctaatgtttactgataacatcaaaacatcttttttcttttcagaaagtgatatcttcctgttttgggaaagcatgtcttctcagttctgtcatgcttgttctaccacccagttgtttcgcagaaccgtgtgagccagagtactctctacctaacatgcctttgctttttgcaattgccatgattggagctaccgttggaggtaagatcattacaatatgaagtacagaaatgatggaggcatgtagaaacatgttgtggatagcaaactggatataacattcagccttccagtacacaattttcttatatatctacggcatgatacttattgtgcagaatggtttgaagaagattaaggtaatagaagagagtgagagacaaattggaatgagagaattagaagtattgagatatagcaaattgaagaagagaaatagttattatttcttaaccatcatccttgtattgaggatgttgctatgaacacatagaccatatctccaaatatccattactcaagtctccctgaaggttgttttggcctcttgttagtccctcccatccagccatggtgtcctaaccctcctttttattgtgtttatccccataagtccactgtggtgcgtacaatcctttcactttttgaaaaacacatacctggtacaccaaatgtacattaatgaaaatttcaataaaataattccaaaggagttcatatgtacagtacacaactaaaagctaatactttcaaattaactgttcatatttgattggttgattggttaatatttaaagtacaggcatacccactttacctaatgtttgacatgtaatcccgtatagtacacagaatagaccgattcatatggttatcatttacacacatcctaagttccaaacatccaatcttgttttgtttcttcaatatattgttatttacaattgtaaaaaaaaagcagtaaataacacaactctaggcttgaggcatttcacgacccttagagaaatattaataagtgcatgtgctgagaatgtgaattgtcgctcacaatgtgggcatatgctaaaaaaaagagtttaatcctattttttaataaaattgcaaaatatgcattatagatgcctcaaagcctcaaaacccagagttttgtgaatttgactgtaaaaaatatcatctatctgtgtgtattctagatgtcttgcctcatatatctttttagcttattgttgcttttattcatttctgatccagtaccagttataaagtcttaaactggaagtgtgatatcatcagattattcaattcgcatgtttccatttatctatgcaactatgtgggccagtatagttggtacatcatactacttcatcctctttaagttggttttactatttcttaatatgttgaaaaatttagatatcctgtagggctccttgcaagacaacggagaggggagcttaaacgattgaatgatcagctacgtcagataaatgcagcactgagaagacaagccaagattgaatcttatgctccttctttgagctatgcaccggttggtagtaagatacctgaatcagaagtcattgttgatccccagaaggatcgcttaatttcatatctgagggctgggaagaactatctgagaaaccaagcccctgataaggcatttcctgagtttaaggctgcttttgatcttgcacaatccttgggtgatcacgtcgaagagaagaaggcggcacgtggattaggtttgcttcccatcaataatttactttcatgcctttttccatgcacgtttgaaactggatgttataatagccaccttgattgttgtagaatcccctatagattgctttttttatgaatgaacgtttttgaaatgctcgataatgagacacatgttcatatttatgctgattcctgaaggatcttttttccatgttcaataaaaattcaagaaatgcgacctgcaaaaatgaaaacagcaaacaatctactgatgttcgttttttatttgcattctttaggagcatctttgcagagacaaggcaagtacaaggaagctataaagtaccactccatggtgttgaacatctctaagctgaccggagaggacgcaggtgttacagaagcctacggtgcgatcgccgactgctacactgagcttggtgagctcgagaaagcaggcaagttctacgacaagtacatcgcaagactggagaatgactgaacagatttaaagaaccgtgtgtgcaacctttgagagctcaagtagggctgtgtcccatcttttgccttctttggcctgtcttgtagcaacgtttttgtagtggacgctcagttcatggctgtaactgaggcacatgccatctttcaagttatttctactaaatagtgtcatcagattttttttttctttgtctggtcaagatcggcaccatgttgtgtaaaatttctccatctgttccaagttataagcatggctatgtatctggctatgcttgtcctgaatcaggaatgcttatgttttgaaacagaggggagtagttgtagcagcaggaaggcttgttcttaaccttgttttagataaaaggtttgcaaaaaataatagctttaattgttttagataaaatattcgcttgagattttggggagtgacggatgacaccgttacctatgttatgcagttttttccccctaaaaaatggttataggttttctgtgagtttgaaataattggcctagccaatcatcctttcagcgatacaaattcatcgttctggaaaataataggttatatagctgctagtttatgtcccactaaggatgcttggatttgatatgattttgcccggaaattcttgagcaattcaatcacaatactacatggagattttccaacattgcaacgtcaaacactacatatgaagtcacctaaccgaatttggtttagtataagttataaccaaggacgcatatactgtgcacgccagagaaacttggaggtcaaagatatcttcttatctgttgaatgaacatgtacgcatgtgcatactctaaataaatacggactaaataacacaccttcgtagaaattttgccatcaagggtaaatatttcttgagttcacaaacccacatgacgctttaagtgggccaagggaccattttagactaaaagataaacttaaaaaggaatcttttgaataaaattaaaacatgaagggtgccaatctacagaagggctccctccctacaagtttcaagttggtccaggacatttcagtttttcatcagtaactcagccaaagcctgttaacattccattcaaaatgctgcaaactcagccaaagtcgctccctatacacgaaacttcagggggaaaaaatcaggcaggattgttagagctgaaatatcacaaaaattcgaaaccatatggattacccacttgcccaacaaccagcatactggaatctgggcattcgtcagtctagggtcacagtgtacactacattagtaagctaggatcttgctcattttcttggagggtgagatttctattcctgtacaagtgatccactttagtattcatcaaatggaacgcagaaataacatggcagcagatctctcagaaggaaaaaaaaaaagcaagcgctgcatcagccgtcaatgacattcaaaacggtgatcaggtaaactgaagtgtggtcagctacgaggccaacccccaccagaagagcctagctgtcggtacgggtattgtggaacccctcgtgcactgtagtttgtatcctctaaaggtggagcatacttgtccataaccgagcttccagatgcacttggaaccagggcgtacatgtccataactgagcttctttgtgcacttggagccaagaatccaggagcatacttgtccataatgctatatggtgtactcgtaccggggagtccatatgaagatgtttgctgaccatatgtagcacctgaagatccaagggagtattgacttgtctgtaagtaaccatcagcatgtccaacatgcgttcttggatgtgcctgctcatgcaatgttgatgggaccctactggtttgtagataattatcatcaccaacttgtcgactgtaccttgtggggtgtccatgcaaaggtgcatcaccagttgtgctctcaagagaattagtgttcctgtcttctgagcgctgcgtcctataaaacctgtcactatctcttagagattgcaaactgtacacgttgccagttggggcagtgaaatgctgcctgttcacttcgaagtcagtaccagggctgaacttcctggagatatcatcgatattggtatgaaatggaggatcaatcttcccttcaaatgcattgttgcattcattattgcttgctaaatatctgccctgataagtagcctgcttagagacaagatgttcttttggaggataactaataaaactatctcgacctgtactcttatcagcagggtgtccaattggaataaaaggggaaccgcttctggatttgttttgagcattactggagtcagaggatgacatgctcatgtcagagttcgcttgttctgtgaatttggcacccataatctctgatcctctatgagcatttaatctgtctcctgcatctagttgtttttcttggtgagtactcttcttgataggaatagccattctttcctcataagcaacttccacttgtttttctggagggaggctcccatcaacctgatcaggggttcttttcctgctcctgttatgagtgctattgctttcatccatgctatgctctttctcctttcctgattgagagatttgctggtaattagtctcagcttgtttcttcacaggaaggctatcggatctatggtactctttagctttcacttgtccatatccagcttgtgtcttcacaggacgatcatctgatagaataacctctctgacatcgcatgatgtcttctctgtagtctctttctctttgcctggtccaacatttcgtttgttgccagcttcagcctgtctcctcacagggagatctgatagattggtccctttgagattgcatgaagtttgtcctgcattctcctctttccctgatctagagttatgtataccataagattcagtttctttcatcatagggaggttatctgatagattatcttcttcaacatgggaagcgatcctccctatgctagtgtggttatgctcctcagctactttcctgtgcttccttgtccaatcaggatggctccataaatggagaggtggtgcagaggcattccacccttcaactactttatcattaacatcaacagaaccaggcaaataaaatgcctaaattacaagaaaaatgttaggaagaacgggtatatgataaaaaggggaagtttaaacttcaataaattttcctgacggtctttacctttcccgaaagacaatcactatcctcccaaatcaaatcataaggtgtcttcttttgatccaacctgatggccaaagagtggagacagatatggaagtaaggaacatacgttacaccaaaataagtgatattatgtcattatgtgaaagcaatatcaggtgaaatctattttttttaaaaaaaacatagttaaaatccaatcagccccaatttggcccaggcgatcagatgcttcacattaaatactttagatcttcacctgatattttgccatgtgttagtaagacaagttcaactcaattttctaaggaatgggtacgtgttggttacctttttgtttcctttgggacaatcaatataacgagcttaggcttaaaggtcaatgccttgtcaataaatttgttcgcaagagatgctttgactccaaaaggaggattaagccccattatctaatcaagaagcaatcagatgttataattattttaaattagcaaatttgagttaaataatgtccaaattaaacatactagtttggatccatgaggcaattcttttggccgtacagtcatccaatctttcctttcgaaggcgaagcaattctgcaaaacacatacacaatgcatgcttatcagaatgtgcatgatgacctgttaaatgctaatagacttcactttctggctatgataatagagtttggaactggctgagttctaacgcatttgcattgaggagttctatttaatataaaagaaagcaatggcattccaaaggatcataaaactcagattttttttccccagaaggaaaattgaatgaaaaatgattgatggcctccattttacctgcggctggataagatcataattcttgaaatgacacttcttctggactttgtcaagtttttctttcatcaatcggctgaaatcatttgcaccacagcagaagtccactatctacagttaattaaatttaaaatgatcaaggactggtgtaaaacacagcattggactagtaatgttatatatctgtttcagtcaagggataatttttttttaattagaacaatattttcagaccaaagaccatatggtccagcttctattaaaagctgcaaggaacaagtttcttttgcacgggacaccagcttacagtggcaggctgaaagcacagggacctatttggggacaaccatccatacaccattcgaaagacccaacagaagaactcagagataacccagctcgatttttatgagaacagtaaaggtgagccatactcaaatatttatatcaatataaaggtgtacaattatcatatgataccagatacaaacgtatcaaaattgaatattgatatggataaaagctctaatcattccttaaagagcaccaactaagataacctgccaaattagacagatcactactactatagaagtgcaggcactactggtagcttattaggccacagccattttattgtattacactcatcatatggaggatgtaatctaccaatgaataaacatgtgattcttgtactaaaaaatacataccgtgtcaccaggttccacgtagcaatgaagcttatcaacaatctataccaagaaacaagaaaagtaaagttacaactatattacccaatcaagagaaataacacataaacaagaaaattacataaaccacatgctaaaggttatgttagcagaacaccgcagatttattggctaatggcactcatccccaaggtattgcattcggttggttttactatggatcaatgaacgttgtcaacaaatttgtccctgcctccaacaaaatcctact

SEQ ID NO: 9584 - DNA, 20572 bp, Oryza sativa
gttagggtttcgtctattcgttgccttcctcgccggattagcgcgtccagggagggtgagcggggtgtgcttggtcgcgtcgcgtcgtgccgtgccgtgccgcgcgtgggatgatgggcaccgccgtggagctcggccggaggcacggcggcgaccaccgcttctacgacgcatccagggtccggcgagggtaccaccaccacgggctccccaaggcgaggtgggcccccgccgtccaccaggagaaggcggccgaggagccgtccccgtcgccggcgagggcgccggtcccgccccccggcgtcgcgggcaaccttgagcggttcgtggccgccgtgacgccgttcgtgcctgctcagttcccctccaaggttcgccctgccctttgacttcctcgcgtggtagggttagatcgtagtaattacttgcggcagtgcgaccatttctgaatcggcggtggatttgggatgcagatgcagagagccgcgagggggtggcggggctgcggcgtggatgccgagcgggaggaggccccgcacttcttcctcagagacgtgtgggaggcgtacagggagtggagtgcgtacggtgccggtgtgccgcttgtcctcgatggctgcgacggggtcgtgcagtattacgtgccgtacttgtccgccatccagctctatggagaccccgcagtcctgagactggcttctggccctagggaattgtgatttcttctaatcatgctcaggcacgctattgatctgatttggaagtataatcctgaaacccacttgacttttattataattaatatatggtgtgcattgttacatttacaaaagagcaacgatcatttctaatatgtgtttttgtagaacaatgtttcatacatttctagttgccagtaatacctgactgtttgctgtcacacatgtcgttaggaagcacttatcgggttaatgatcccatggtagtgaatgtttacctcatgaagctattagttgtccatttgcataaaatggatggcccagagaattttagcatgaaattccacacttgttttattctggcgtcttgtgtttaccaaaacaatcaggaggttttaatccggtgcagtgtgttctatgacattccaactttacaatttgtagtgattgtatagactcgaaggtagtgaagttcaatcagatgtgacttaatcgtgagatgttgtcgttatgattctggatttggaatgatatataataatattatttctcattgtcaaaactagcttgtgatgttgtgacagatcaatgtttgcaactttaacttgtgcatgggaacgaccttaaccatttcgttaaagtttcatacgtccatacattccatccttttatgttcgtttcctttttgttcattaaacctttaacgtgacattaatattgtgtttgtagagaaatttccccaaaacacaatttagcctctccattgatcttgtctttgaacagtatttgttatgttcatttagattagcagttcactaaaatgattgtgtttgaattccataatgccatgaaaaataatgagcttcggttacttcttaatgtgcgttatagctctagttgctcatgattttttacatattcccacatgcatcatgcaggcaagcttttgcttccctttactaatttattaactatcattatgtttctaacgaattctagtatgaggtgttatagaaaccacttagtctgttcagtaagatataactttaagatataacttggtccacttgatttgtgcaatatctaattttgtggttatgtttggatgaaaattttgaagcagacatataatggatgacagtgatggggagtatcatgattccagcagtgatgcaagtagtgattatgaacttggaagagtaaaacatctaactcaggaaggcttctcaagtgatgatggtgaatcaggagatttgcatggccgcttgctctttcaataccttgagtttgattctccattttgtcgtgaaccattgactgataaggcaagagttaactaagacggttctataatattctattgcatataaatattctgaccttatttgttctttcagatttccagtctttcagcaagatttccaggactgaggacccttagaagctgtgatttatcaccgcgaagttggatatctgttgcttggtgagttctttttccattggcatggtagcagactagcagttatagagtatggtagtaactagttactgagttgcctacaacatcatgcaggtatccaatttaccgtatccctactggcccaacattaaaagatttggatgcatgctttctcaccttccatcggctatcaactgggccagaagaaggtatgatcgttctgatttccaaaacaaacagatatgcttccacctgtctgctgttctttcattcggttatcttctgtagtctgatttagcacacgtctagggggcacaaatgtttttgaaatacaataaagttgtacaacaacttaagtatgtgttatgtcttctgtgtacctgctctgtgttggctcgagaatatgagctcaaaaggcctttccgatagtattttttatttgtttagtttgaaatgatcaaatgcatgcaattgacaatctctttttcctggtgctgatgtttagaaggatttaacaactgccagttgcatccaaaatctatttagaaaagattggcatagttagggagcacatgttctataattctgagatatcatttcagtgatagttctgtttttactgcttggcgcattactcctgcatgcggattctgccacatttaaagataaaaaatactttcataaaactgaagaaattaatgaatgacagttggtcgttggcacttattttattttgttagtttgattcttttttatctaattctgtggctgcacgctgcttgtttaaacactatggaatcacttattgcttgcttgtgttgtgatctcaagtttttatgctctcttggccagataacggtggtgctgtaaaatactggggtcctggtagcaaaccgactataccactatctgtttttggtatggcttcttacaagttcagcaattcaatatggtcttcgactgatggagatcggcagctggcaagcttcttgcagcaagctgcttctgactggctgcgggatagtcgtaccagccatccagactaccagttttttgcttcccgtggtgcatacaacaggtagtggcacggagtctacgccttggcagaatttgcagcagaatgtctggaaggtttcagctgtaaatacaccgaagggggaggtgaatggctgatagctttcacacatgcatgcggagagacggtgtgagctcccatagtaggatgcaagcagtgttctgctttgtaaatggcggtaataggggagggtttgatcggctgtgtttttatgcttaatagtcggtgatcctcctgagggaagttgagatgaaaagtgaaaaaaaaagcaaaaaaggactgaagaaaaaggcagtaaaaagattagctgtgcttgtttgttgagctatgcatgcatgtcgggttgttggacttgttgaggctacttatgtaatcctacgaatacgggggatgagttttgatgatattccccttaatgtctgtaaacacttgtgaagagcctgtctgacactacagactgttgtgtttgaagggaacttgtagttagcaaattagagtcatccgcatcgtttgttctatagaatataatgttgatactaatcatgtctagacttgcaatgcacaaattaagagctgctgatgcgtgtaaacagtctgatgttcattagtcaaattaccttaaaaatgccggtgtccaaacttctcttacaagtgcatcagctctgttagtaaatactcccgttctttaatataaggattttaatattttgttctttaatataaggattttgatactttgtttgcactgtttgatcatttgtcaaattaaaaaaaaagaaatcattatttattttatttatgatttacttattatctaaagtactttaagcataattttttgttttttatatttgcataaatttttttaataagacgagtagtcaagtaaaatatcaaattcttccccttattctttaaaaaaactaatagaaagcttaggaaagtttaagcaaagaagtagacagttttcttttaagtaaattgcattggtcatacataaacttggtatatacgtgtaatttaatatacaaatttataaaatagtcgtttcagtacacttacttgtttagttcttgcgaatgagaatcaaaataacctggcaatattaatttatgttaattttatgaagctgatgttgattaggaatgtgacgtgcatacgtgtataaaacatgtaatatttataaatctggtctctagtgaatttcatatatttttaacccttatatcattgctcggttttttttaaccttttttaactatcactatatcctattctatttttttttatgaaaatgtgtatatctaatatcaaccttatcaaatttatgtttacatagtatcctagtcaacccctaagtcaataagattagccatgtagtgtccttttcgcttttcttcacacgcaccggataagttcatacatcaaaacgagcattttacaagttcgtgcactagattacacccacttaataagttcatgtaccgatgatgcaatttactttttttaataaggggcgtttttaataagcaagtttttaataagaaaggaagtattttaaaagatgtatattcatgacaacaatgtataaatgaaacgaaggtagagttatgtagcacatggagtactttgatgcttggttggatggagcctttaaagtttgaagtgtttgctaggtggatatagggttgcaagcgggccgacccgtgagttcacttatagatcaaactagttgataccccgcgcgttactgcgggcatagaagtataattatcaatgtgcaacattagtgcaaacaatctaattaagtttgcttataatttgctgagaatctcttaatgatagttctgttcccagcaatgtatgatagtatatgaaatcttcatctgctggccaaaacttcaaaatagagaaacaatagtatacagtaaagatctgattggttgtgaacgtttagaatgaaagaaacaaaagactgaaaaattatatatttattaggcatcattactataattcataaaattgtatgcttccagatcatggattgctgcataccttagcaaaaataaaccttcacctaatgtggatggttcaaaatctaaaagatgacccaattatatatatgagcattgagggaagcatcaagcatacataggagttgggcacttgacatccggatcactcatagtatttgttaagagattaccaacaaaataattccatttaatcaattgaaaagcgaatgggatcatggcacctgaaagcttaactttctatatgccctcagtctgtctgaaatatcatagctcaaattgtataccaccttaccaactgcatatatgacatgaaacaaaagcagttacaaattagatggaatagcataaaacaaatatgtgcagattgatctggctctagctttagaaatacaattacatattacatatatttgagctatccaattttaagagtttttcagctcatctgcaacagaaaaagatctaaagtataaaacccgtcacagatttttttttctttttaatgaactggcaccggtgtgtcaatttcattgaatatagtggaaaaaaagaaggcaaaaattacacgaaacccatcatccggaaaataagttgcaacttgttgatatgagtattctattaatcctattaagccctaggccgggatgttacaccctcaccctcttaagagagatcgacgcccccgtcgatcaaccccaggccaggaacgtcccctcttggccatgtccgtgtgtccagtgccagcgcatgtgccatgctgtgaccactccaggtccacaacagccatgcgcaccatgcctgcgcaactgcgacatacgcgcccggctctgataccattttgtaacgtcccgcctctcccaggcttttataggtcatagactgccctcacagggcaacacaagtcttttcggcgcactttgtgcttactcatgtgcactcgggaagaatttcccgatcggtcacccatccctaaattgctctaggccaagcacgcttaacctcggagttctttagagatcagcttccggaaaagaagttgcaacctgttgatatgagtattctattaatcctattaagccctaggccgggatgttacattaatcaaaaatagaaatatttaatatgggatattttcaaaaagcttatatgaaatggagaaaaacagccagacctaaaatcttagccaaagaacaatatattttggatccacagatggccttcacctgaaatcctgttaattagaactctggagtaaatgatgcatgcagagaattagagactgaaggttgcaaagtcaaggtcttagtgtagcatctattaacttgtcacgaatgcttagaattttaggagcggatgattcgatggctgcttaccacctcaatttactggcagtgcagctttaaagcccatgaaagtggactgggataggagataattaacagaaacatgagacatatcagagatgatgtaaaaatctctatgtagaggaacacaacaactgctttgtttggtgcctacacattgcaatgtatatcaacatcaaccaatcagatatgggaacaaagtatcatcgaagaaggtcagctacatgggtatcatcaaagaacttaataacttcctggacctggttggcgctatatatcgttgacgcgggcgataagatgagggtgagagagacatcgagcagtgccgcctcccaatctcccatccatgcgctaaactgatgaggctagctaggacagctagctgctgatagaaacgtatgttgccagcagctagatcaacgatgatatcgcagagattagtggtggaataaaaacatgcattaggtgaaaggagcataaaaaggaattaaacatggtattaaaatttaaacatagcccctcggcttccctttgatggcgacggtttcattgacggacaatacgattattattgaatcggtttcatacaaaaaaaatcatagaagaagagatcatgcctggtcgatggggggagacggtggatgctattcatggtgagctgaagagtgaagaggatgcacgacgctccacctcgccgcgcgctgtccttaccaccacctgcgtgtgaccgcgccgcactacgccgccgccgccgccgctccgactcaggaagtcaggaggatgagacccaccgaaccctaaatccttcattgggctgcgatagactaacatgggtctcctgggctgcggtagattgacatgggcctcctgtggtggaagaaatatataggcctcacgtgttgtgttcaatccgacggttcagatgagatctaatataccgatccaacggttgtgaattaatgatgacgtggaacattgaggtgtgagttttaggagattaattgcacttagtggaggataactttataggaagaagggataaatgataatttatgggttttcacgtcgtgcttcggtttaccgcatctagatatacaagtgggtcgatccataaacccatttagagcaagtttaataggatagccaactacgagctccaattcatctatagccaatttaatagtcgattcgtataatagttgtttactatactattaatacctggtcctatctgtcatacacacgttacgtcttggagtccgtgctacagctggctacagatctgtaacccgctgctcttctctctcctattttatctatttaaaatatgtttatagctggcttagggcatcaccaatgtatatggcaaagtgatccatatagataggacccatataaatagtttttacctatggcaatctccacaatgtatatggatataatgtatcactaggagaagagagatgagtagagatagataatataatttattccatatgggtagtccatatgcatatggataccttttgttattttttctatatatggactagttgcacaatggttataggtggctgaatggaggacctcatcggtttgctgttgctgaggctgatcttcagcacaagcccatcagttagcttattggggctgaataaacaccagctattagtagtggatccgatcttactggacacctttttacggctgattatgctgaactgaaaaagccaactttggctgatcaaccaaagctgtagggttaccgatgaggaccggaatattctattgcttatggactacttttacactacattgtggatgcccttatagcctgctattgtacctgctattctctctcctattttatctctttaaaatatgtttatagctggtttatagcctgctattgtacctgctcttatagatcaaattaataggtaacccgctggtcaaatccgcgggttacgtactaattttggttataagtgggttcgcggacaagcccacttacacctctaggtggatagctgtggtaccttaatacatgggtggtgtataggatgcgggattttttttcttctaagctttccttcatagcaaggtttaaattaagggcccctttgaatcgcaggattgagaaaacgtaggaataggaaaaacgtaggattttgataggaatgtaagtgtaaaacagaggattgcaaaacacaggaaaaacataggaatggccgtttgattgaaccacaggaaaaacacaggaattggatgagagagatagactcgaaggaaagttagcaagaggttgaagctcttgctaaatttcctccaaaatctctataggattgtccattccataggaatttcaaaggattggataggattcaatcatttgtttcaaagggcttcataggaaattttcctataggattgaaatcctctaaaattcctatgtttttcctccaaatcaaaggggccctaaaatctggaatgacccgacatttgaaatcctctaaaattcctatgtttttcctccaaatcaaaggggccctaaaatctggaatgacccgacgttttccttactcaaaactggcagcgctaaaaccagcctcgagtcgacggctgaagattggttagaaagtggggtccatctgcagagtatattttcttttgagatatctgcagagtatctgtggatgtatacaaacaggctctttatgccgactgaggcgctgtttggaactaaggaatagaataggaaatgaatggatgtgcaattgcgaaacagaggaaccatgaaaattataggtttgtggtgtttggaacacagtaacagcaaacaataagggcccctttgaatcgcagggttgaaaacaatagaggaatgtgaaaaacacacgattctgacataaattaaagtgttaaacaaaggattgcaaaacacataaaaacatatgaatgatcgtttgattggacagcaggaaaaacacaggaattggatgagagagataggctcaagaaaattttccaagaggtgaacctcttgctaagtttctttcaaaatccacatgcaatgtgtcattccataagaatttcataggattcggaaagtttcgatcatttgaatcaaagggccaaatagaaaaaatccctataggatttgaatcctataaaattcctacataaatcatttgattcaaagggccctaaaacttttctcttcctcaatgctctcttggccaatagattgcattcaaaggaaaacttcctttagcttggagcagatgttttattttctccaaaaaaaatagtactccatttcaaaggataggggaaaatgtcataggaattggtttgctccaatcctccattccaaacggcatgtgaagtgctcaaaacaaaggattcacaattcctgtacttttccttggttttcctccaatccaaacaggccctgaaagggaaaccatagccctgtggactttgtggagtgttatgaactgtgatgattctctactagtctgactggacacgcataaagcaggaaaaggataatgtggtaccaattttggacgttgaagaaaatccatcataaccgataaacaattcacacgcatgccatcagagtatgtagatctcaattttcaaaacgaacactcaacatcaacaactttgtgcagttcaacagatgtaatgcagcattgttcaatgtacaacaggaacaagggaatgtttgtgatagaaaagtcttagcatattcctcaaggaacactagacctcttaatgtagtaataaatcaaatagcacactgataccagtaagcgtaccaaagttacccagaagatatgacattaaccgtatttaggatcggtataacctgcaagggaaaaccacagtataacattggaaataagaggactgtaaagaatggtaggcaagggcatgtgtgtctaaatataagaagggcctaaaaaatcagatggaaaagcaaaacagaattggatgttcagtttgttctgacaacacataaccaacgtaaatgatgatgaaaaattttccatcttcaaaaaaactacatatcagatcattctagcagcccttaattaatcattgcctgaccctattacatgtaaaactacaaaatgatatgcctcaaatctaaagcttcttatgtgtattaacaaaaaacattgccaggaaacttttcaaatccagtagttattgttaactatatgaattgttaaccagaaaatctataatggaacttataatacaggtgagtaagctatggacaaaactgaacattattgcgcgcccacaaaaatggtacatgtggcataacaaagacatatatagggaattacctctaaaagtatcatatcaatgttttgacatattgatcaaggtgcttattgaaaagctcgcacctgcttaagaaaggtttgaaaagttagtcagttaaggtaaacaaagaaaaaattgattgaaagccactataagaaaagtttgtcaacctgacatagttttttatgtatattattaccatactattaaagttttatttagtcacaagaaaactaaaaggatacttaaaagttatggaagaaattgagtgtttggattgtagccgatatcttgggatagcaaaattttggaaaggttggctcaagcataaacgaaacaaaagtttacaagctaccaataccaaattaggattatttaacgaaaatgttcactattgtgcaaataaatcaatagaatggtatcctgataggaatgactgccacaagtaatctactccctccgtttcacaatgtaagtcattctaacattttccacatttatattgattttaatgaatctagacatatatatctatttagattcattaactttaatatgaatgtggaaaatgctagaatgacttatattgtaaaacggaggaagtacctcatatctacatctgcatgaaattcctaatataatgggtagaaggacaaagtaatgcctaccttgcatgaattttctcttgaaagaaagaatctacattaatgcattttgttttctgatgagataatcctgatagctatatctaatgctgttatgaaccgaagggtgaagcaaattttcattcgcagggaaagcttacttgattggtgtgccaggagcgtacaaaggattttttacaacatattccacatataggttgtagatatgcttcagcgtgtcacgttgatcaccagtccttggatgtgtaattagaataagctacacataatggtagtgtcagtgaatgatatgttttggaacaaatggtattaaacaacattctgttccagcaaagataaaatcatgccatattaagaatggaaaactggaaggcaggagatgaaacaaattgactaaccttgataccagaagggctctctaggaagttcaatttgtatgtgtttgtcttgaagctgtaaaatgagcaaccctggcccggcagtagtggcaccccaagattccccttttctgctctgcatagtgatgtgcagagtgatcatgagaacactgataacattttaagctcaatttagattcacctaattcatcaaaatggtaacaatctcgtgggcatgaaaaggagagcagttagaaaatctaggaaagggcgacgaaagtgtagaacagtgtgctgggaatgaagataaaacacaccaaaagttgtaatgacgatataagaattttctattgttcaattttaaaaacttacacatttcctcctctgcttttagtgattaacatgttgagtacctggggtgttagtattgagattctatatttatatgaagaggtgacagatcagaggtcagacccttctttatttttccatcttaaactcctgctttggagaagaggtagagttcaactcctggtattgtggcgattattgatccaaataccagttgtaaaattgaagtgatgaactattcccaatcttaaatcgatttcggcggaccatccttgcgcaagggatcccttgcttaattttctactgcaaagcctgaaatctctgccaaattggccgcggataactgtgaattactcccactgacccaatttagtgagtgaaacaacaatttatagttcattcatttgactcatttttcaagcaacaagaaacaggtggtttgcactgaagggcacacttgtaggtagtaacaataagtaaagtaatccattccaaaccactagcggttcgatccaagaactctgttgaggtggggggagagagagaggcgtagtacgtggtgggatcgatcttggcggtgaaggagcggagggagaagaggaggccgaacatgagcttctggtcctgggtggggtcgagcgtgcggagcggccggtgccactcgcggtacagcaggcagacgccgccgcggttgaagacgtagagcacctgcgcgttggcgcccgtcccggtgcccggcggcgccgccggggccggggtcgcgtccggcaccaccgacgtcagcgacgacccgccgccgaaggagaacatcgcgcgcgcgtggatggcgcccgaggaggaggtcgagcccgccggctgtggatctccgcccgcacaagaggagatctctcacgggaggtgaggacgacggcgaagaggagtttgtcatcgtagatagaaggcggcccatgtacacagacagcagaagccaatgatgggttttgggcattaagccccatgggccggtaaagcaaaccgatttctcaagtttttatttgtttctctgctggagtattatagatgtggaattcttaaatttatttatttatactagataaaatgtccgtgcgttgcaacggatgaatgctattttaatcttattattgttatacggtttagctaggatgaaattcactgtaggaattcgcttggatattttttttagaaaatcatgagctgcaattaggagtccgactttcatctcaaattagcatgcaagttttttaaaaggaatttattttacgacttcttttatatttccaaaagcaaacaaacttaaaatccgattcatacacgaacttgtaattccaaaagcgaacaaactttaaaactgactcaaatacggatggcgtaccaaaatactggcaaaaacatattcaatttttataatagttgagaatttatcagttttgaaaattttatttttcttaaaattacagaaatatacccaagggacttaaatgtcaattttgccatatagcttgttaacgttgtgattttacaatttaaaaatatatcatatcaagtccaatgaaatcaaactttacattaaaattatagagcttgaggagatttacaacttcaaagttaataaccttttagtttaagatcgtttaggactccaaatatttgttacaaaaatctaaaacttgtttctaacaaaatctcatatctacgtttcaaacgacagtgtatgtagacaaactttcatataagctttgtagtttatcacctttttatttaaatttaattagagtggcaaacaagcgttaatagtctttaatacaaataaaagaatacagttaggccccttctcgtcctcaagaagggtgattttcaaaaaacaccctcatggagcgtctagatctgtagattttttaaactaaaaattattttcataaatattttaataaaaaaatttcttctaaatattcctcctccccaacaatcacattttccccacataaaatacaacattaacatattcagtgaaaaccatcaaataaataaaaacccgtaaaaatcaaacctaaaaattttgtaaattcatgacaaagaattagagactaaattttgtttggggagtactgaaaacaatgacaaatttcttgagttatttttttcctcctctctcgactgtagcgtattagctagtttagctaatgtgggtgcaactggcatccgaatgcggggcgctgattagtgaccagtcgcgccccacgcgcggtgcgtggtcactttttcctctcttagtctctcttctctacagcacatgtatatacgtatgtatatactatatatatatacacacatataaattttgtatatacatatacaaaatttatatggtatatatgtagtatatatacatataattttttatatgtacacacttttaatgtaaaaaatatatacacatgtatataaagtttataaagtttatgtgtgtacgtataaaaaacctaaaaaaaaaatatgtgtatataaactttatatatgtgtatacaaactttgtatacatgtatacaaaaattggtatatgtacatataaaacctcacaaaatgcacgcatatacaaactttgtatatgtgtataaaaaaattgtaatatatatgtataaaacccaaaaaaaatacacgtatataaagtttgcatatgagtatacaaactttgtatacgtgtatataaaatttgcatttgtgcgtatacaaagctagcatacgtacgtattaaaacccgaaaaaatacggaaagaaaaaaacaggaaaaaaaacgaaaacagaaggtacgaaataaaaacagaaaaacaagaaaaaaacaaaaaaaaaaggaaaaagggagccaacgcgccgtccgccgccctctctccacgtacgacacggcgtacgacacgggtccagtgcacgactcgcgggcgactggtcgcgaactagcaatttcgcatccgaatgaacctcgttgacacttgatagacgcctttttagagaagacaaatctttttagaaaaagctgcatctgtctgaattttagaccatcttctgaactgcttggtagttcgatggtgtcttgaaagagctttcttctgcgatggcgttgtacggagcatcagttagtgaaccgcctcttattctcacgaaagagatgaagcatggaaaagcttcctctcaaacatcaattcaggttccaaaagaagctcaggtgattaggtgagctcaggacctcaggttctaggaagctgagcaatctgaattcaagtttcctcaaagcccgaaacatcttatcatcagggtgaggatttagaaagcatctacatatatctcataatggaatttcgcaagtagatgggggaaattcaccaaccatcacagataagaaatcagaattgtagaacaaaattctcagaacatatagctactcaaaattccatgctcactggcatggtcaatattgttgtggaagccattacaagggtttacaggatgtttcttcattaactatttaccactcaatataacgcaaggtgacttccacttggtaaacacaacagcccaaccagttatgaccaaaaatccttaacccaacctgatagttcccaactaaaaataacttcttcagcttcttcactcgggatttatcttttgcttctttgagtggtccttgtttttcttggcttcacgacgctccctcttcaaccccttgacatcgtttgataaactcatctttgcgatctttaatagtcaaaaaccacgaatcagcttagcatgtcaaaaggcaatttcaacctttacaattgcagcaaaaaacaaaacaaacacttacttgctggtctggaatgtagaccttgcccagcttgccatgcactggatccttcgtgacatttttcatctgtaaaaatgttgataattgtgagaaccatagtgaattagtggtttaaggattttttggcaagaatacaaggacatgggctatagttgtttaatatcacaacagtttacacggcaccaaaggtcaaaagacaattatcaattgggtttaccttcttagcatgatcagcagtcttcattgcttctttcttcaagctttcaactggataccggtgtcgcctaactactagatccatagaaggtccaacttcaaccagctcaattctaggaatagatgtgccagaccgttttagacggagagcacagtgcatcatgtagacagtagtaggggagattgctgtgcacacaaatacccgatctacaccagcaaggttcagattctctaccacctgtatcaacaacaaacagctcatgctgaagctcaacagataatctggtcccaacatgccaacataaatacaacaaaaggcgcacctctcctttgaaaagatcaagcagcacttccttcagatgcttcagctcttcaacactttcaaagtgctccccaatgaaggcaaagaaaggctttgacccaagtttaggtgccagtttcttgtcatacacatatgattcaattgatttgtagttttcaactcctacttcaacaagatcatatatgtggtgatcataagtcctccccaaaacaagattgttgggcctcttctttgagtgagaaccatactggaacaaaaaagaattgaaggattacagtcaaaacgatgaagaaacataatctctgaaaacacatcatcttactaccacattaaaagaaaaacggacaaactaaaagcatctgaataggcaaggagtaagtaggtttcagataggtttcatataagcggtgagaagttcatcatagtagctcattgtatacggttctacttctcctccacactatcaaatcaaaccactaggaatattaaatgatcctatcttgtgcaaaggaaactatttcttctctacaccaacaacctacaattataatcagaacaagtgagctttaccactataaggctgcaatccgtcttgagggagaagaactcgagagaagtttcgccgccgctctcgaacggcctgatgttgtcattcttcttggagtacttgacggcattgtcacgcttcaggtggaacaaatccgcgagcacggagttcagaacggcgctggtcttggttccatggaggataagcgtcttcttgccggtctcaacctggcggcgcggcgcaaatcatcagagagagagaaaaaaagaacaaactcaagaaccgcaagctcacggggggagcggagataaacgcgcttacgagcttcggcgcgtgcttgaggagctccctcttggcgcgctggctcctgggcaccctgatggccgccaccatcttcttctccccgcccggttccgatcggtcgacgccgccgccgcgtggggaaggggaagacggcgggtgtgggggaagaggtggggagcgagcggtaaaccctagaaaacctcgcgagctgggagagttggaggcgacgcgggtctttgtgtcgcggaaggggaggaggaatgggatggagggatcgtcgggatggtggagaatcggacggcttaggttcgttgcgcggatggctggatccctatgggcttttcggcctacctgctcattggcttttaggattcggcccatctcctccagcacgacatcggacagaacaaagttactcggtcagaatctactctcctgtcctccatccgtcccaaaataagagcgagtacaatagtagaacatgttcgggggaggagagctagatgagtgaggagaggagggagagtgagggcgggcaacaattttatcgccggctccagcatcgacttcgagagaaaagtgatacttcctccgtcccataaaaaaccaacctaatattggatgtgacacattctaatactacgaatctggacatacctctgtgtagattcgttgtactataatatgtcacatccgatcctaggtttgtttttttagtactgagggagtaagtgtggagtgcatgtgtgacagtgtgagtctgagaggaagcttaaattctttttaatatgacgtgatgttcagtggcggatccagaaagaaatagcagtggggtctgaacaaactagatagagttacaatgtcccatcccatctatatataataaaaaaatttagcgggatcttcgtgggggctctcatagtcttcacgccagtagtgggggctcgagaccccgccgcccccatgctagatccgcccctggtgatgttgatgggtccagcattgtagcttatttattgtattcacaaggtgcaaagaaagctatagctgagttggatgaaattggagccaactgcctatgctactataaccttgctctaaaccaacatcgtactaagatgtgacatatccttgtataataaatctgaatatacagagtgacacattttagtaggatgttaatttattttgagacgaagggagtaaatgtggcgtctctacagatttatagtattatggtgtatcatatccactagtacctctttaccaagtttattattatttttatttactagtaatattgttagtactaatgctaaataaagactaaaataatgcattaagataatatttgtttggcaattaagtatcgaatgtgtcagttttaagattcgtgaaaaaagaacgatatagttaagctattctataaggacatgttgtttgtgtaaacaggtctaaaacagatttgaaaaggtgtcacaccatatttttcataacactacatatttaaaatatcgtatcagaaaattacatatttaacatcagttttatcacaaaactacaactttgataacctcaatagtgccaaggatacgagctctaaaatttgtagttcttcggtaacctcatcactaaatttgtagttttgagatacgatcaatgccttaaatctatagttttataataaatttaacactaaatctgtagttttgtgatacaaatatttaaatatgtagttttgtgataatttagtcaagtatatatatagttttgtgaaatttactctagtttttaaggtttattggatcctaatcattgcaaattttcccaattgaaaatctaccattactatttattcgtgaaatcgggcaatgtaaacatatttgtattaaattttaaaaattataaatagatgcaaattgacattaagtgaaagttagactagaagtaattgttcttaactacaataaggaaaatgatggtacctcacaacataaataaataaattactgaaaagtgaaacaaagaatacattttaaacagtaccattttgtaacaagtacaaggccttgttccacacaccactttcccgattttatcaaatttggcaaaaatccttaatgatgttgccttaccatatttttgttattagaatatgaagaagtatattccatacacagaagttcagaaaatccaaataattaacctacaaagaacatcaacaaatactattatattcactttttaaacataatacctccatcccaatataagtgcagttgtggtttttcatatccaacgtttgaccgtacgtattatttgaaaaaaaatatgattagtatttttattgttattagatgataaaacatgtgtgactaatttttttaaaaaaatttcataaaattttagaataaaacggacggtcaaactttggatacagaaacacacaactgcacttatattgggatgaaggtagttgttagaacagaagaatgtgatggaataaaactaaccataagatagaagatgaaaccaccaaaacctttcgatatgtcaagcttggttatgtgattcatcaaccattcaaataaaaacttgctccaatccaacttatcaatagaatccaactcttctggagcattacgacattttgtgctatgtaccaatgatgagtttgggtagacaaagcaattaagatagacaaacatggatcaaatttggatgtgttcaacagacatgccatctttgttaataagcttgtctataaagaacttcacaaaggacactaaagatttgccaaaactaaagaatctttttcttcagatcatcaaaacttgatttgatagaattgcctctaactggtaaactgtgaacaacatctatagattcttttgattcggtggtgtttgaatctcctaaagatgaagatgaagataaagataaagtgtttcacgta

SEQ ID NO: 9585 - DNA, 21639 bp, Oryza sativa
cttttctctttgcctgaacttactgatagcatataatttttgcccccaaaagtcaaatgaatccccaaaaggcaggcccaccgtaattcatgggtattcaaatgggtattcataaaagtatatatatttaatatgcacatagatatggtggtgtttaaaattcatgtagatgaagattaagtgttttacgtaaaacaatgtggtattaacgtttgattaattgagtttttattattacaaatttaaaaatatatatatatctgatattttagagtaacttctttatagaaagttttcatgcaaaatataccgtttagcaagcagtttgaaatcgtgctataaatatctacattttcatccaacctttttttgagaaaagaacggttacttaattgggcttgccatcctcccaccctccttctctcctcgtcgtttccggcccattaacccccaatagagagaaaaaaacccaaaaccaaaaaaccctaactcttctccccatcgatctcctctctgagctctctccgacagccgccgccaggcgaggacgcgccggcgcccgtcgcccatcgcgccgtagccgacctcatcacctctccggcgccccgcggcctgcgccgtcgccccgtctcgccgtcgcacccgcaccgccccggcgccccgcgagcccgcgacgccgcccgggcctggcgagtggcgtcggcgcgctgccgtcctgttcgtccaccgaccattcaccaccgcacttttcctgtcccgagagccgagaggccgaaggtaactctgcctaaatcctaatgcctactgttagatggtagtgctaagtgctgtgaatttaggatttaggaacttttttaccatttgaatccaggggatggttcatggttgatttattgcatatatttgaacaattgaactttagtaatttaattagtagtttcatggttcatggttcatggtttcttatcattttgccattttccatcctctataaatttgatatgttttgtcaattagtagtttagtactttcatatgctaagcacattcaatttatggtcaattttatttatctatgactttatgaaattatgcttataccgctatatattatacaactattagactttgggttgtaaaaaaaaaatgatctcttcccattgcgaataaccaagttcaatcctgggccggtgggcccacccccatggccccctgagtcctgatgattacaagcgtttatattgctttgtcagattaaccgccgcaactccgcatgttctccttgtgttgctgtttcaatgcttagtcatcttcattgtttcttgctctgtggcacattaagggagtaggaatgtaaaattgtctcttgtgcagttgattcagtgcagtttgtttgggcaacttttatgttctcgttagctatcttacttgctgcagcctgcaagtatataacatatctatgttttttgaggaacatgttagtttattactacttttctgtgttattaaaaggaacctgtgttattgcagaaaactcgagggttaaagtgttctcttacctgttcctttttgtgatatttttagagtttaatttaaaaatatatgtatatatttagcattcttataattgacaataccacctgtcttgaaaaaaaaatcaccctttcactatgaaagacacaaaagataaaatgatttacacatggtgattcatgcagcttaggtggtgcaatggctttaagttcatccattagcatgtctcggcgtcttttcaagggacttactatcaacccggcattggcatctgggatgacgtgccagcatcaccagcttcaacagcatgcgccagtgagtggaacagccaagggtaaggctaagctcaagtctggccaacaattgaagcgtaacaccattggagcaaagaagggcggcgcgccttccactggtgggggtggtggcggtgggcgtggtcgtcgtgaggctattgagcgtattactcagattgcagagtcttgtctgaatgcctcaactcctctgcgccatctatcccccaaggagcgtcttcgtgaggccaaacgtgaggagcttggactcatttctaaggaacgtcaacgtgaacttgatttagccaaggctaaagccaagtccaaaggtacccgtgagggtgatggtggccgtgtgctgatgggtccaccaggtcttgactacatcagtcttggattggttgatgaggacgcaatccctaaatacgagctgacagtcgaagatggccggcgacttgccaaacaatacagtcaggtgctaatgcgacggcaccgcgcacggcaaactgcagaatcgtctcttctaagtctcaagaaggaggccattgcagcactccctgagaagctgcgagctgctgctatgattcctgacatgacaccattccctgcaaaccgatacatggcaacactcacgccaccaattgaagggtatattgaaaaggtgcgggatgctgccaagaagtattctgtgaaggagaaacttcgctgatttttacctcaagggaggaaagggtatctagaggtaattatttaagttgtgcttttggccttatatagtaaactaagatgtgcaatgcttgctatattttattttactgaaatagtgtgttcaatagctcaccatccagtttccagtatttactctgtaacctatattagtaatgtacaagtcctcttggaagataaatgaacttaatccaattcgtagcaatgtgtacatataatgattttggcaagtgttagtttctagtgctaccagaaattagcttgagaacatgagttgagaatcgtgtgctattttagacaaatttgttgggaagtttgacctcaagcaaactgtgttgatgttgttcactttctatagacaaactagtttggaactctgaccgcaagcatgaatgggcaaaactgcacaggtttttttttttcattagacacaatgcaagctgagtaaactaatttgtttcctgtgtctactgtcaatatcctctaatctagcatatgtttttatagtctagaaactgggcttaagtttaatctcacatccaataaaatgctaaccactatcttgtatctctagtgcatactgtctactaaaatccagtatctgctcttttattggtggggtttcatcaactgatttctctcgtgtgtccatcttctaactcacttctgttttttttttccattacatatgtataggtacatgaacatgtcaggctgtcagctatgacaacagagcatactttgttgattggcatatcaatgcaaggagaaattgggaagcttgttcaattttcagtgagtttttggtcattttcttctggctgggatgctgcatgaatggcaatttctgaagctcgatgggcattcgctttgtttcattgtttgtttgttacgaatgttgtatgcagccacttctgtaataagttcccggcagttagatttgcttctgccatttagattttgcgaactttttttttactgctaaaatggctgtagcaaagcaatgcctcacttaggatcttgataatggctcccgtgtttctctcggcaaaatagcactgctgtctgctcctgaatttaatctggatagtgctgctccttagtttaacctggatatgtgttttttgggcctgttagcaagcacggaaagggaaatatttcaacgaaagcactaattgcagagggtgtggatgctactgtattcgggcgcccagcgcggaaaacggttcaattaagtattagctaaacttttgttaagaaaaatgggtcaatatgattttttaaagcaacttcatttcatatagaatgttttttaaaagcgcaccatttcagtttgaaaaacatgtacactaagtgcgggtagttgggaactttaacagacgaaaacagctgttattgtgttctttgttgacaatggattagcatgggcacgcctaaagttattctggcctaaaatataataagttaaagttagttataactcttatttagatgtataggtaaaacgttaatttattttgagataaagggtgtaaattgtttttttcgtgctacaaagagtttacttttataagggcatttccactgtactaatatgtgcaaaggcatctaaatgtcatttcccacgatactaatatttaatttatttatttgtactcttaataattgtcaaaaacttaattttatccatcatcactttatcacaccctaactaaaactgatcgagaaaagcaaactccacttgattacttcatcgtgccgacgtcgacacgcaaaatgtcgtactactgcatcgtcgtgccacgtggctatgcagcggtcgtcgcggagctctcgtgtcgtgcaagtgtccaccgcattcgggaagctcggacctgatgaggcacatccaaattgatccaaagccaaattttgatacttccaagtcgcgcgtgatttgtcagctgttagttgtcacacctactcatcagccaaccaattcgccatcaatagcaaaccaagcggattgatcatctcatctcatctcatcgaccgagcattctagcgagcgagcggccaagccagcaagatcgactcctcactctctcaccgatctagcagcagcagtggtagtagctagcagcgtcagcgtagcaaggggttgcgagaatggcctcgccgtcagcgccggggccgaagctgcagaaggcgatggtggcggtggacgagagcgagttcagccaccacgcgctggagtgggcgctgcgcaacctcgcgccgaccatcgcgccgccgctgctcgtgctcaccgtgcagccgctcctccccctcggctacgtctccgccgcctccttcggctcccctcgtacgtgacgcggatccctttttcctcctctttcaccggattgatccctttttccccttcttgaatccgttgttgattttgggattgtgtgcttcttctgctccgcgtgtgtgatagtgggcacccccgttgtagccccggagctgatcaaggcgatgcaggagcagcagcagcagctctcgcaggcgctcctcgacaaggccaagcagatctgcgcgcagcatggggtatgtattatgtgcttgtttccgcacctactatgaccataatttctcctcattaaacttgtgagaagttgaattatcaagcaggatgtgcagtacatcagtatgaatgacctcttgtgtttgtttggtcgctgctcaactactcagcacattgttgttagttgttactagttcaagatattcagcattttttgttgtttggccatatcagtaagggaaaatgccataggtgtccaatttcatgtgtttgcaactgcaattaggtaactggagatactagcttgtagttacaaatagtaggagatactagcttgtagcttgtgatcggtttggctcttgtctgtctcgtcatcttatacatttgactacatttgtatctactaaccctgctctagaccacatggactgggtttatattttacaatcgacacatcatatcagggagggtagaattgtgataattgtttggattgtcgtaaatttgtctatgttattttataacgaatggcaacgtatgaccgactaacaaaaataaattagcgtgaggtcataaggataaggcaaatcacaggagatcttcagtttattccgtgcaacactgtgctatgtggatggattagtgttcagtgattgtaatccttgtaatattgtacctacaattcaggtggctgtagagacaatgatcaaagtaggagatcctaaggagatgatatgtcaagcagctgaggaatcaaaggttgatttactgatcgttgggagtcacagccgtggacctgtacaaaggtatagtttgaaatatcgtggtttctttatagattatagttgatagattatattttctgcatgaacaatcaaaatagaattatatgttcgatgaaaaactgaaaacatgttgctctttttgtatgtattatggttggattaggctctttttgtatcttttcatattttttttagataatggattaaaccggcctctacatccaaacggatgtacacagccaacagatatgatcttttcatgaaccagactaaatggattggtacaagactgtaacaccttccgatcaataaggaaatccacagttgcacctagcacctatggagataattactgttagctgatatgtttttataggactccttatataccgcttgcaatcatggttttactgaggagcacaatataaaaacaagagtaatattttttatgggtgaagataaataatattttttgtgtagatcctaataatatggtattttagtgagcaagactagatggactggcagaaaacctccattagcttcagcaaagaaaagcctcagtttcacctatgggattaatcgttgtcaactgaacatgttttggtggtgctctttataaactgctcataatcattaagtttattgtactctgtacattataaagataagagtaatatattttacaggtgaagataaaatattacttctaataattttatcattgagtgacgcagatgtagtgattgcccttcttttcagttccattcctttcttttgtttttctcaactcaacagcttctgttttgttatgttccttataaattccaaaggcctaatacatatcggacattctgcatttctacaatgacattgataccaactctttgcattcaactatcttttcttgaacaacagttttatcaagtaaaagaataactctgattacatcagacaactattcagttacttatataaagctctcctgattccagatatagcattatcgaagacaaggatatagcataaatcaattgcttgttgcatgaattaatttccaatttatacataaaactcatcgtggattatctaactgttgcctattgctgctgcaggttgtttcttggaagtgtcagcaattactgtatgcatcattcgaagtgcccagttcttgttgtgaagaagcaggagtaaataagctttccgaatctcaataaaaatctttgtgtattgtcgatgtgttatcctcaacaatgcaataaacaaagccgtattagatgatattcagataactgaataatgtattgtgtaaatagtcaagattatcttgcaaataaatatccgcttcttgttgctgtaaagtaagggcgtttcctttaggagtatcatccatgtagctggcatctgttgcagaaccgaagacgatgaacacccaacttgtgtatatatgtgatatgtgtgtatgttttgttacttattcacaatgtgtctcgttcatcttgatgtctattgccgcttattggttggttattcttgtactctctctagccagccaaaaaaggaagtcgttttgagatttgcataaaggtaaatacgagaatcgttaagccaacgtgacaactgcctctcgtgacaaatattatagctgtaggaataaatacaacaatcaatcccaaaattacgtactaaatttcattttttttttgcagtattttttgtttgcatcctaaggtggggaggggatggcatgcatgcacaggtattagttgtatcctcccaacttttggtgcatcaacacatgatagataatttttatttcgaacattaattttgtcttgggatcaaagatgtgaactcgtcaggaacaaatcagatctcgaaaaaggttagtgaaataccacatcaactctggttttaggagtcgacagacgcgtcatatctagtaatgcggttttgagacgaattacaaactaggcgacaaattaaatgacctaagtgaacttattatttccttggtttgcaagaagaagccatacattttctctttaaaaaaagcacgcacaggcccactgatgcgaagtctacagaaaaatcacatactccaatttgttagtctaaaggccgacagagaaccacagagacaaaaagcccacaaaacaaataaaacccacaaagcccgaacccaggaagcatttactgggcctgaagatatacagatccaaagcacattatgtgtgtttcaacatccaccctatattctatatcgaacggcttaagaaaaatgctagacaacacaatttcattttatagatgtgggtgtacatagacttatttctaatataaaatatgttttatacaattttgtggaggaattatcaagggaaaaaatgataatggtgtaggggaagcacttagttttagtgtctgccatctaattcaatatgcatagactaatcagtcatatctagcaagctatgcaagcacgtttgttgtttgccggcccccactgccatacacgcaaagtcttcgaattatattttgaaaatattactattttttcgtaattttgcaaaagtacaccggtttcaaaaattctacaaaaatttttgtgtataatacaacgttaggaagaaacaagaaagataaataacgttagatagtaaagcgaaccatttttaatcttttggaggggtaaataagttttttaaaaaataatagttagtaagtgatccaatgaaatagttgagggtaaaattgactttttttatatgaaaagaattacacaagaatcattagaggaattggcgaagccatgtccctttgtttccaagccatttggcaacaccatgccgtgccatccgatggattagcgccatccgatggattagccaatccaattggcgaatcgggtataattttacaattattctgaaaaccagtatattccttaaaaaaatatgtaaaagtttatattttcatatttaaaacaatagtcctcaagctatgctactcccatgttttctttaccgtttggagaggttaaactacccccaaagaaaaaaaaaccgttcttgcagtttctgtggtaacagtcaataaccgcatgaatttcatctaaaaaaatgaattcaaaattttcaaaaatcacacgggtgtgctgaccttagcgtaggcctatatgttatgctgccataatacttgtatagctttcaccgtgggtatattgtgacctcgaaatattctgtgatgagcatacgggaaaaccttctttggatttcatccaatatctttggaattcatttatttcttgtaggggtggctttctttagctttggcaaatttcatgtaacgggtttgtatggtcctgggatatgggtgtcaatccttataaactcactgggaaagtacaagttgctgttacgctagaaattcaaggttacacacgagttcctattcacagcgtgctgctaggggatttgttctaggtataggtaaggtcaaatccgtaggggttatacaaatacataggccccttttcttctatcgagttgtttagaagacatttccgttctacggtcctggctctaatgttgtgttcatcaggttgcaggtggataaatgtggatgtggggactcgggtcagggcacagcgtaactaacataggagagtggtttgtgcacgataagccatggtaaccgtatgctataaccgtggtatttgtgacttaaataatgaaagccactaagaaaaataaaaatcacaacctcacgtttgacaacaacaaaaataaaccataatataactgtcataaccacagagattattgtgaacataatatactatccacgagcatcaaatctttattttaaagcaatgcagctttgttgttatgctaaaatatgaagttagccttagaatatttcaaaaaataaaaaatcaccatacctcattacaaataatgtaatatttctccaaatgttttgagatttttcctttttctttttaagattgaactcgaataaatttctatacccccacgctgtcgtggttactgcggttatcggtagttgtagaaactctggttgacactggtgtgcctatgtgggagggagtgtaaattttgtgcagtaaatactccctccgtcccaactatatttttttataaggtcttcaatgacatatttttactattaatttattccatgttatgtttccaataaatatgaaactagcatcacatgaatgtactttaaaatatgaatctagtgatataacatacataatacttagcatatatatgtttagtatgattattagtcaaaatctatcaagtttaattttctttaaaaagaggacgtcctataatttagggatagaggcagtaaaatactagtagtggtattaattatgtgctattacaaaattcggacatcacatgattaattaagtagatgttaagaacctttcccatgtaaaaaaacgaggttgtttattagcacataattaattaagtattagctaaaaacttaaaagttaaattaatatgattttttacaataactttttattttttaaaaaaacacacacatcagttagtattttgggaagcgtgtgtatggaaaacgagtgagtagtggtttggaaccttgactaacacaactttaggccacccaaccctctatgtcatctagtgtccatagcattaaatacattaccacataagaaaaatcttatgtggaaaaagagttaatgaggagagagaggggtaaaaaggtaaagaaacaatttctcatggaagaaaccatctctacacaagaaccaagaatgaaaaaaggggatatttatgtgaataaaaggggagggaatggatgtggttggatgagaacttaatttgaagatattatctattgaatacatagtttcaacatagtgtttatataacatgataagtatagaaacttacttgatagtttctgagttgggatagccttaggctatgttcattccagtcgattcccaacccctctcactcgttttccacgtgcacgctttttatactgctaaacggtgtgttttttgcaaaaagtttatatgcgaaagttgcttaaaaaatcatattgattcattttttttaaaaaaactagcaaatacttagttaatcatgcgctaatggaccactccgttttccgtgccagaggtagcgcttccagcccaaggagatgaaggcagccttagtctgtgttcccaacttcactcttttgtttttttcgcacacgcttactaaactgctaaccgggaaagttgttataaaaaatcatattaataaattatttttttaaactaatacttaattaatcacgtgctaatgagtcatcatgtgttcgggaagtgattaattaagaactagcttaaaaaaataaaacaaatggattaatagctgagtgtgcgcggcggtgcagctcgcgccgcccacttcttcggaccgcccaataacctgtcatatcacgcggcaagtgcccgccgctagattctcgtaccaacccacagactctctagccaatccaggattcaacccgcgagtcttttgccaatccaaccaacggtgagagcgacgtacgggttccaaccctgagcaaagggggatgtaacctgtaaccagacgcccatggtccatggattccttcaccccacccccctcctcccttaaaaaaaaaaatgcggctccggcaactcggcacgcaagtggcgcccgcgcaccactcgcctcgtccgtccccggatacgtgatccggtcacacgtactatactacatcatccgtaagaatcagctggcgaggcggccaaccacgggccccggattctctcatctcctcctcatcaggcttcggtttccgccaaacagtagtagtaataaaataagcacagtattccattccaagttgcacggaggaaaaccgcggaagtgggagccgttgggaagtcacgagccgcggccgcgcttgctttgcttgcttctcgcccaatattttttctccccgccaagcaaaaccgctgcaccgcccaaggcatcgggggcgggcggttgttctccttcctttcctcgctggtttgactctggattgacagccaacttgggctctctaaaatgctggaatcgctccaatccgtgggtggcatatgcatgaacctgtgcgaaaccgaccggtttggagaggtagagacggtggcccccagagttttggaaaaaatcttcctttggcccagccgtggcccgtgggattgggggatgcagcttcctgttccctcggtggtattcccatccgtgttccgttagtatcaacggctgagtttataaacagcgggacccacaccttcttcttccttgagaaccagcatttattgcatcgagctatccatatatatgatcagtgccctttaatttcattcatcggaaaagatcacaactcacaagaaaaggaatcttcacagtaaagaaacatgggagatccctcaaaattccgatcacccgcacgcggctagatttataatcgtgtttaattacccactagatggttgctgaaacaaaatcatgccgtcatggacgtgatgactccatggcgctgaatatttgtcttttatgaaaattagatggcacttgactcgtaaatagttgaattacaaatatatttgagaatcttagttatgatatattcaatttctgttcaactttttgatacaattcaagttgatcatggtacgagaggtttcgtcgtcggcttgccaattttattagtaatggcatgtttgtccaagtctaattagtttgttttggaaggaagagatggtggctcgatactgaatctaattagtttgtttagtggttgatgccattagccggttctcaaggaagaagaaggtgtgggtcccgctgtttgtaatctcagccgttgataccaacggaacacggatgggaataccaccgagggaacagggaagcctcatccgggattgggaacatcagttgtatttgtgtgctttgccacgtctctttttgctgaaaatttcattaatcttgaaggagtacaatagcaatttactgggataaatatacatataaccgcactggttaataattttttatttcaattatataatatataattatctgtatatatttttgaataactatttccaaattttttatatgttgaaaaccatataagtttacaaattaatttttatattacataactagtttttattgtttatacaataaatacttaaaaattgcaattgatatataccaagttgtacatgatgaagagtcttataaatctagctagaattcagatctagtatgtataaattacttcctctgtcccataaaaacttaatctcctcttagattgagttttttttggacggagagagtaaacctataaattttggaattaatagttagtactgcgtagtaagttgttggaatgaagtccctaaatctctacttaatatatatatcttttatctagattgtgttatcctgtgacgtggaattgagattacataaacccattttttaattcatgctaagggggcgctgagccattgtcttcaggaaataaaagaaaaggaagacataaccctctattttattttgtcgtagaacacccacttgacgttttcccaacagcttgaagaaagcgacacaagaatcccacgatagaactacatttgtatccatcataccatcatggcatcatgcatgcttgcggaccaaagatcttttttttttccaaaattgggccggagaagataatgctattcctataccacatttattagaacacacggattttttttattgcttctaaaattgagctatacattctctgggctgataatacttgtctttttatataaaggtgatgtcaaacgttagaatctttgattataaatctttttaaaatatttgtccttcaaatatgatggctacatgtatagactggttttaaatagtactttaataaaatcatatatttgttaatatttttatacatattattataatagaaaataagtgttaatttttttttagagaccgtacttttgtcaagacgataagtactccctccgtttcgaaatgtttgacaccgttaactttttagcacatgtttgaccattcgtcttattcaaaatttttttatgaaatatgtaaaactatatgtgtatatgaaagtatatttaacaataaatcaaatgatatgaaaaaaataaataattacttaaattttttaaataagacgaatgatgaaacatgtgctaaaaaatcaacggtgtcaaatattttgaaacggagggagtattatcgttccggaaagagtactagtaacagtaaacgcttccacagttatttttcctttttccgtgaggacattttttttctgtgaggatattaacagtaaacgcttccaaagattctttttccccctttcttttcgatgggaaaaacgcaccaaaagttctgaaaggattcgtgcagccccatatataactcctctcagaacgttctcctcctatacgagtataaatgctgctgtgtgattttctttttcctttttttagaacgtttgtgttttctcacgacaatcaataaaggcctcaaagaaatggtagaccccagaagtagccacctgtatccagattccatggggaggaaaacacacatgcgccggtggggccaggacgatggccgggaagttggagctctctctttctcgttctcctactccaacaaaaccggaaacctggactcccaaaaccgcggacgcagctggctgtttcggacgcccccgcggacccgcgatggcgacggacggccgagccgagtcgtcccggaaatctagggaatataattgcgcacaatcacgacgccatcacgctacagtagtaaccagtacccctctcctaggacaggtgccaggtgggacgcaggcacggcacgcgcgcgattttcacatcgctgcaaaaatggaatcacgatgcgcgcgctcaccgggtcggcgtcaccggccgcacccccaccaccactgcgttgtgagcacggccactccgcttatccgcagccgctggttatctccattattactgctccggctatggtgtggttgagattgatgggtaaaatataccttaccaaaattttgataaattgataatattactaatattttttattagaattatcttgataatgttgctaaaattctatgcacattgccaatatttgataacaaactaaacataaccacataattagcattcttaccaaataaacaatatggttgaaaatgtcattaatctgaacaggcccaatataatttcaaaccatactccctccattccataatataagtcacaaccactttttttaaatattctataatataagtcatgcatgcatgtagacaattaactataacaatttctccattaaattagtacttttttaattcatccactctcatgttctctaattctattggatgcatgtattgtatttattaggatgatccaaactacaagataataattattttcttggtttttgggttatgggtggttatgccttagggcatccacaatggttatctataggctctctacaagatatccatatcagcatattttcctacttggaagagattaaatgaagagagagcaaagctatctactaacctggagatagtctatagagaaaaacgaggcaacggattagagagctatagatacccatgtgtagatatgctattgaggtggtatattattaatctagttgctgagatgtacatattttatagatagcaccttactttaccattgcgggtgctcttttattttggaatggagggagtaccatttttgataaagttgttaaatacgtgtattcatttagttttttttatcaaactctggtaaatagataagaaatcctgtcaaaacttagtaatattatcaaattgctaaaattttagcattgccaaaatttgttaagatttaatcaaaatattgccctgtactaaaatattactgccctgtttcgcatgcgttgcgtccgacgagtgggagcaccggtgtcctggagtaccacttgtgctggtcaaacggcggtatgctggtatgggtgtgttagactgttgtacattgtgttgggggtgtatggtgtgttgtgtgtgaacaactgaacataggtaagggagtggggcttaaacaaacgatcaactgggcaaaatggtgcggggctgtctcctggattacgcgaacctggcgccttggattcaagaagaccggttaggggtgagagcattctccggattaacaatcctagtacaatttttttatatctttggccggtgagccttctttttttttcattcatacccgctatatagtagagatgctggcagttacacacggttggtctttcaaggcttccctcgagaaaaatagctgtagtttatagaagttgtttcgaaaggccggtaagctttataaaactatgggaggtaggagtatatataatatacatgtgcagatctagtgtcaaacttatgaataaattacgttcataagaataagttctacataactatgtttaattctatagctcacatctccaagctacagaatattccaaaactctatgagcctgcattatgcttcaacggtggcaaagagataaacatgtgattttaggatacaaattgcttatgcacttaggctccatttgtaacatacaaattcaacgacatcttcgcaggagttcgataaaaatacaaaacaaagtctttttttttttgtaaagaaaagcactcagttctccctttgtgttataaaagaaacccatgtttagtaacgttgattcttgaacaatagttccctggcaattttgattagtattatttgtggaaacttgtacgagaacatgtatacgcatttatggttcaattcatcaattatattaagcctcaagcgtcgatataaatagagctacaaggtttagatctcaagtaaatgagtaatcctagagataaactgcaaactaatcatatatgataatatcctaacaaatcagccggatcatatatgatcctatcgttctacataaagatgtcatcatttagcaactaattagctcttcatgttttgtgcgtaaggcccaccgtttgtccattattgtatttcttccataactcccactaactttgtattgggtaggtcattcgcggattccgctgtttagtcatgtatcaactgcacgcacgggctaatttttgcgattttcatactttttcaaatttcgtaggattggggtaagatcttttatgaaagtcaacttaaaaaatgatctacatattaagagaaaacatacatacattattttaaatggaacaacaaaacggagtaagacactactatacaaaacgtttttctacacggacaaagtagattatcgcatatggatggctgacccgcttgcctgaagctatatatctatgaaatgggggttttacatagacggccagccgtgctgcatgagttaactcctttcgcacacgtgcacttgtccctcgaaggaccgagcataccgcaggcatgagttgaggattgtccgttaaaaccaaatttacatagtgagatccaattcattgaagttgtgatacaattttttttctcttgtgcatcaaagtttgagttgaatatttccatgttttattatcaacgacgaggatccaattacttgaaattaagaatttgagacattttatacatccacgcccttctttttctactagtagtacgtgaaccaacagtgagaattgacaagtccatatgaaagtttgaccataacacatcctatcagtagcctgacgaaagagagaaaattggacgcagcttaagtaggaactaggagtgcctgccatactagtacattgctttactctcagggtgtgttttttccgtcaaaattggaagtttgattaaaattggaacgatgtgacggaaaagttgaaagtttgtgtgtatatgaaagttttgatgtgatgaaaaaattgaaagtttgaagaaaaagttagaaactaaaccagacctcactcactccatccaaatatgcatgcccgtggttatcttcaaaatattttttcttctcaaccacttatctgattttcaatcatctgattttcaatccgattacaccattgtacttgttataattaaatctttacaacatagatttcaaaccgttaaaacttaatgtttatatacaacagtggcatgtttcactatgggtttttactgtgttacacaaattttttttcaaatgtttcaatgtttactttttatttcaccatatataacttaatatttcatcgatggctgatatacatagggtgtgtttggttggtgggatatacccggataggccgccgctttttggagggtgtttgaatgctgggcgagagtgggatagggcggcccagaggggaatattctctccagatgctggatagagggatccggccgatttggccggatacaaccgcccgaggctcggtcgagccgggcaagcgagttgcgtgactcgcgtcacccctcaccaccacgacacgagcgaggcgacgagcgcagcggccggcgagaggggcgacgagctcggcggccggtgagagaggcgacgagctcggcggccggcgcgggcgacgagcgtggcggccggcgagaggggcgacgagctcggcggctggcgtgggcgacgagcgtggcggcggcggcgggaggaggcgagccgcggcggtgggaggaggcggccggcggcgggaggaggctgccagcggcgtcggcgaggccagatctggcgctgctttttttcctttttctttttcttttttcttttttctatgtgtatttataatggaatgtgtttttataatggagtgtgtatttataatggaatgtgtattatgtattaatttgatgaggtatattcaccatctcaagtgagaggtgaccacacccacaaatccaccatacttcctccaactaaacaaaaaaattggatcaccaaatctacctttgtccttacaaccaaataaaaaattggatcgccatattcacacaaccaaacaaaaaactggaccgccatatccagcaaaatatggaccgccgtatcccatccaatcttgaccaggaaccaaacacacccatagcttactgtatactctatcaatgcatatatgcatgtagtgatcttcaaaatattttttttttgctaaaactacttatttaatccacaatctgatcacaccattgaattcgttataattaaatatttataacaatatatcatataattatatttcaatgaaataaaaatatatgtttcaaacaacacattgtttcatacgggatagcgatgtatttcaacgtgtggttttaccgtgttttacagatattttgactgtttcaccatgcactatttaatatttcactcgataatcaactgaaatatttgaccatttaattttttggtaaaatcaggcactcgatttgtaggtgttcgaaagtttggctctcattttcgctggaaaaagcgaagaatatgcatgcctcagctcagcgcaacttcaagcgggcgacccaaaaagccaatttccttaaacaaactgctaaccacatttagttaacgttgattgactccatcaacagataagcacgagaggaggcgcgagagagggagaggaaaaaaaaagcaaataaagtgggtacaggcacgggtgcaacagccaaaaactatggagagcagcaaaggaggagaagaaaaaacaaacgtgggtttcttgggggtggatgactaggaaactgagagggggaggagagtggggggacctggcgggaggcgggatccggaaacccgcccacggtattgggcgcgcgcgcccacagaggcagcggaaacaggggccgtcgctgtacgatttccacaaaaccgggagccagagccaccccaccccctcccctttccagtttccgcggtatatgtggtggtgtggcgccgcggtctgtggctagcttgcctgttcgctgggccccaacggggacgtggacgccacgcgctgcgctgtgctgccccgcgcggcccgcctcctcctcctcgcctctcgggcacgcaccactgaccaccctcctttccctgcgccgtggggtccactgccccccggagtcttggatctgttcgctctcttcacgccaactgtcagaggacagaggttaatcataaacacaactgcacagtaactagtactactagccacgatttttaccgtgcttttaaagatttattttttacagagtagaatgattggagaagggaggaaaaaagtggagccggagtactagtttctttgcagaatcctttttttttgcgggggttctttgcagaatctgagtcatcgccacgtcaaacaacctgcggtttactgtaaaatcaacggacggccgggccgttgtttcctttctggaatgaaagcagccctggaagatggtagtagtaggagtagtaaataaactggagtagtatacgtagtactaccaacacgtaatagtagcaaaagtgtgtactgctgctagtgtactccaggacgacgcgcgcgggggtagtggtagtagcggcacgcgagcaacagggaaaaagatagcacgcggttccaccgaaatctcccggccggggcgcctccagttttggagctagaatccattcctcggacgcggcttggcgctcaagcccgcagttaaaccacgcggtgggccccgccccttgattcgcctcgttttttcttttccctttttttttctggtgcggcgccgaacccggccttccgaaaccactggcgccgaacccacttataaaacaggcacccctctctctcctccgctccccgtcattctcacaccaaacatctccatctcaactcatctccaacaagcaaggcagtatcgagtcgagtcctcgcacaggcttggagaagaagaaggaagaatagtaccacctcggatctccaacaagtccggcgcccagttgataagggtttgcagaagcatttcgaagatgcggatgagttgcaacggttgccgggtgctgcgcaagggatgcagcgaagggtgcaccatccgtccgtgcctgcagtggatcaagacccccgaggcgcaggccaacgccaccgtcttcctcgccaagttctacggccgcgccgggcttctcaacctgctcgctgccgggcctgaccacctccgccccgccgtcttccgctcgctcctctacgaggcctgcggccgcatcgtcaacccgatctacggctccgtcggcctgctctggtcgggccagtggcaggcgtgccaggccgccgtcgaggccgtcctcaagggcgaccccgtcgtgcaggtctcctctgaggccgccgccgccgcccaggccaccccgccgctcagggcctacgacatccgccacgtctccaaggacgccgaggccgacgccgccgccaacctgctccgcgtcgcgcgcggcggccgcacccgcttcaagcgcgcctcctccagctccaactccaagcacggcgccaagcttgccggagcagccgccgccaagcgcgccgcgtcccccagcagcagcagcccgacgcacgagacggagccggaggcggtg

SEQ ID NO: 9586 - DNA, 76077 bp, Oryza sativa
ctatactactcaatcaggaataattaactattttccacttttacgaatggtcataaaggatttgccattaaactcatatgttatagacacatgatggtacacatgtcataaatagtgagtgttaaatccgtaattgtcacatcttaaaaaaggcaaatagttaaatgtaacactcaatcatacttaccccatcccataaaaaataaatatagaattgaatgtgtcttattttaatataggacgtgactacatatctagtggtaattgttttgtctaaatcaactaccacatcatctatgagaaaccctatccatctatacttgaaataaaatcttctcttaaatacttatccgatttatgattcgattacaccgttgtgttcgtaacaattaaatctttataataaaatctcacatggttatattttgatgaaaaattataaattactttataatatatctaaattacttttagatttcactaaattacttcttagacatataaaagtaaattcaataaagcctaaaagtaatttacatatattatagaagtaacttataacaaagagaaagtaactttaatgcatacttttttcattgtggacgtgactacacagttagtgatagctggtttgtactccatctaatgtcacattttaacttgaaaaatgcaatagtatgtatctttttctaatccctttaataaattatatattttaaatcacatattgtttttaagatctatttgcatcattgtactccacccaaaatatgtgacaaaacgagattcatattgattaggaaaacgtacgaattaccccccctccgaactatcatggtcgtctgaattacccccctgaatcacaaaaccggacattcttcacccccaactatgcaaactggacgaattacccccctcgacccaatcgacagtggttttggtctacgtggcgtacacgtggcagtccagtcagcgtttctttaataaaaaattatggggcctgcctatcttactcttcttcctctctctctctctattctctctctctcgctcgctcttttctctctcgcgcagcgcgcacggcgaggacgagctcggggacgggcggtcggtgtgggcggtcggcgaggtgaggcgagcgtggcggcgcggaggcggacacatcgttgattcgattggcgaggtgaggacggcggcgcatggggggcggagccagttgtgggtggcggagcgggcccgaggacgacggcggccaccggaggcggaggccaaccgggtgcacggggacgcgcggtggccggtaggctccccctcctcgttgtgggcgcacggggacgcacggggacaccaccgccactgcagctcctcctccgagccgtcgcgccgcgccccatcccacctccccgtgccaggatcggcgatggagactggcggacgcggttccaccgaggacgcaggcgtgaatggcgaccgggaatcccgctccaccaccccagatccaaatgcgagctcggtgatgacacatggagcttgggtcggcggccgcgcgtgcgtcggcagcagcggcggcggccacgacagcaacaatgccggcacactagtgccagcgccggtgccggcgtcgtcgtcgtcggtgagcgcggggaggccgagccggcggccgcggtggtggcggatgtggctgcgcgagagcgaggcggtggtgatggagtcgacggagcagagctggagctgtgatgacgctttctctcgtggcccaatcttctggtgagggggataactctcgctttgatcgagtgcgacgtttgcgatgtggctaccaaccagaacaagtccaggacgcctgcaatcgctacactacaaacgatgtcgtatcaaccgtgacgcgcggttgatgatccctgcaatgcaaacgagagaacactgcaagaacaagataagatgcaatctaaatattgcgaataggtaattaagcacaaatgaatagttgcaattgaagtggtagatctaatcgacccagcaaatcaacacacaaactattaggggctctgaatctatagtccttgactaatcgaatgaagactagagacaaggtgaatggcacttggcaaaattcaactaaacaaaacccaattgtttttaaggatgtacaaagctatttatagaggaaaataaagctagggttaagtgctaattcgtggaggtggagggagacacttccgagatgggcctagtctattacaaggcccaagacccaagttcggtttgagcaacatcactgtcttgttttggtgattcccgttgactcgagatgaatttggacatgagaccgaatgcgtttgaaaggtagcgagatagctttccacaaagtccaagatcacccaaatcggagttggcaagaaggcgctaggtccgtttgaagtcagtgctgtctccggaggccgaaatggacttggacttggaattatcattggaacgtgtgaagttatgtgcgtttccgacgaagtgatgtcctcatcatcctccccttcttgaattggagtcgtcctcgactcaatcccatcttcttgatcgtgttcactctgtcgtccaggggtcatccttggaggtatctcatcatgaaaagcaccctcatattcctgcaaaaggttagtaacagcgagtagcaaagaatataaagtactggaagcagtagccaatgtgggtatatgatctttgcaaaatagaggatagcaacaagaatctagctcttctagtgcacaaatattatatttagaagctaacaaagcacccgtcaacttaatttcattctttgtggcacttggttctgttgtactaggtgaagcaagattcttagtaataatctgattttcacttttcgctttcttttcacattcaagacttgcaagatcatctttcaaagcagcggctggagtcatagaatgcaaaacaactcttttaccatcgaatataaatttatatgtattagtcctaccatcaaaaacaacttctctatcatattgccatggtcgccccaaaataacagaacaagcttgcatatacacaacatcacattcaatttgatcatggtaggagcctatagaaaaagtattttaactaagcgggttaccttcatcttaccacatgtattaaaccactgaatatgatacggatgtggatgtggatgggtagtcaagccaagcttcttgaccatctcttcacttgctaaattgttgcaactcccgctatcaataatcactttgacggtatggcctttcacaagaactttgctttggaataaattgtggcgttggttttgctcttcacacttctctttagcactaagtgctagcttgacaattaggctaggatactgatctagcgactctggatgcaaatggacttcctcgatgtcatcgttatcttgtcctcctacatggtcagtggcaactaaagcatattcatcatcacaatcactagtagaagtatactcaccatcatcattcacaaatagagctcgctgatttggatagtcgcgggcaatgtgtccaatgccatggcacctatgacatgtaatatcacgggtacgtccagtggaagctaccgaagttgcactcttggctggagtctgaactgaagcatttttgcttgtttcttgagcatgggatggcgtggaggtaggtggacgaacggccgtagtaaattgacgtggtgttgattgtcgtgtggaagtagcacctgcaaaagaactcctatgcttgttgcgtccctgcacttctctttcagctttgcaagcaaattggaataatctattcacggtattgtattctttgtattcaagaataccccgcatctccaccaaaatgataacaatccggcctaggtggggttggccgaggcccaacaaattaaggttgcctggactcaaacagttcttaggcacactaacttggggaaaggcccaatctccctaaaagactaatccaataggggaagggtggctctcccttttaaggtgtctttctcctcccaagctaagcaaggtgggattattcagaggctcacacggtcgccgcccgacttttgcgtctttgccagcggataatagtggaggatgtcctcatcattcccaccctcttaacaagggcccagctctgataccaaatgataaagatctggcccaggtggggttggccgaggcccaacaaattaaggttgcccagaccccaacagttcttaggcacacccactcggggaaaggcccaatctcccctaaaaaaatagtccaataggggaagggtggctctcccttttaaggtgtcttccttctcccaagctaagcaaggtaggattattcagaggctcatacggttagcgctcgacttttgcgtctttgccagtgggtaatagtagaggatgtcctcatcaagctggtggacagcatgatcaagatgctgtgcaccaatggcgtctggtggctggaggacctgcaggacctcctcgcctgctacctctcgctcaacgccgccgagcaccaccgcaccatcgtcgcactcttccgccgcgtcatcctcgtctgaatccaccttagcagcagaggcttcttcccagccaaaggcttcttgctgacgcggtgcagcctcctgccgaccgcccgtccccgcactcgtcctcgccgtgcgcgctgcgagagagagagagagaggaagaagagtattacatgcgggacgcacaatttttaattaaaaaaacactgactgtactgccacgtgtacgccacgtagaccaaaaccaccgtggattgggtcgaggggggtaattcgtccggtttgcatagttgggggtgaagaatgtctagttttgtggttcagggggggtaattcagacgaccgcgatagttcgagggggtaattcatactttttcctattgaatatattcaaacatttaattaatttaaaagtaatttattacatgttagaaagtaacttctatgttatcaggaagtaactattacatcttatacatggttaattctcattagttattccatcaatgttatttacaatccatcaaaggttttatcttcttttctctttctacatgaaaaacaaaaatgaaaggaaaaaaaatcggtaattaaacatatttatagagagttacttcttaaccatgcaaaagttacttccaattaacattgaagttacttttgaaaaacattgaagttacttttaaaaattgttaaacttacgtgtgttgatctgtgctgattaaatttaatttctagataaagtcatatttttatccctacaacgaatttacttctaatgttgtgacaaagttacttccgttttgttttaagttacttttataatatatgtaaattacttttagactttattgaatttacttttatatgtctaaaaagtaatttagtcaaatctaaaactaacttatatatatatgataaaagtaacttatttatataataaaagtaattaacaaatataaatattttttcatcgtaatataatcatgtaatatcttgttgtgaagatttatcgtaacgaacacaatggtataatcggattatagatcggataagtaatttgagagaaaactttatttgaagaggaaaaagacacccacgtggatggacgccacgatgacgtgcacgattagacggctctgagatgtgtcgcactatacagctaaaccgagagcgctctcgaaatagatttcccgtttaatataatgaatctgattgtccagattcgttgtacgtcctagatttgattttttttatggactagatttgacttttttattactgagggagtataattttggatttccgcattttcctagagcacaccacaccagcaagcccgcccgcagcatacctcctacgcttagcgctagtagagattaatgttaaggtaatagcgattagcgttagcatgccgatttttggcaattttttcattgtattttataattaaatgtttcatcttaaattttaaaatattctattgaaaattttcaattcgaatgttgaactcagatttcaaaacattcgtctcaaaatttaaaactctcaactcaaaaattcaaatctgagctgaaagttttcaaatccaagttaaaaatttcaaatattgatttaaaagttttcaaatctgaaatggaagtttcaaatcttgacttaaagttttcaattctgagttgaaaagtttttaaatcttgacctgaaagtctttaaatctaagtttaaaacttttaagttaacttaacttaaaagttttcaaatcttaagttgaaggtttttaaatccgagttaaaaattttcaacaagagaaaaaggagattggataaggtgtgcgctacttatcttgctagtgcatatgtgttaaataggattccagttccactagagaggtgccaaaaaaaaattaaaaaccccatctccacatatctcgctctccataagttgggagtcctccttgtttctatccacggatccgaacgcgagcacgaggaactgttggtaggaatgggtgattttttatattgaaaaatcagatttcttctctaccgagctcacttatcaattgtagggaatcagttttaggcatccattggaaaagacgactattttcatgcatcaaattctgtttagggttctcaaattttttttttgaggatatatttttttaatatctcttggtaacgttctaaccccactagtttcgttctaccttggctcttcccttggacttcatagtttgtcttagatttcgtgaagatagctttagcattttcccttctaggtgtattcatgttttctttaaaaaaaattcaaaatactggtgcgaaaacgatttagattgatttgctctaaggatagcaactgagctagggcttgtcacatatggagtcgctgtactaaggcgacctaagaaattctgttaaaaaggattcttggtatcctgcaagcatggggtatttcatatgttggatggaggagtaagattagagtcatcaatatcctgtgaggattatacaaaaggtttaccatattcacacatccacgaacccacccctaaacacgtgctcaaatagccagaggtcggcagcaaatctcaaaacctcactaaatctatctattatattattaaaggaatagaaaaaagaacctccacgttcattctcatggcctagaaattctcacattaatcggagaaaaagaaaaagcagagtccatatagaaatacaatttagaaatagctgaaattcagaattaaaaaataaggaatattagaagaggagactagagtccatatagaaatacaatttagaaatagttgaaattcagaatagaaaaaggagcctccacgttcactcccatagtctaaaaattcttacattaataggagaaaaagaaaaagcagagtccatatagaaatacaatttagaaaatagctaaaattcggaattagaaaataaggaatattagaagtaaagtatagagtccatatagaaatacaattaggaaataatataaatttggaattaaaaataaggaatattagaagtagagtacagagtccatatataaatacaattaagaaaaaaaatagaaatccggaaattaaaaaataaggaatattagaagtagagtatagagtccatataggaatttaaaaactaactaaaatttggaataaacataataaaattaaaagtagagtttagagtccatataaaaatataatttacaaataactaaaattcgaaattaagaaaaacatgggaagaagagtttaaggtcagagtacaatttagaagtaagtgaaattcgaaattaaaaattaaaaaatattgaaagatgagtttagagtccatatagaaatacaattagaaataataaaaattcaaaaataaaataaataatattggaagaagagcatagagtgtatatagagatacaatttacagaaaattcggaataaaaaaaagaaatattaaaagacgagactagagtccatatatgaatatatataatttacaaataactaaaatttgatattaaaaaaaattattaactaacacgtatataaaatataatataaaaattcataaataaaaataaataatattggaagaagagcatagagtctatatagaaatacaatttacagaaaattcagaataaaaaaagaaattaaaagacgagtctagagtccatataggaatatatataatttataaataactaaaatttgatagtaaaaataattaataactaacatgtatataaaatataggggcaattgtattcttgcttctactttgcagtttaattgtgattttacccctaatttttagggtttgtgattttactcctgcttttttttaaatgaagcacccgtttacccctagttttcacggtagtttgatgggcccggaatttcccaataaaacgaagaaagaaaatgatattatagtttgtgaatgaccatcccttggttcactaaaagggctagccagtaaccacttctcttgctggaacgatttccccaaatcgaaaacctagcgacaagcggcggcggcggcgacgcgcgcggcagggaggcgcggcggagaagggcggcggtgttgcgcgcgggcagggaggcgctggggagaggagcggcatcgtcgcgcgctaggcggacaggcaggagggcgcggcgcggcgtgcgcacgcgcagggaggcgcggcagccccgcggccagtgcgcaggagggcgcggagcagcgggcgcacgcgcagggatcaaaacttttgtaattcagggggaggaggacacctgcagcttcgtcttcctccgtcagtgccttcgctaccgcctcctattcgcagaggtgatttgatcgattcagcttggagttgcattgagccattggttggggacgctgatttcatcttcttgattgcgaatcggggatggatgtgaatgtgatttgcgggtttgtaggctgactgggaaggtcgccgtcatcaccggcggcgccagcggcatcggcagggcgacggcggaggagtttattgtcccaaataatgtgttctaatcatatgacggagatgctgtacatattgtcccaaataatgtgttctgtcatcttttttaaattgtgtcaaaattattgctaaaattctgtcaaaactatcctaaatatagtgttctgtcaacttgtacaaaatttgtctaacatttaggtcccatattaaatacgcacaaatttaacttgaaacatgtccggtgttcatgccaaaattatagtagaggtatatttgtccattcactacacatttaaaaccattacatgaggtaacatagtaggggcaagcagctgcttcatttaaaaaagcaggggcaatattacaaaccctaaaaaaaaaaggggtaaaatcacaattgaactgtaaagcggggtaaaatcacaattgaactgtaaagcaagggtaagaacacaattacccctaaaataaatatgatatgaatattacacattagtagttttgtaaagttattgcaaaatttaaaattatattgttattttaatatatttgaataatataatgagaaaacatatatgctattacatgagagaaaatataatgatgctaaccacgcaatctgcgcgggccaccatgctagttcctatttaaagcacaactgcatgtttgtaatatttgtaggcatcaaaatttaaaccccgattaggatgcatccataactccacacaacacgactattgattcttcagtaaatttcaagttttgctataaggctaaatcattggtgcttctgaaaagtagatactacttccgtttttttaatagatggcgccgttgacatttctcacatgtttgaccattcgtcttattcaaaaattttatgcaaatatataagatataaatcacacttaaagtattatgagtgataaaataactcataacaaaataaattataattacttaaattttttgaataagacgaatagtcaaacacgtaagaaaaagtctaacggcgtcatctattaaaaaacggagggagtatttgctacggtcaagatttttgttagcgtatatatgccacatgatgtttgacctaagacattacaagcatttagttcgttgggtcacaaaatggtcaaatgcaagctctagcagtacgacactgtctgtaccctgctcacctgctggctgctgcagtgctgctgctgcttcatggaatgttggagctagtttagtggtagtgagcaccgaggggtacaaaattactctcttgcttcttattacaacggagacataatcacaaaaaatgtgtctgtatacatatattcttgcaatcttgcgagcatcgctctatacacgcacgacgacccaaaagaaagtgaaaaagaaaaaacaaacaaaaacaaaactgatgtaccgtgcgtgttgtcagccagctatgaacactaagctctgcctgacggccggaaccgagcaaatgagcgaaccgaagatccccgtcaggccgtaagcgatggcgcagaagggcagcgcttcaggctccttggccgacagcgctgctgttcccagtccatgagcactgcaacgtaaatgcaaacattattcatagagcatactgctgtatgtatgtatatatatgcagcttaacttactaaaaaaagcagccagcaggtaggtaaaagtaaagaaatttgctatctcgtggtataccaaatcattttcgatcatttgatctaaatcgtttccgaccattggatctagttatgtaggatggacattgttagatctaacgatcggaaacgatttgatactgtgaacccgtgaggtatcggtatctcgaaatactttttgttggaccggaacaaatctcaaaagtaaaactcaaaggtatatatgtacctggaagccgtccctattcctcgcgcgatggggtcgttgaggccaagcttgtccatggctgcttgcacaaaatttgcgccgatcagcccggtgaggacgacgaccgcagcggttagcgaagaatttacacctgcatgcccgggacacacaaactaagtcatccataccatatataataagctagctgagtactccatattatatatctagctgatcgaccagcaagaacagaaattgatttccagcaatataagtatgtactaggtccgtaccttcaaagaaagacacgatgctcagagccaacgccacggttatgcacctcggtaatattgatatggtcagtgaaggctctagccctatcacccgtcctaggatggcagttgagtataacgagaatgttgatgcgatggcaattgatgtgaaaatttccgctgcatgcctcttcacaagctgagttttacccaccgcaaaacattattagttgattagccaacacacaccagcaacaacaaacacagagcctcaggatatatatgaatcatctcacaccataaccatgcatgctaactgagaataattctgcagaaacagcagcaagcactacctttctctgcttgaacattgagaatgcaaacgatatgatgactgaaccaagaaatcccatcaggacgtcaccagctccaggattagatggcgcctttgtgaggtaatcacctggcaattaaaaccaacttatttcagaattcacaacttgattagagcactattgatcagggtttagtttacaacctagcactgcatcaactccagaccgggagagatacccatatgctattgctgccaaatctgcagagagtgcacaacaaatgattgggtgaagcactttcttgacaccagatggtatcctgccaagtaatcaataagacccatgtatgttgttagagaaatggagtaaacaaggcagctggtggcttcgtcagatcttacagattaagtgtatacaaaaagcatatgtatttacccagaaccaaccatgtatcccagtacagttgaagcgaggaggaaaggaagacatgttcttgccgtggtgccaagcgctgtggggttaacatacgcaacagcaaacgatgcgacaaagacagcaccccaggcccagaattccagcgtcgcgaacggagacggcttgctcatcggctcagctggtataagctgtgtctggacaatcttcctcacggtgagtgctgtgtatccggccaccatgagtgaagcaaaccagccaccaactgggaaatgaaaaccagataacatcacaccatcggttttttcagattgaatgcaaattaatctgaaaccaagggcatgtttagatcccaccctaaaattttacaccctgtcacatcgaacgtttgaacacttgcacgaagtattaaatataggctaaaaaaataactaattgcacagattgccactaatttgcgagacgaatcttttaagtctaattgctctatgatttgataatgtggttttacagtaaacatttgctaatgacggattaattagacttaataaattcgtctcgcagtttactgccggattctgtaattagttttttttattagtatccaaacaccctattacgacaccctatataatatccgatgtgacacggtaaaactttacacccctgaatctaaacaccctctaagtaaaattgttgtgatttatgaatggggccaatccacaatgcaagttggtgtggtaatatttactgcaagttaattgatcagcatatcaaatacgaagtagtagaatgtaaaatccggaggaagcagaggcggagcagataagcacgatgatcaggaggaagaaagaagtagcagaatgcatgcaacgataggagcgtagtgatgtgcatacaaatgatgaggaagatcttgaggccggaagcagccgggacgtccctgacggcgagcggcaggacgaccagggaagggacgtagaagaggggcagccacctctggatgaagagggtggccggctcgaagaagtccatgaaccccttggcgagcgcgggcgcgaaggcgtcgaggacgacgaggacggagaagacgcagaacatgccgaagagggcgctggggaacttgatggacgccgccgcgaacgcctgcttcaggaacttgtcggaggccagcacgatccccagcgacaccagcaggtgcgcgatcccgacgagctataaaatccatacatagctcacgcatgtcagttcgatcggcaggtcatgcgaaatcgcgacgaggctgcgtgcattttgactgattgacgactcacgctgggtaggcccgagggagaggtggcgcccgcgcctcctcctcctcctccggcggcggcggcggcgtggatcggggcgatgaggcggtggcgaggattggcgggagccatggagattgccgccgcttggcgggaggaggaggaggaggaggaggggttgcgtcggcatcggcggggaggaagcgtgcggaggcggggcggcgacgtggcggtggcggagggcgaaaggcggcagcgatggctgctgcgtagcgaggcaatcatgcagggggaggatgatgatgaggtcgctgccatctcttctcttctcttctcttcttctccttctcctttggccagcgagagagcagtggcagtgacagtggatgagaagggagctgggagcagtggcagaggccaggtggaagagaggagggcggcagagggatgcaagtgtggccagaaaattgggatgatttggggattgggattgttgggctaccacgcgccagcatatcgtcgttgcttttaggcgtgggtattcgattcggtttacactagtatggtctatgtttggtaaaactttaacattgaagaaaagtaaactgaaattatgattggaaaaaatctatctatctatctatctattaaattaaattattaaaacagccttaaaattaaaggagacaccgtatttattgtgcaggctaaaaattcccacattaatcgaagaaaaagaaaaatatctaaaccattggatcataatagatctagattttagcggtaagatttaatcagagtttcgcaaagtatatacacaacaataaaaaccggacaaaaggtaatatcaagtcagaaccggtttagaagttcaaaagtcgaaaaggtttattacacgtattccaatagctcttatggaattggaagcttttacagactactactcctgtcacatgacataaaaatactactacgaaacgctataatacacggattcacatgcaatagcttttctagagattcctatggccaaaacttttacagcaaaaacttttacagattactactactattcaccgaaccggctgattcctatgctgatcggattcgcatccaataaataccaagcaatcccacagctaacactacgagaggtgtgtggctttttgacattttattaggtcataatatatgaagttgacgtaatttcaaacgtcaaaaagccaccgtcataaatttagtatgtgacgtttgtacatctattgtcacaagcatatgacattgctttattatcacaaaatcctggggcttgccacgtggcagctgacttggcagttgacatggttgaaaaaaaaagtcacaaaataagattcggcttgctaaagcccatgtagctcacgggctacaaaatttttttttctggggttgtttctagctggcccagtatattatttgcttctttttaatgagtgcagcctgtacaaattttcagcccacaccaattcggcccatatgatttttctagcccgcacaattcagcccatatgattttttcaacccctacaatttagcccatatatttttccagcccatataattttttcagcccacacaactcatctgattttttcagcccatacaattcagcccagatacaatatttcagtacatacaaaatcagattcaaatgaattaacattccacaaatgattgcaatatcaaatgcatttcacatttcacaagtcttaaaattcaatatcagtacatccatccactggcagtgaattgattggccaatatctgattgaacatagagagattttaatgaacaattccgcagaatatgaagaatgagaagaattgaaaatacaactaactcgtttgttttgaaacaaaccattccctcaagctagctagcaacattgaaaaactaacacaacttgcactgtacttatgaagtgcatgcatcgtatcgatcaccagattatgctaaagagatccatcaagcaaggatgcatttagaaaacattcagattaaaatcagttatgatctgtagttcaactgctaaaacttttattgaggtcaacaggttacaggtagcgaataactcagaaccaatccaatgggccaatccgtgataaaagaaaaggtggcaacagtagatctttatattagatgaggtcttatacttgtgtgatactggaatatcaattcaagctattttctgctagctatgtcataataaggtgtgagatttgggtacctgctacacttttttttaatagtagcccaaaatctttatatcatcagcagattgatccttgtacacataaggaccacttaggtaccacgaacctgcagcacaatgataatattcttcaacacatcattgatttgcttgatcagggatgtaagaaaaattcaagggggacaacataagagcaatcagacaacaatatcaagaaaaacagtagttacctttttgtatttgtgaaatttaaagaactactactatgccggaccatgccaatcaaggttgaaaataacaagccaatatgaaggcaaaattaattagattcatggaatgcaattcggttgcacgctcctagcacggaggtcgggaacacaacacaccttgtgcttcaataaaatgtctctaaagaaagatgcatcatttcttttaatatatctgtctttggatccactcaaaccaaattttaagagattggtccttgggcaggttcattgtgaggcaatctaagccttggtaatgaaaagataaacactcaaattcctggaccagagaaatggatcaattttcatagtcagaattagaattgttccatgccaagtttagttcatctaataggtactactcaaatataggtctttgcccttgcttgaccagtgaaccgttatcttataaaatagtaaaaactaaaagtaaagaaataattgcacgtatggatattaccttcatgttgtgcttacggagtatatgaaattagatacatcaactagagaccaatcaatgctaaataaaagaacaaaatctcctcgaccaacatcctggatagatatggagacatgttgatcatctatattaaggagttcatgtggtcctgctcctctgcctctgtctgaagtttgggtagcctgaaacaatggaattgttaaaactaaacactagacagtctaattagttgactaacagttgtcgtactgattagttcgccaattccccttgacctttgtcaaatgcaccttcatatgcacaacaatttactcacatagaaattccattgaatatcttgcaaatgaatgaaattgtgaatctaacactacagctaatgatttctagaggaaaagcatactcactgaataaacgaacccttttttttcttgagagcaagcataatgtaccttgtttgtgtggatatgttgtttaaccaaaaggagctccaagacaccattgtctagagcctccatattatctagagcactataaacaaaatatgctagctgtgtactgtttagcagtcccaagtcacataaaccaagctactaggaataaatcataattgagcttaatcattgattttctacttttgtggagtatggaacaaaactacaaataaataacaaaaccattccttgatatgtctatatgtacatatcacgaaacataatgtatatacatgaatattcaccaaatgaagtcatatccacgctgttttgtgtagtgagcttaatcaagtagctcttggggattagcaccggatcaatagggcatgttgaactgttagtcgatacagtagttagatgcacacaaaccaccacatgaccactcacgggtgaaacataataaagaaccttaggattatacctgaccgtttaggttcctattcttcttgacctggcgaagaaatatttcagctcctgcacttttctattgcagcatgtacggagataaatcaaattgattgctgcatataatttattatagaatttgtcatgttaattcagagtgcaagggaaacaataccttagaggtaagcactgtcaccgtctgaagtagctagaaggctctcagaatacatgatcgtgttgtagtgtctagagattatttcgggtaaacactctacataatctttctacaagcctttgcattagcattggacatgtatctttttctaattactctgatttctaatcctttaaccaaagtctcccatgtgtatagcatagttcagttaatcagttggtgcaaataacatggagccatcacaatttcgtcatcagttggttgcaaactgtaatgcctgaaaaaagattgaccaagaacattaacaacaatatttagcttctgacaaagttttctctccacacagcaagtgtaacaacagcaggaaaaaagtaattttcttaataaaactcgcaggaatatcaagcgacggagggtgcgcaggtgttggcggacaggacgacacaaccggcgttggggcagtggaggaggatctgacgacgacggctgcatggcagcgacggtggccgtcgcgagattgatggcagcgcggagagaggatatcggcgaggcgaaggacgacgcggtgggtgatggggaggcggacgcggcggcggtggacaggacggcgcgacatgtgttagggatcgagagctggaccaccgttgccgagttcaccccgtcggcggatctgacgacgactgttgagccggcgaaggggactcggggatggtgaccgccgcgggattgatggtggcgctgagagaggagatcggcgaggcaatggcgggcaatggcgggtgatggggaggaggaggacgcgacggcggtgggtgaggaggaggacaacgcggaggcggtgtggaggaggcaatgcagcagcggtgagtgtgaaggaggacgacgcggaggcgatggggaggaggcgatgcagtggcggtgggtggggaggaggaggacacggcgacggtggcaggtcagggagattcggcggcgcgggggtgtggcaggaaggggttcgagagcggtagtagcgagtaccgcgggcgaagtcttcgtgcggtgatgggagcgaaaatcacggtggagataggatggagttgcggaaatacttcccatctagcgtccgatcacggcgaaacttcggacgcctcatcatttcctcccccatttgaatcacctttttaatgttacatgctaatacctcctcatctctttatcatgttagaaactcaggatgcaacttttgtgcaagtatatatgcatacgtaagttgaatgtaatctttaaaatcatttttctccaaaactactcattcagtctatgatccgtttatttcagtgtattcgtttcaattaaatctttacaataaagatcccgccttggtcgcccgggggagggggagaaaatcaggcgctccccccgcccccaccacgtgcgcacatgctccccctgggacccaccacgtctccccggtcacactgccacgtgtctccaccacatactccattacaacaaatcacccacatattttgaaaaccctatattaagggaattcgtttcattttttgttcaaaaaaatgtttcactatgtatagatctaatgttgaagtgaattgaaacattcttttgcaacaaattacccacatattttagaaaccctctattaagagaatttattttatttttttgttctaccaaaaatgtttcacctagtgtatttatagtgtttcactatgtatatatcaaatgttgccgtgaactggaacattatttcgttatttgctgaaacattgtttttatataaggtgaaacaaagcctgatttaaacgattgaaacattttcgatctattcagtgaaacaattccaatatacctggtggaacatcgtgcaacatttaaaaataattcaataattagctaaaaaaatttcgtcagaatatattcatgtgtggtcttgttttgaagatttaattgcaacgaatttaatagtgtaatcggatcataatttgtatacataatttaagagaaaaaatagattaaagtgtttttgcacatatcagtgcatgtgtcagaaatataacataacaagcgtccgtttttctgttatccatcggacgtatgaagtgtagtggtctccatggagttgctgtgcgagggtgaatcgcagtggacggtagggatgagagctatgcggatgaggatgcagatgatgataggaccaacatgttgatttagcctgcagcattgcaaggagataactccccctttttatattagtatagatatagatatctacctctatatatcaatggtagaaaaagaaagcaaataatttgcttaaaggacaagaagattaattgaaatttgaaataaaatataaaatgaattccaaaatagaaaaataattataaaagttcaagtaggaatacaacaagatatcggaataaaaaatatggattttttttaaaaatagtacatctagaacataaagatgacacatgacaataaataggggagaagcaacaaacctataaaggaccagagtggtggcggttgattgaacatctaaaagctataaacaaaaccccaaatagaatccgacgattaagaaaagagacgatgggtaaaccattaagtagcactgtcatgacagttggccggacatttagaaagcaaaagaaaaaaaaaaccaatgataattatgttcgattttaaaatttcaatgacaataaagaggggaggcaacgagtaggttgtagagtagtatagtggtggagccgccgacggttggcgggacttctaggaagtaaaaaatgaacccaacaataattatattcgattttgaaaatcccaatgataaagaggggaggcagcgggcaggccgtagacgagtacaatagcgacatttgacggacttctaaaagttataaaaagaaacccaatgagacaattaactctaaaaacctaattttgaaatattccaacaagaataaatagaagttgcggtagatcaagcaagcaaattaataaagggatggcaaaggaataagtagtggactggtgtgacttttcaaagcaacaaaaataaaaagttctgtaaaaaatatataattttatattggtgctagccacgcaactgcgcgggccacccagctagttactttaacaaaaactacgaaggggaaaaaaatataaaacccaagccgaaaacccccaactacagtaaagtttttagtttaaaccgaagcaccggtgaatcaccttctccatgcctgggcagtgggcaacgagaagaccacatccatggtcgcgtcgtccgcgagccatcgacttctcggcttcaactctcaagggagcgcagcggccgttggcttcccgcgccaccacggtcagatgccgaaccactccgccatccactgcatctttcaagtttcaccgctcttccgccgccaggcgccaaccggcctccgttcaccagcgccagcacggcccggcgggccccagtccatcgccctccgttcgtgtgagtccgcatctccgccaggatggcacgtggctgtgtgcatcgtcgcctcgtcggctggcaaagtggcgattcgatagctgggtcctgggtgggtgtggtcgtgggatagaataagtctactttgcctctctcgtctcttaccctcgatcgaatcatctctctaaccataaaaccgggtataacaccttccacatcaatcaaaaccggtgcaaatcgactccttcgacggtgggggtgtggggataggcttgcgtctgagtgctgactggaggaggagcatcaacgagctcgatatccaacaatgaggacagttgttcctgcatctatcgacggccagaaatgatgggatgcggcagaggaggcaagaaggtggcgaagaagaggcgcaagaagcgaatgatggggtaccagacttgactaggaagacgaaggctgacgagagtacacctgacttgacaatgatggtatggctttgcttggatgtcacccatttatagagagatggtagataaaaggtgtggacaccccgagtattataccatccagtgtccaacgcgaccaccacatactattggagaagtgggatccatacacgcataaatagccactcgtcctcaatgtgtccatgatcgcggttgacaaccttctattataataaacgaaatgtcgagtagtgagcgcaagacataaccgtaagatagcttgccagtccaccacgtcatatgcccgtcaaccactcgaaggtggcgaccaaaagcataccccagtgactcgatccaaagcgctatccccaattatctcaagcgatcaaaacccgttactcgtgcttagctagtccctaggaatgcgactagtctcacactttcatcgcaagcaattaataaacatagcaagtaccataatagggttaaagtgcagcgaggtatatgacacataatagggtccgaggtctcaacatacaacacataaatatagcagcggaagtctcaaatagagttcataagcaaaagataaaaccggtggtgccacaactccactagggcaaaccaaccgagcaagagccaagctgcaagagatcactcattgccctcgccgccctcggcagagcaatgaccacacaagaagcataactcataaccggaatcctctcctaaaattgcagacaccggttaagtacaagattgtactcgcaagtcttacccaaaattatatatacataagggagagagaaatatgcaagctttctagcctacagtgggtctctaggttcaacatttgcataaagctaattttattgagcaattaatgagtaaaataagcaaggataagtaaatctagcatcattttaatttatggacagcaagtatataattctgaaatgtataagcaaatgagcccaaacggcgctctcatcatcatccatggactaccaaagtccataccaacatggcacaacatgccaacaccaccatcaagcataatcacatccataataatccacatttgatgctaacataactagctaacacatcaagcattgtccataaccgaggacgcggctattcgaatagattatactttgatcagaggtgtacaattggacccacacgaaatgaacaaagatcaaatgctacacaccccgtcaagtgcggtacacaagtgattcaagctcattaaatgccctttcttagccccaccccaaccacctataccacgctggggttcccgacgactcagtcacgtgcgtgcgtgatgtgaccaaggtgggcgcgccacgcaggaggcacccccggccaaacctaggcacccgaggccctccaaaggctacctgcctcacaactctccaatgtggtataaatgatcacagtagaactagtaagaacaagccggtcccaaataagacatgtggtaagtacgaagggtgcttgaatagatgtcaaaatgttcggtccttaacgacctagacggggctacttgcatcaggggaaaccaacctcccatcatcgccctatcacccgtccaagtccaacatatttcatcaaccattatttagtgtaagtgctcaagttttatgcccaataatgcaagttgtttatataccacaattaatagcactgtccatccctatagttctattagcactaagcatggctaagcattaatgaataagaaatcccaagtaatcccaacaagtggtaataggatataaggacagcaataacacaagaactaaatgcataaataggttctacccatacaccataaactgacaatattaatatctaggcaatgcatgcatatatatacgtatagattgcaaccaaatcatttttagagaaagtataggttctatatgcttaggtgcttgccttgctgctgagggtagtcactatcctcctcgggatatggctcgttactctccggaatctccgaatctatcgaaaagaagcaatatgcgaataagagccaaataaacatgcacatgcaaaatgatcaataaattatgaaataaatacagtgggtagatcatattttaacttgaatttaggtgaaagaatcaccagattatcacttatggtttgggagatatgaaaatgacaagctcttaggtgctgaaaatggcagttctgtaaatattaacgtttcctttagtacattacaagtaaaatgcatttcaaaccaagatttcataataatgattatttttagagtaaattacatcactcacagctcctatgaaaaattatttcacagctatatgtgttgtcattatttatttatagatcttacaagttagaaacataggaatgctaaataaactcctaaacatgatttaagaggtagtttttccaaaaacaacaccacaacagcaaagagtactaaaatataagctcaacaaaattggtttcataattttagcttttaccaataatttcttacgaatttcataagagctagaccacacaagggatacatatagctatttatatttttactgggaaaaccagtacaaatgttggtcatttttattttacaacattgaagatcacgtttttcttaatccacagaaatttggttcactgaattcggagttcatatgaactagttatgaatttttaaagcgcaaacctctttcagctcaaaagctatctcagaaatcgatttctattttcgctcccccttttctccaaattccaccagacttcgctcacatggtagcaacctggacgtagggtcatgaggctaaggcctcgggctgatggcaagagacggagcaaggcctcgggctgacggtaagagacgttgcctagggctgcttcaaccgaaatcaaaagagattaacaccggatgagctgcagccacctcctagctgcaataatggagatggatgacctgttgaatgttgctgtagatgttcaacatgaagggaaataaaaaaaaaggcaccatggatggcaaggaagctcaccaaatagagggaaacaaagtcatgttgctgctgcaaccatgcaggctgaaaccaccactctcttctcctatttcaatctctctcaactctccatgcatgtgcaagatgttgggatggatggaaagcttggatgatggggattgttgtgatctaacatgcatgaattgatcttgggctattggatgggatttggggaggagaagtgagatgagagctcagcttgaggaaaaaaaagaaagaacaagcagtgaagatgaaaggggaggaagaagaaggggttatctctgcccccccccttaagtcctgaggtggaagcacgcccatgggtgtgttgtggggctaaagaggcacccaaggtcagtgacaagtgggcccaagtcgtggctgttaatgagggtgagagaggtaggtgaaaaactgagtacatattcgtttttgcaatttccaggatttattttctttccctctcttggtaaattcaatttgactaggtaaaactagttcaaaaattaagggatttgttgtggtgataggtgttggtttctaggttccatttttcaaagtttcactcaaaaattcgaaatattttaattctggtgaaaagatgaaattggttaggctgaaagttggtttgaattcttaggaggcctaaacagagagtaaaaattccacaaaatttatatttgttggtgataaataaactagtatttgaataaattattacacatgtaacttctgttcaagttattgttcaaatagaagtggtttcaattttaccgattagaattaattttgttatcgccaatgatcaaattgcaatatagtaaatatgaaatctaaacgacaacaaatgcacttctaaatacctggttatgaatgtagggctgttacaaaaggaatagaggagagaggtggaggaatgggggacaaatatggcagctattttaaaaaagttgaagtactgactatgatgtcacgtagatacaagtgggccaagtcaatgcgtcacgttagacgagactgttgtgctaactactaaatgaggtaaactgaccgttttgatagttgagtgatgacgctttctctcgtggcccgatcttctggtgaggggataactctcgctttgatcgagtgtgacgtttgcgacgtggctaccaacagaacaagtctaggacgtcgtgcaatcgctacaccacaaacgatgtcataccaaccgtgacgcgcggttgatgatccctgcaatgcaaacgagagaacactgcaagaacaagataagatgcaatctaaatattgcgaataggtgattaagcacaaaggaatagttgcgattgaagtggtagatctaatcgacccggcaaatcaacacaccaactattgtgggctctgaatcaatagtcgccgactaatcgaacgaggactagagacaaggtgaatggcacttggcaaaattcaactaaacaaaacccaattatttttttaggatgtacaaagctatttgtagaggaaaataaagctagggttaagtgctaattcgtggaggtggagggagacacttccgagatgggcctagtctattacaaggcccaaggcccaagttcggtttcagcaacaacactgtcttgttttggcgattcccgttgactcgagatgaatttggacatgagactggatgcgtttgaaaggtagcgagataagctttccacgaagtccaagatcatccaaattcgagttggcatgaaggtgctaggtccgtttgaagtcagtgctgtctccggaggccgaattgggttccaaaactcattggactttaatatcttgtagatcctccattcatccaacgtattctttggcaatgttttatatttctcatgcttggttgtatgcatatacttgatggccacatcattgagggagactatgtgtctgtttttttggttaagagaggaaaatctgactcggtccatagtcgaaggaggtaataccataatatagactttttccttctcgatttgcaagaggcccaaaccgaactatcaattgaacatctcaattgccatcagtttggtctaacctgacggcagaaacagattctctagagtagtctacaaagccagaactcaagaatatttcatttgaggaagataccacatacacttgatgtcgcaacagaagttcaccgagtgacttgaaaaaaatctacaagatatgataattgcaactgcaagtgtataagaattagggaaatgccgtacaactttccatggtcgtccctagcaatttgggggccccgtgccaaattcaaaataaggccttgtgttaaaaaatacaaattatatgaatagagcaaggctatatgtttttcacaaacgttgatatgtctctactaacattgtctttttatttgatctgcatcgcagccactggcccttcaatcaccttgcacttggccctaaatttcgagggcctatgcggtctctcacctcgcacttgctcagggatccttcaccttccataaaatgttcaacaaggtcagaggaaacattaattctgctctcatcaagcaccagataggaagctacaagtaatttcggctaaatttcccatgcaactcttaggccattcccaacccaagacactagacatagttgtcataaactccatatcatcaagaaactagtactagatatactctttcaatgcaaacaccacttttccatacttaaatttaatgtttcttatatcacatgatgtcttagatgatgtgtagaaactatgtgtcatgcaagatctggttttcttatctttcctcatttactcacttgctacatcatttttcatcctaggtgacaacttatttaatgctattgacaccattttagtcattaggttagggatggccttatgtgtttcatccatcctaaagctgaccgcagcattgctctagctttcgaacatgcccaacgtagtaaaatccttattactaccggtcactagtgaaatcatcgccaaataaagatttttattttcatcatttatatttttttattttcatttacatccaagggcaatggtcagatttcttttaccatttagcctccacacccctccacatggcgcttttccttttttatttgcgattttcttttttcctttttcaattttctcctatttttagcgttttcttttcgtgttttttttgacttttttcaatcttcaacacatgtgttttcaaaattttgagttagaagttttttaatcttgatttgaaagtttttatatcttaacctaaaaatttttcaatccgaattgaaagtttcaaatctcgacttgaaagttttcaaatttgggtcgaaagttttaaaatctaggttaaaagttttcaaatatgggttgaaagtttcaaatttgaattgaaagtttttcaaatttgagatgaaaagttgaaatttttcaaaaattgacttgaaaaaaattcaaatttcgattgaaagtttttaaaatttgacttcaacgtagatttcttttcaatctactagtaaaaaaccctgccaaaaaaggaaaatattgctaattaccataattagcactaatgaaactaattacagagctaaccgcgcagggcgtcgaggggggcgtggctgcgcgttacttccgtagccagtgtgcacgcgaaataggaatccctgcaattttcatgatcgggtaaagagaacacgatgtactacatcaacattacgatccgttgcccccaaatactatacaacgtgcatgcatggtatgtggtagttttttccgttgcaacgctgagacactttactagtataaatataataatcaaatatataatataagcttgtacaaaactttttgcctcaatactttctttaaacaaataaaaatatatgagacttaaggtttcatgaaatttatttatatatatggaaaacaatagcaactttatagaactctctccatcccaataaagcgtgcacacattttaagatttaactccctaaatatttaaccaacaataatttactggtaacatgcacatgcttacgctacggcttaacagttattttgacaattaaatatataatgagattggtataagattcacacaaaacggaacaaattattgggtgacttcggaattagacaattcattaaccttcataccaacactttaaccgaaattgagaatgcaaaagcactagtcaaagtgcaatgcagcatataaaaacagatagaagggattaaatctatcatctctttgcctctctttcaatggaaagacaaaatatttaacattttcatgaagcagcaaggaacagtcaaattttccaacaccaagaaattagttgaatttacttgctttgtctgtcgaatctatataattgatcgagaatagacaagtctcacagtctgctataaaaaaggacgtctttgcaaaagttgtttagtaagtacttaagcaggaactacttggccaacaaattatagattttcttaccaagtcaggagaatttcacactcatcaatttatctggaaacaaaatcctatgtgtgccataaccaatactaaagaaaatacatataatatagcactggtattggtgaagccgcaatcatcaagctgagcactatgatgacctacgtttcggtggtggcgacgcagaggagatcggcgaggtgggcgactgccagcgggcattgagcgtgtgaaaaaaaggtgggagagggtgcgaaagacgggagtcacaggaggtagatggtgggagggatctaggaaggctagggcaagcgtcgatctgggcgacctcggtggcagacagtacagggacgcggtgattagtgggtgagggttgtagaggaaggcatgcgaaggaaaatgggccgtgattgatttgctggcgtgtgtgattttcagctggtgaccctgcgtgcatgcgctgttgtcagatctgatgtattggatgattttcggacgttagatttgatgaataaggtccgtaggatatcaatgatgaactatagggtagattataaattaagttttatttgataaaaaaataatattattgatcgatatttgtatttacttttatataattatgatattattgctataaatatcataatatttaaaaataccattaattttaaagtggaagagtatttcataccgcggccgtccacgccacttgatgacacgctgtcgccagcggaagttcccaaaagtgacgaaatttcggcatagcgaaatttcgcagctcgacttggaaaacccaaaacggcaaaaagcacggagaaacaatccatcgacgtggtaatcaatcaaatcgaaagaaaaaaaatataaaagaaaagaaaagcgcacgcccctcaaagcagcagcggcctccccttccttggagcagagaggactagaggagcaccgaatccaaggtcgaggggaagaaaaaaagagaaaattccacgaataaaaattcaaaaaaaggaggaggaaaaaactgaatccccttgcggctcgtgctccttctccccgacctcgaggcaaggcaaacccatccttccccctggcctcccttctccgcttcgccggctcacgccttccctctctcgcgaggcggccggcgagatctgcctgcgccgcgctcccgctcgcgccgtggtcaggtgagccccatctcccggcccgatctcgtgcgggtttcctgccaattcgggggggcagggcgaggtgaccttgtcgtgtggttgttgttgttgttgttgttgttgttagggtttcgtcgcgtgatggcgtcgtcggggaagatggaggggccgtcggcgccggcgatgcggcgggacccgtacgaggtgctctccgtgccaagggactcctccgaccaggagatcaagtccgcctaccgcaagctcgcgctcaagttcgtgctccccctaacctgtccgccctgctcttgctgctgctttcgatcgcgctattcagattgcagaatgtgaacgtgctgctagtttagttgaatgcgttctctgcggcttcattgctcatggtcacaattgtttggatcagctgcagcaatttaccacatcagctgtggtgttcctcagaatcacttgaacttttctcatccagatgcatttaacagcgctgaactttatgcccatgtgtaattgactaatgatgtgccaattgtgtttattgaatggaccactgaacgcataacaaccgcatttttccaatgcaacatgaagaatgatgctcttactttattgtgctgagtagatatgtaacattatttctgaagaaacgatatgtcgcaaacatcattctagatgaaactgaatcaagtgtatttattgttttggattaaatttgggaggaagcattgaatgagagcaaaagtttctttgttgtacttgcattcttttctatagatacattttttgttagatgctattaccacaaacataagagcttactgtcttttccttatttttgtactgtttctgggttaccatagaacattttgtttcttgattggtgcaatactaacaatggaacagaaaagagaacattagagtgacttgtactctaatagtagattatttacgtgggattagaaactgtttggtcataaagggttggattagcatgctctatatgagcaaattccatggcaatgagtttttccttcttttggatatctatactttactaccttttgatgaccacatgattcttctttgggttattagtcctctctattaatgtgtcatctcaaatactgtcaccccattacaccctgttgattactgaattaggtctgtcatgtatttacatgtgtgatgtactgatgtgcttggctgctctatctattcattcctgcatctgcagtcttgatgattttctgtactcatagttcctgatataattgataggtatcaccctgacaagaatgctagtaacccagaagcatcagaactcttcaaagaggttgcatattcatatagtatcttgtcagatcctgagaaacggaggcaatatgatactgctggttttgaggtgctattctcataatctcatgctgactaccagactattttcgaacagttttttttgtgtgtattttgcttttactccaatggttctgcattcttctccttttctgatcaatcaataaggagaagtttggctgggataaatgaccagcaaggtgatttttggtggtgctgcaccgacatgtatcatactgttgctgtgtatttattagaccatgtgataactgatgagatttttggatgcttatttatctccaatcctttcttctgttgcaatgaagattagctaaggcagcttggtatataacgtcgtagactcatagagagagatttaatccctggaatctgtcaaagaagaaatggagattactcatctagcttgatatttattgtcatagatagacaatccctggaaaccacttaagaggtaatggagaacctgtatcctctaaacaatgacaaactattagaagcatttccaccatgtataactattttaattccaaaaccatttgactaagtacctttgtcatggataatatgcttaagatgataattgtaccaagtagccaagggccacagcttatcctttacaaatttgaactcagtggcattttttttgggcacttcaattattttgggcgtgtaggttaagatgtgtttgccaagtttcacatagttggcagaaataatgtaactttgttggtttgtaatctaaccatctgttgtaatatgctttcttaggcattggagaatgaaggaatggatatggaaattgacttatctaatcttggaactgtgaacacaatgtttgctgcacttttcaggtgactgtagcatctgtatgaattgttttctagaaagaatcgaggatcactaattgcctgctaactttcttacatattataccatttagcaagctcggtgttccaatcaagaccacagtatctcctaatgttcttgaagaagctatgagtggaacagttacagtgagacctctcccagttggatcatcagcaacgggaaaggttctgccaataccagttttatggtcttgtttataatgggacggctaccatatatatttttctatttataggttgacaagcaaagtgctcatttttatggtgtaacaataagtgaagaacaagctcagtcaggcattgtagtcagagtcacctcagccgcacaaagtaaatttaaggtatgaggttgattcttccttcaattgctctggaattgaagcttttatgttctgcatctctttgaatttcaggatattatttaattctctcatttgccaaatatttctctatagctgcttttctttgaacaagaaattaatggaggttatggactagctcttcaggtactttcgagccttcgcctttatataattgcatgattgatgtgttctgtagtttttctcattatttgtcaatggaatgccatgcggccatggattagtattactttctctgttcataaatacctggcgttttacactcggcatattaaacaacgtgacattttgcattttggtggataatgaggttctctgttgcacccttagcctccatgaataaatcaagcatcttggccaccttaatgaaaagaaaatgcacccttatctttccataaatgaatcaagcatcttgccctaaaaaaggcaagcatcttagccacccatataaaaaccgtttatctatatgagtttttatatgggtggctaagatccttttattttttacagcaagatgtaaatgcctcccttgcaactacaaatacctccctcgaatgaaggagattcacagcgattgtaaatgatttctccatggctgtaatcgtaacatagataaaatgacaccacataattgtaaatgaagtagtccgcagccataaatactatcagaattgtaatatagctccatggcactttttaggggtaaattttgattacactttgagctaaaaggttctaccattacaatcccattagtatttcattataatcaagcaaattctatttacatccatgttcatgagaccttacagtcaatggtacttgtttacgaccacaagaaaaataatgcgtgtacatgtagatccattacattctgtgttatcaacccaaaccaacaacaaaaagaaagaaggccctagtggtgacgcaacggcagtaactgccttgtgttctctaatgggaggttgaggtgataggagaggaggctgcaaggaccagcatgcaaggactctctgtcagggaaggaaggcagtgaaaccaacagtgtgacaaggtttggtggtggtggcttgagcttgtcgagcacagtaggctgccttcatcaccattctggtggataagtgggatgccattgatggatctggttgaaggagttttggatgcggtggcatcgagtgctggaggacaggggtgctgtcgatatatccggctagaggagacaaggccgcctgtagagcgctggaggtttccgctattgtcagatctattccaactcctgaggttgccactgctgggctgggggagcaatggtgtgtcattgtctcattgatggatccatctggtggaggagaggaggtgccatgttgagcgttggaggccactgccatcgtcaccattggtgttgaagtgggagtggttgggatgctgtcagctggagtaggattgagaggcggttgttgaggagggaggaagaggagtgggtagttagggttttggaccgtttgtactctgtttatacctgcttatggtcgaagcagtttattacagccaagattgacccatttactattgtgggctaccacttatgagtaatgcgagtggtaggggtgggagctctccaagagtccatggcgtagactagaagtatataaaaatttatcatttatgtaaaatgtgatatttctggacttctccaattttaattttgataccaattgtgcagtaagtgaccaatgcatgctgtacataactgtctgccaaatggataagagccaatgtttttctagctgtctccaagtttgcatctgtgtctctagttctgccattgacttctttattgcctctaatcacaaaagagtgtcgttttaggatgcacacagtcaacacaaattaattttgaccgtaattattatttggaacgtaagtttttaggcataaggacattatgtagccaagtttgtgacaacaagaacattaatattgtacttgtctaagttcttattttggttcatgcaataaactaagtgatcaaacttatgtcttttgagtgtgaaaagtaaaaaacaactcaccttttgtggctggagggagtagtatgaatggtcaacaatgattttttttttgttaaccagctatgaacatgatcttaatattttacattaatctgcagtttttttcttttttcattttgggtatgttaatgtgctgcatataaaaaaaattagaagcctagcttaataatgcatttggtaaacctgggcaccattacattgtaagttatttctatggcgccatgcttaatcgttgttgaatggcggatagatttgctaaacgtggcttgccacacccagcagcttgccgtctttgtgatcaagacgatgagattatccaacacctgctggtttcttgcatggtcgcccggcaaatatggattgaagtgctcgggtctacatgctatgatacccaaccagattcggttaggttttcgagttagtagtaccgagcaagcaagttcacaaactgaaacgaaaaggctcaactctttgattattgtaatagcctgggagatatggacatattgcagtgaaatgatgtagccagggatgttgtattagtagtgcgtttggtggaaatggagggcaccctttggtgtggtattggagcaaaggagcttgagagcttgttgtttgcattgctactagtgttggttgtgtattttctttatgtggctcttatgtgtcaaacgttgtaaggggttggatacttggatctgtttgttctttatttttcttcttctttaaatgattaaatgatacgcagctctcttgcatattcaagaaaaataataacctccagtttttttccgcacttccaggaagatagtcagaagactggtaaggtgacatctgcaggcatgtatttcttgcattttcaagtgtatcgtatggattcaacagtgaatgcggtatgtatgttctgctatatagctttagtttttatgctctttgggcctgatgtgatgtgagactttgctgcttcctactacagttggcaatggccaaggatcctgaggctgcattctttaaaaggttggaaggtctccagccgtgcgaagtgtcggctctcaaatctggaactcatatatttgctgtatacggtctgcaaacttactttatctgtttatatgaatgacatacctccgttctgatccatcctaattaatatgttcaggtgataattttttcaagccagctagctatacaattgaagcaatgtgtgcaaagagttacgaagacacaacacagaggctaaaggaaatagagtctaaaattctagagaagagaaatgatttgcgccaatttgaaactgagtacagaaaagtcagccactacatctttttctacataacacatgaaatatgtatttagttttcttttcaatttggagagagctttgatcgagttaaatggtgtgcaggctttagcgcggtttcaagaagtgaccaacagatacacccaagaaaaagaagcggtgagcacatcttttctcctctgaatgccttttccttctttcacaattgatacttcattgtggatattgtagagacaaaagaaatagtcatcgtatttttgccctctaattgtagagtctaacataactatgtaagggtgaagcagactacatagtgatgttttttagacatatcacacctaccgtttttttgtagtgagcttgtgcctgtttgaactggcacagcagcatattgactatgtagatgcctctctgttcttctagacagagggtgtcaggctagctctcaaacaatgtctctaaattcttacatgtccacattttcttgatgtctatcttgcaccggcaaacttttctttcatagaaaataagtcaaactagaatatgatttcaaacattcctttggagggcactttgaaaagcaatcactgtgttataacttgcaagaaatgtgttataacttgtagcctaggttaacagtcgtgtgttatctttcttattagcatatatctcttcttctatcagtcttgcagtctgaacgttgactctgaattgtgtgaatccatggtatgcttttctcattgcattgttagaaccttttaacggccccatcagttggctgtttataagcataagcgaaatggcatatttgtaaataaaacttttatatacgtgttcttaacgatctaaaagcaaaggctgaaaaataaactacgatgaaaaaaatcccaaaatcaactccaaatttaaggttgaaaattcaaatttggatgataagcataagcataagcgaaaagatgaggccataagtgcttggctccatgctgtgttcaaattctaagtgagttgcatatttgcagctagtacttgattgccaacactgatgtttggttatatgaatattggtacccactcaaactgaaattgcgtataattaagtctgcacagtggatttacatggttggtgcagccatgttcagtgaatgcagcagaaatactgttattaagaattgacttgttaaattattttgtcagttgacatgcagtttcttctgagctttcgtcaattaaatagtgtcctagctgttaatagtttgaagtatactccctccgtcccaaaataagcgcagccatgatttttttgtgtctaactttgatcgtccgtcttatttaattttttttatgattagtatttttcttgttattagattataataaaatatgcatagtacttcacgtgtgacttctggtttttagttttttcaaaagaatttcaaataagacagacgattaaagttgaatacggaaactcatggctgcgcttattttgggacgaagggagtacatagtagtgtagcttacagaaccgtgcgctgtaaaaatttgaaaccaaatggcatcaatttatccttcacaaaaattcatcaaatagttatatctaccaatatgataaagtttgtatcatattcttttctcaggctgaaccctgatgattcttcattacttttgctaataatattggattattgctaaagagttgtaaggtctgcaggttgatgatatgctgagagaaagggatgacatccactcctccttcacgaccgaacgaactatggtgaactctgttggagctggtagcagcagtagtagataccccactgagagtcccgagaatggtaacatagatggtaaagataaatcaagtaaaaagaagtggttcaatttgaatcttaataggtctgacaagaaagcttgagtaatctttcatcaaggatcttccgctgttgtacatttcagaagccctattgtatttgtgcgttgtgagctataacggttaccaattcttgggagttttgtagcattagaagttttggacacagaaagtcatgtattatccttctttaaattccatgttcctgtcttacttttcttccactatctcgtcttcctcttgctcttttacctctgttgccggtcgagaaattgctaaggtaattcgcactggtgttggaagtgggaactcgagtaggttctttattgcaattgttgattatttgtttgttttcggtgctaattatcccatttcagcagttacattgtcagaacgagctccttggcattacccattacttatggacgtattgtagtagccactactttgggccttttaaggtcaaaactttcattaatcagaagaaatattaccgacttgatcgcaggtagcaagaaaatcctggtattttttttgttcatgctaacgatggcagttgcgacccttttttatttatgaggtcatctgctaaattgccatcacgttgatcaaaggacgacatgagctatttcttttgggattagcattccgacaaaaatttggggatgaaatcaccagattttggactcgacacatcatcgtgctgggcatgacctgtaactatgtagccttggtgcttgtaaagtctcgtactttgtttgtcctaaaatatagtatttttgagattagtacggatattaagaaaatatgtggaaatgattgaaagaagattatgattagttgaaaaaaaaagtagttaaagaagaatggttataattggttgtgaggagaaggtaggtggagaaatagcttcattttagaacaagacatcatgctagaaatagctatattttaaaggaaaaattggttatatagcatcgaaagttcacgtttttggttttatagcgccgaaagttaccggttcactttaatagcatccaaagtttaccatgttcccatttttagcacttccgttatttttttcgtccgtcttgatcgttattgatccagccacacacatgatatgacatttctacccctcattgacatgcattatacttgtacttgtgaggggtagaaacgtcatatcgtgtgtgtggctggatcaagacggacggaaaatgatcgagaattgacggaagtattaaaaataggaacatggtgaactttgggtgctattaaagtgaaccggtaactttcggtgctataaaaccaaaaacgtgaactttcgatgctatataaccaattttgcctttaaagatcgaggtaatataaagctaagggtctgttcgttcatgcatttaggaatgagtattgagttgcttgcaaaacgataaatctcattagcgtatgatcaattgagtattaagtattataaattttaaaaattattttaaaaatatttgtatagaaattttttagaaattgtacattctggcgatttaagaaacgaattgacggtaaaggagagagttgcataaggaaaatttcatcagtagtgaaaggaaagaaaaaagaaaaagaaagaagaggccagcactgacatgtcggtcccctggtcttcttcagacccaaacccacgcctcccccccatctccgatccgccgcgccggcaaatcccccacaagcccaactcacgccgatccacctccgatggcctccgccccgccggcggcgccggcgccggcgccatcgctggtagacacgctattccagcgctccctcgacgacctcgtcaagtccctccgcgccgacccgtcggccgccggcgagtccgccgccgtcgcgcgcgcgctctccgagatccaccgggagatccgcgcccccgacaccgccaccaaggccgtggcgctccagaagctgacctacctctcgtcgctccacttcgcccccgtcgcctcccacccgctcgccttcccggccatcgagctcatcgcctcgccgcagctaccccacaggcgcctcgcctaccttgccgcctcgctctccctccacccggcctcgctctccctcctcccgctcgccacccatcagctccacaaggacctctccccctccacctccagcgccgccaaccaccacgtcacggccctcgcgctccagctgctcgcctcccccgccgccgccgccgcgcccgacctccccgtccacctcgcgcacgacctcgtgccccacctctcccgcgggagcccccgggcgatcgcggccgccgcgcgtgtcatagccgcctcgccgtccgcggccgtgccggtccttttcaagccactggccgcgtgcctcgcgtcgcctgacccgcgggcgtcggctgctgccgcagctgcattctgtgagctgtcggcgccgccagccgatgctgctcctttcctgccgctggcgcccgacctctacaatctgctcaccacgtcccgctccaactgggcgctcatcaaggtgctcaaggtgtttgcacggctggctcctctggaatcacgcctcgccgcacggattgtcgacccggtgtgccagcttctcgcgcgttctgctgctatgtccctgacgtttgagtgcatccggactgttctaactgccctgccggcacatgatgctgccgtgcgccttgccattgggaaggccaaggagttccttgctgctgaggatgatcccaacctgcggtaccttggcctccttgcgcttggtatgcttggaccggcatatgcatcgacgttgcatgaatgccgtggtgtgattgcccaatcactgggtgatgctgactcaaacatctgccgggaggcgttgcacctcatgatggggttgatcgatgacagcaatgtcacggacattgctggcatgctggtcagtcatgcttcgaagtcagacccagagtttgcaaatgacattcttggcgctgttctttcagcatgtgggcgcaatgtgtatgagctggtatcggactttgattggtatgtctcactcctcacagatatgggtaggaaccttcattgtgcacagggggatgagattggtcggcagcttgttgatgtgggactgagggtgcaggatgcacggccagagcttgttcattcatctcgaactcttctcattgatcctgctttgcttgggaaccacctcctttgtcctgttctttctgctgctgcatgggtctcaggtgagtatgtgaacttcacgaaggatcctgttgagcttgttgaggcacttctgcagccaaggatcagcctcctgccgatgtccgtgagagctgtctacatccaggcagtacttaaagtgatcactttctgttgcaatttgtatgttgagaggttgagtgattcaagcaaggaagtgtctgtagcattgaatgggttatctatggatcaaactgttagtgggggaagtgacgctccaattgggtctagcaatggacaaattacagtccctaggatgatggaaaaggaccctttttcacttaaatcggttgttcacatgattaacttgattgaaacaacagttggcccacttgttgagtgcaatgaggttgaggtcctggaaagggcaagaaacttgattggttttgtttattcgctaagagagattcaagaattgaaggaaagcaagtttgatgatgataagcatagcagggtgaaggagcttgttaagaatatgcaaacagtattatctcacgaaatagggcctgtttctttaaatgcacaagagaaagtatcccttccagatgatcttgtcctgaatgaaaatcttgccgagcttgttgacatcatcagtgaagatgacactactctgtcatcttcaattgttttctaccctcgtagctgtggttcagtcgaaaccagagatgaacctgcattatcacttggttcatcttctcttctttctgagcaccgtaaaaggcacggactgtactatcttccaacaggaaaagcggaggatgggccagttgattatcctcatgccaatgatcctctgctgcctgctagcagcgaaagtgctctggatgataaattgaagactatccagcctgttaccggtgggaaaaaaccgaaggccgtcaagtccagaccaaaagtagtgaagttggatggtgaggatttcctaagttctatggtggctagtgcaagtgttccaaaagaagattctttatctggtgctgtacgtggtgtactgttgggtagagatctcaagccatcatcttcacaaaaggcttcagataaggcttacgaaggaattataaacaaaatggactctggtgaatctagttctcagtggaaaaataatgtagatgctgatttcgtaggccatcccacttcaagttctagaccaagtattcaacagagccatgataaagagagtacaaaccctcttgaaagtgatgggaaggaagcgagaaaacacagaagatctaggagtgggcatcgtcaaggaaaacataagcatagagaaaggcattgcactcaacctgatgtacctcaagctcctataatccaggattttcttctatagttgctgaggactcccttgtttttgatacatttctattgccaagtacatgttaccttttgttcattcacattcagcggtttttagttttcactttcatttcatggaagttatttagttggtttatctgtggcagctggtctaactgccactgttgtatcctgtatatctttcttgagcatagcacttgatgttcttcatagctccatggcaatatatttgttcatagtgtacaaaaccagacttaatgtttttatcttttactacctccgtcccaaaaagagtgctgtccaggtagtgagaaatgcactatttttgggatggtggtagtattaatgtagacttcttttacatccctccttatacctctaagaaattgatgtaaccttgcaaactaattatccctaatactgtaagaccatgggtactttcgctatgcatatccccataggcttacatagttactggaatgtaccagttatacacattcataaatcgttttcatgttcttgcttcacataacataaatccagttatatatgtacaatctagattgaacaatgcaaacatgtcctatagatgctaaataagatgaactgaatttagaagggaaaactcttttcaagatgtactacagtacataccgagggaaaagatccttcagaagtatgctagaccgtgatgatttgaaaagtgatgctagtcgctaggccagacaccatttggtgagagggtgacctagaacagccaggcagccagccaaggatgtcaggcacagtacaagaattggacggatcgcacgtaataaacttggaaaagcgaaaactagtggctttatcagcttggttcaggctctaagggctttcacagtgcggtgatttgtcatctggcctgagcttgccacgtctacgactagatgggatccagtgtcacgttcgcagttgggcccaccaaactgaagcctggtcacccgttcgaatgtttatacttttgtaatttttcatcagatctagtctctactctcgagactatccagactaaataaaatgtttgtagagactatccagactacttaaaatgttttctgtagtgcataaattatggaattgattttattagattctctttgtttctttattcttgatttgatgctactgtaatcttttgtattattcactcttcttttttttaaacatacatgtacttacctttcacaacttgttctgttttgcctaacatgaagtaaatatattattgctccggcggttagaccgataaactggcggttggacgggtgaaccagtggtccgatttgttctttttctttaccacgtgttagggaactagagtaagaaaaaataaactcgcaggatatacacacgagggcaactcttcaatctggacaggatttgtagtaaaacaagattcattttcgtactgcattcgtttattttgagatatatagagtagtcatgtaacaacataatgttacataatgtatgatattgtgcttaggagccccatttatatatacattgagggttaaatgtcattatgctacgcaatgtcagtcttctcaacctaaaaacctatagaaactctttcctttgaaaaccataccttcaagatggaggtacattatttagttattactccctccaggtatgaaaacgtactgttatagtgttatggacatgtttcaagtcaactttacacataaatatatttttaattaccagaaaaagtgcccgtgcgttgcaacatgaagaaaagatgagaaaattgaggagaggttaagaaatatttacattacttaattaagtaaatacaaatttccggaatacttgtatttttttaagctggtaggtgtttaaattaattgaaaagtaagtaagtgtgggaaataaaaatgatatggctggatttaatttttattaaattctccatagttaattacactctcttaaattttcttgaaattttcagagcttaattgttaattttaataatacaaacatcatttcaatatttatttaaataaaaatcctcattacactctgggccattttcagcccatagcctccctcagcccacaaccgagccggcctgctttcatcccttccctccgcctcggcccgcaagcacgcgtccggcccagcaagcaatcgaaagtacaattagcctccccatggttctctcactgttgtgtgggcctatcgctacattgtcgtcccctacctccgtccagggttcctcatcttcccgatgcctcctgatgtcgccgcctccgtcaaatcgggccacatccttggagataatccgaaattgattgagggggtttcaatctttatgtcctctttccgtttttctgagaatcggagcaaatctgtttcgtattagctgtgaataaagccctatccaaaccctatttttcctactttaatacgatgcgacgtgtgtttttttcccgtgctaacgatcggagacagacaaagtgcagcgtcacgcacacacgagtgagagggggagagggaatcagatgattgatggacgaaaataagtatgacaaacggaaatttaccaattttttaagtagttaagatttacattagacgtgtggaattatgtctagaatttaccttgaaaggtactttcataatattacaatactagtgttttttataaatattttgcgatggaaaatagcggacaaagttgtagccccaatgtctaaaacaacttgtttttatgaatgaagggatgtgtcccatctacccaaaatctcttatattttgagcgaagggagtacctatgttcttttttagataacattaggatattgtcatgactatctttcatgaacatatttgattattaattttttaatcatacttcataaaaattattaaaaacataagagtaaaatacacgaatggttcttaaacttgtgcttaaaatatatttttgtccataaccttgtcatgtgtgtcatatatatatacaaacaaaaagaccgaatgtgtatgatgatcggatctgtttggcggaatttttttaatttttaattttatttattaaaatattttaaaaataatttttggttttaaagttttaaaaatctacacccataacgccttctcaaagggcgttttttatgatatggcacacgcccgttggtgttgtaatggtcgggtgaacatctacgagggtggcaagagttttgcctgtaaatggtcagctccggttgttttgcaagcgccccctttagccctttgggagggcggccaggggttgcctgtaaaatggccgaccgctctccatgtgaccgttagaatgcatcacgtcataaataacgccctttggaagggcattttaaaaaacgacatcctaaaggatgttagggggcgtagatttgtaaaactttgaaacaaaaaattatttttgtaaagatttaataaatctatctactctaatgttataaaaattaaaggtatttttttttgctaaagtttggtacgtcatccatagtccgattcccgtgctcgtccacgcgacttccctgtctgattcacgtctgacattgatgtgatcgcgatagctaattcgcgcgcgcgcgttgacggcgcccgttttaggcccataagggctaaggcccacgcataacctagcgtgcatgcgtgaggcggatggcgtccatgtccgtatgttttttccccggaaaagctaacgtccacgcatttttttcgtttctttttgccatttttttcgtgatctttttattttagaagttgaatctttcatctgtaattttagttgaaggttttgaatttgagttgaaagtttttaagatttaagttgaattttgagatgaaaatttttaaatttgaataaaatgttttgtattttcagatgaaagttttaaatctgagttgatagttttcaatctttagttaaaagtttttaaatccgagttgaaagttttcaaatcttgacttgaatttttttcaaatctaggtttgaaagtttgagttaaagttctatttatgtattatttttttaaaaataataatactaacaattatcattaaaactaattaatgtcattaatgctaatcagcgttattagcacttagcagaggctgagatgggggagtgcgttacgtgattacccactcatgtgtgagatgaaatgacccaccgaacaaaagatggggtgaccgaatgagatggtaaaatatatgctatccatcattaattctttctgcctgcagtgccctaattacaacctggtggcatatatggttaatgagaaatgataaaattttcaaacagacacccccaaataccagccgtgcagtagcgtgcattctagatgacatacgagatagggaatttgctttcaaaccgccttaagcgttaatgttctttttcttctcttgttaaagtgtatccatattgcattgtctcctgtgtatatgtaaggcacctattctccttttaatataaccggcaactctcttgccgtcttctattaaaaaaatcattaattctttcattagccctttggttttattaatatttgaaaaagtcattcatctttcattcaaatgatttcttccatacctgcccaagagttatttttgcagaagcttattctttgtgctgtagttgtatatatatatatgaaatatatatatgaaacgcatttcatccctcgtacaaacatcccgatgaggtatacccctacaccatagttctctatatcgttgtgttccgtcattaatgttgataatattaattaattttaactgttttgctctcacttcaacttcctcaatcccagtgattcagattcagagaatctatcaattgctctacaaactagataactttagctcttcaacccaaaaaatatttcttttcgtagtactgttttcatgtataacattccagaagcatacactgatacacaagctcgatttggagcagttgttttgtttgaggttcgtgtatcttatatcttatatagtttttcatcgatacatctatatgtacataagtattttggatttttttccgtctcctcccacgtgatcccacgcaggcagcgcgcctccgatccgcccgggaagaacctacgcgcataacgcgccttcgccccgcccggaccgaaccgtacgccactgcgatcatagatttgcctccacatatgtttcctattgcaaaaatctcactccctcattattttcgccgtaatttccttttctattcagttttaattcatcgaatttaatattttccccgtaattttcttttctattcaactttaattcgtcgaatttaatctctatttcagatggcctaccggtaagcttatccaaccttttatcttgagttttgcgaattctctccgatttgaaaaaaacggaaatagaaatcaagtggataaaaaaccatcaactaattttgggatatcgagagaatctttcgaaggttgaaaacgatagcggcggctatacgagttaggcgcaggcgtgcagcccacaatttgagccagggcttgctttaaaggaaggaatgaatgtccacaatttgagccgcaggctgaagagaggtagcgccgtaaaggaagggatgcagggccttcccatcccaaaaccaaggatggatttttataactttttcaattataatgtataccgatctaaacgtttcaataaacgtttttacccgttataacacatgggcattttttataaaatttaaaatataaaaattttctgtttggcgtgtgtgagtgggtgggccaagcacatcgcacattttggctcctgtggtcagagaccaaacaacaccattcgctcatgtgaagtcgagtactaggaaattagtaattttattaattaggtgttgataaattttcatgcatgtaatcaccgtaagtagatagtaaaaatatttcaatgaaattgaaaacacgtcaacaatgtttttgataattgtttttttttcttttgcaatcaaaatttcgatccaaacattggtttgctaaccgtctataataatcgttaactcattgttttctgattctttgggtaacccatacatatttataacattacttcagagtgaacataactagtggataagatttaaacaacgagatatattcacggaatatatcaacttagaaactttttttttctttcgtgatctcaaaagaacagtgagcgtattccttgcacggtaataacttcgattttgtggtaaattaagacctcgattgatctggaggacttctgctctgctcctaatcatacactattttcgtcggcacgcgtaaataatgtacatgcacgagcattttttttttctgatgttagtttaattgcccttatggttttcacctttgtgtactttactctgtcatactgatccgttggcacaattggtggtttctaacagaaattccaaggatgctgaaatatattagttacaacgtaatggtaaacgctgaagacaatctaggaatattgaaagagattgcaatgtaatgataaaagcagaagactaatttgtcctacaagcagaagactaattccaaacaacaaactaactcatcctggcataatccacatttcaatatcgaattatccaaaagggccgccaatccgtcatcttcactgtcgatcaaataaatttaactagtcaatcaattaaataaggaaactagcttaactgggaagctagttaagccctgattgttgttgcatacctgcagaaccttattgtatcaggagataagataattgaccctaactcactccgcaggatcgccaaattaactgccttccctttcctgctcagctggccgggcgctgtaaaatccttcagcaggaaagaactactacaactaaataaacttgaagtctgccgttacctgcctaagctggtcaagtcttgaactcttgattgtatagttgcttatctgcaaactgatatgatttaatcgggagaaaaattaattgatcttactgccaaaattatcttctttccctttaatgttcagctggctaggaggcggctgacattcttcagtaggaacaacaaagacagtactactaatcttcagtaggaatctacgcaggattagtacaaattttgggtcccgctatttaccctgaagtttaaggtagatactcaactatgtgattctcacatacacaactgcaaatggtacacatggcttgctattatctggcttttgctattgtcggatgaaaaactagcaatattccacaatagacctaagaaaaacatgatccagatgaatacttcattgttccccctcgccaggccaatcacaaaagaagcaaaaacaaggatttatcaagtatcaaaagggaaatgctagcaaacagaacctcttcaaaattattaatatggtcacatggatcgaaatgtgtgaatgcgatggtctgtacaaaaaaattatgtggttcctaataaaatagatatcaaatcaactttgccacctactactactaacttgccatctcatgttaagctggtagtttgtactattgcacaaagagctgttatgccaggcgtgccaagacaaagattttgtcaactgaatttcatgccaaagaaagaaagagcaatttatgacccagtatcaaaacaacaataatcacaagtgacatcagaatggcaaaccaaatgtcatgtagaaacatataatgccggaactaagtttttgccatagcatagggaacagactacataacgatgatgttactttcccaacatacagcttcttccataagcatcatattaacttagaatgtcagcaggattttgcatacttgcccaatctattcactatcaaaccaccaaaaggacataattaccatcacaaaaggacactactaattaacctatagagtatagagctaactgatacttaactatggaaccgaagatgacgaggagagactagtggatcatattaccatcagctaggatcgcagctccttcgagcttgtaaattagtccctttctaatcttggccatcttaactgccatctttttcttcctcttcatatcaatccacctcaggttctccaactttttctcaattgcgacaacttggtcgccgtccaacctagggaacaattccatgatagcaggttgtccctccatgagcaccttaatttcctttgcgagcaatggaaactgtttgcacatatcatcgaatgacctctgctcatcactagctaaggacttctcctcgtccctggccaaagacttctcatccctggcgaaagacttctgctcatccctggcaagggagctctgctcatctctggccaaagacttctcctcgtccctggcgaaagacttctgctcatccctggcaagggagctctgctcgtctctggcaaggcacctctgtttgtcgtccccggcatgagcaacagagcgcccccagatctcacaggagagctcatgaagctgaaggtcatgatccttggtaatagcaaggcccgacaagacaacatcgttgtaccgacgcttgagactgcgcaccttatccctcacatcactgtggttgaaggtgcggccctccaggcgctgcacgagttcatggaacaaggggtggcccggctcctgcggcacatttccaccactgcggatttgatcaacaagagcctctaggatcatgatctcgtcattgccattccacttgcgcccgaacccgggcttctgcgcatccacaatcttggccctcttgggatcaggtgggcaaatgctgcctgacaatgcggcaaccctcttgctcttccgctgcggcaacggacccttgccgtcttcctcatccccttgccatggcgccacctcctcctcagcctctgccatcaaatcaccatcttcctcctcttgagcagcagcatgttgcttcgccgatggcttcttccttgcctgcgctgatgccttcttctttgccttccctgcgttgggtggcacctcttgctcagactcggccaagcggccgtccacctcccccacatcttgctgggggcgcgtaggctcagcgggatcgtccggagcagcgaccttgccggagtcgccagctcgcagggccttcttcttcttcttgcggttcttcttcgacttgggaggggactcggggagatcgtcctcctgcgccgcatcatctccttgcggagttggcacctcgttcgacggcgacccggcggcgaggttctctctggagccgtggtcgctcgacggcggcgccgtcaccctcttcttgggcttcatcggcgacttggcggggccgtccggcgccgcggcattgccagagccgaagccggagccgctccgcggcagcgcggagtcccccttgggcggggcggcgacctcgtccttgccgggatcgccgccctcctcccccgattcggcagcgcgcgtcggcggtcgagggggctgggccgcagcaggaggcggcgacctccgccgcattgtcgatctgcggagagtcgcctccggagggggaagagctggaagggagaggcaacgagggcgatcgggcgacgcgcacccgcttgggcgccatgggtggatggatggatgctgctgcttggggatgagatcgaagtggaaggatcgatcaggatttgtggggttttgcagggtttctttcaggggggactcgtatagccagcgaacgcctcctcgggtccatggctcgccgagtggtggtggtggagaaacgaagcgccgagaaactcaacagggacggaggagggagtacgatgcagcagggcgggtttggccgtatttaccgaaatactccctccgtatataaaaaaaaacaaagacaaactcctgatttccgtgtctaacgtttgaccgtccgtcttatttaaaaaaaatatataaaaacaattaaaaagacaagtcacgcataaaatattaatcatgttttatcatctaacaacaatgaaaatacgaattataaaaaaatttcttataagacggacagttaaagttggacacgaaaacctagggtttgtctttttttttgagacggagggagtaagtttggttacctgcacgatgcctgactcgtattacgggtgtaggcaatgttagagatatactcctatttccttgtttgtgttaatctccaattgatgaatctttcatattctatcgttgtttctataaatcggttgaggataaatgaaatgttattttttgagggagcatatatatggaatgttatagcggtatatataaaaaaaagaattatcgtgtccaattctcttattctaacatggtattagttgttttcgcttccgtcaccaaaccctaaaactctacctctctctcccatgctcactgttggtgccgccatgatgcccacaccttctgagcctttgtctccacgatccttcgcccttgccgacaccgtgctcaatgcccaccacccgcatggtgcttcgggcgatcccaccctcatcgcctccgtggtgaccaccacgtctaccaccgctcgcaaggccatcactgccctcctcgccaagcacgccacaattgatgcgtcctcctcctccaagtcgtcatcgttcgcggcagacgccactccgtcggagctcgccacttcgttggcccaggcgcttgcaccactggcgagccacctctacctcccagcatcgacatctcacatggtgcgttcaacgcccccgacgccaccagcaccggcacgccccacgccggtcctaccgcgtccgccgatgcccatggtgctactgccgacttcctcagcgtcctcaacgtcgccttccacagcgcgtctagcatgccccacgccgcccccacgggcgccagccgcggcgtcaccggcctacctcccgcccaaccgcgtctctacacgctcaagccatcgccatcctgaacatcaaggcattggtccccgtcaccctcgacatccatgccagcaactataatcgttagtgcggtctcctcttcgccacgctcggcaggtactccctcgccgacatcttccgccctgaccgaccagattggatgcgcatagactgtgtcatccttacatggctctacaacgatcttcggcgatctcctcgagtccgttatgtaagtcaccacaatggctcgcctcatttggtgcggcctcgagcagcaattccttggcaattgcgagcactgtgccatcaacctccaagtggagttccacaacttccaccaaggcgacctcttcgtcacggactactgccacaagctcaagaccatggccgacaaccacggtgatgtgggcgaatgttgacagttgttaagtgcaaactttaaccgtcaacttatgtataaaagatatcaaatatattatcaaaacttaatggtgggagtttactactaaccgtttccaccagttttggtaaatatatgtatgcaggttaattaaggagaaaatacaccataggggcccacttgactgttgaaaccgacttaagatgggaccaaactgtctttaaccaccataggagcccattgtcaacctcccaaccaagagagaggctaggaggtggggcccgcagttcggccgaacaggggattcggttgaaccgccatagtggtgccccatcctggccttccacgtgtaggtcccagatgccttcccaatgacagttattcccggttttcggcctggatgactgccacaagccacaaccgcaatatggaggctctataaggaggaggcttcacatacttcaacacttacaactttggtgggaaatcaaactctaaccattggatagaaaacctgttaccattccaatagtgtcaatttggagctctgtttatttttcttcttagcaaatttattgcttaatacaagcatcataattgcttaagctcatatatagctcctctactcatggctttggctttgaactttgtgcttaaggttatttaaggcttagaaagaaaaaaataaatttacaaatgtcagtgatactatacacaattgaacaagttaaggagaatctagcatagctctatgatgacaactaccaagaaggggacatatctggtgaaaacccgtgaaaatcaaacctaaaagttttgcaaattcatgtaaaaattactagagacaggtataggtatgaaatacattctcaccaatttcaaattcaaactcaactttattatggagcaaaaaaagataaattttgagcgaatagtaacaagactttattcacctgaaatttgtcatttatgtttctctcgtatgaagttatgtttggacttaagatttggtatgaatgtatttcaagcctatctcatgtaatttttttttgtaaatttacaaattttttagatatggtttcaagggttttcacttatttgatgattttcaatggatatttcccctaccatgaatttctatatattattctaattacacaactaattaagaggttcacttcttaatcactaccttgtgttcgtgggagtcgtaccagaaattgagcccatttggttggcttgatagtttccaatagttgtttctactagtttctaagcctagctatgtcttgcatgcatatacaatatacatattgtcttgtggacaaagaaagctagctaggaggcaggaaaaggaaggaaacaagctacacacatgagctaccttttgtacatgtaccaaacagatctcccagggttttggttaaactcaaggttatgtgctcaagaaaagaaaaaaagaaacagcattcatagctagttcaaacttggcgcgaactgatgacatggggttggctggacagcaccgatgtctagaagaggatatttgtttaatttgtttgtgcataatttttgttagttacagaccggtaggtgtatatatatatatgtatgtgtggatggatggatggatgcaagcaagccattttgacagaattgttgtggaaaaaacattcaccggtggagatctgattctggaacatcagaaaggcattatgcccagtgtttagagtttagacctggtaattcgtttgagctgatttttatattttttcccctatacaaacattagtattgtaccgtgctttgctttgcaatctcaaaactcaaatatataggtatatgcaactattctgagttaaaaaataactataatctactctaaattaggtcaaaaggtattagtttgtgactagattatagtgactgcaaacacacgcatggcctaggggctgttcaaattaatgttatttttaaccataccatttttaaaaatatttacgtttagtttgttatcaaatctggtaaacacataagaaatcctactaaaattttagtaagatggaattttgacaatgccaaaatttgataaggtttattttagctacaatataagcagacccctaaaatttatgatgccatggtggtgcatatttctggacgtaatacaagaatgcgtggaaatcaaagttgatgaaaaaccattgttgtggaagacgaaatatgctttcagacgaaaagggtatcgttcactgataatcagaatacaagattaataagaactatgtggaaatttgatgttggcaaatatgacgttggcaagtacgtaatttggacatttaaatggctacaactatataatttgaatatattaatgttatcttttaattgaatggttataattaacatcaacttaaaatatagtttctaacggtcattcatacagcaaacaatggcatgtttggttatattcaataagtaaaacataacagaatataagaaatactaaacaaagtcccaaaaacaactttggatagtcatcaaatacacatgccacgaacaattaaacggaagatggtgaattaatcgctaaaataattttttaatgttcatgaaaaataaatgtcgaccgtatcacgataacaaactgtttcattaagtgtttgaatctcctaaatataaagataaaaataaagattaaatgtttcacgcaaaacaaaatagtaataacatgtgattaattgagatttaattattacaaacttgaaaaaggattaatatgatattttagaacaactttcatatagaaagtttttgcatgaaacgtaccgtttagcagtttgaaaagcgtgccacgagtatccaaaagtttattaacttttattggagaaaagaaccggacacatccgtttaatcggtcggtacgactgttttccgcaacctgccaaaaatctgtgctattcttcctaagattcgcatggactcacacaactagctactcaattaattttaacagctgcagctagaggcgacaactgagggccctggcaggattcggtagaagactgccaaagagaaatcagtgactcaagaaatgagagattgaagcagaggtaagccaggccagttagtgtgaagtgagataaactaatccaatcatccctttaagataaaaaagaacacgcgatttctcattgttcggggattattgttgggaaatgattatcagcggtttttaacctctctttctcacagcatgaacaaaacaacttaatagagcggaaaacccatacacatatctacattcctttcaaagactaattatgatggtgaatctaccatcacccgccacagatatagtatcatcgtccttcatccactttcacgctgaccaatcaattgccacacctagcgcgctcttccactcaggtccgatgccctgatccgtgcagcttggaagacccaccgtgatggtggggactggggatgtgccattgctggctactccatcaccatgggaaaatccacccatcaccctgggcagatttgccatcgaggctgcgccagagagcttgttgatgtgctaccctgatctacaccacgttgccacaatgtgcacctatgctgccttgatccacgccacttggaggtcgaccggcctacggtgccctgattcacactacctagagctctgttggcccctatcacgctgaactagggaggaggggagctcgagaccaccgccgtgaatgtctctgagtgcgagcgcccaccccacacgactagctagagtagcttctcttgctcgttcttggtgcagcgtgatgggaaaaggagaagtgaccgagatagagagagaaaagaggaggggtgggattttatatcagtttctgatttcgagagtgtataaagtaaaatgttggacttatatatatctgaattgcaaaaaaaatctaataatttaaatacgaaatgtaaaaggttgacaagggttgtaacacaaaaattcattggagagtggcttgcattgtagacctagtatcttcacagtagtttcatcttaggtggcacatacgtaggagttacctccattgctcgtagcagtagcggtgacgtgttctctctcctcgagaccactagtaagagtagcctccattgctcatgcctaagaacaaccatcttgtatcatctatataaattgaattgaactataatactcctactttatttaaattaaagtgttgtaacattggacattgagattgtctcaaagatataatattaactacttaaatattgtcccactcatacaaactataagctgaaatattattctcacccctgattctcaggataataagtagaatcacatccaaacaggcaaatatttgatatctcaagaggagaatcaccccagagtgattcatgttttttgaaagaatcactggaaacccagcttcaaatataggacattcaggcaaacctaatatagaactcaccacatactttctaaaaagttaccctccttctaaaaaaattataggccaaattatgataagcagcggacactagtacaaaaacccttataggtgccggttgggaaccggcaataggtgccagtttcccggccgacaccttttggtcggcaccaatgaccgtatgtcattggtgccggttgtagaactggtacctttgtgctctcccagattcaaaaaaaaatgaagaagccggctccaagccgagccgagccaatgcttttgagccacaccattcaagcagatgcattccatcacaaatcacagatgcaattccccggttaacaacaacaatcacatatgcaattcaatccggtcaacaacaacaacaacaaaatccatcactaatcaacaacaacaatcacaagtcccaagtgaacaacaatccaatcaatcacaaatcacagatcaacaacacaagcaaatgcacgaactcactctgtcgtcgtcaatgtgctgctgccaatcacagccggggtcccttgccaccgccactgccaccgccatttcccttggccacggccactgccgcacgtcaccgccgcacgtcgctgccccgaccggagagggagaggaggagggagaccggatctgcacccggtcacctatggggaggccgcccgccacctcccttggccatcgccgccgccggacatcaccgccaccaacctaccaccccgacctccccctcccctaatctggccgcctttgataaagccgatggagagggagaggcagaggggaccagatgtgctcctcctcgtcgtgggccaccagtccatgcgtcgctgctcgccggctaggagatggggacggagggggagggaagcgtccggccggagagagtgaaggcggatggagagggggactcggcgggtgctggagggggagggagaggggagggcggcggaggagaaggagtgggcgggagggggaggaggaggggagggcggtgccgcggtggagaggagtcgaaacttctctctcgcgcgtggataaggccggaggagaagatgcgcggataaggaagagaagcagggacctacgcgcggataagtccggagatgaggccggctcggctcgcccagttcggctcggtttggtatgggtgccggttttttaattaaccggcacctataatatattattggtgtcggttttttaattaaccggcacctattatatattattggtgtcggttctttttaaaaaccggtacctatagtattggtgccggtttttcctaatgaaccggcacctataatccttaaaggtgtcggtcgtatattttttcaacgtgcggatgtgggaaaagtctcataggtgccggttataaatgaaccggcacctataaggccggtccctataagggtttttgtagtagtgggatgagaatctaaagttgaatctctcaacttctggttttagttcactttctagattctataactaaaattcttagaatccatatgaaaatatgtacttggggacttgcacattctagaagaatgggaaactattctaaactctcgcgaagggatgtccactcgttgtttgcatgtcactcaaatggttatgaaaaaaaaaattgagaagatgtattaacatgtgatatatcactccacaaatatgtacctttcaaattcaacttctacatctcgcaaaaaaaaacaaattgaactacagctagtaaacttatatccgcggtcaaatttgtttttttttgttgtgatatgtagaagttttaacttgcatgtttatggagtgctatatcacatgttacatcatctcaatattcttttaatttttttcataatcatttgaatgatatgcaaacaacgtgggacatccccttgagagtttaaaatgtactctcggaagaatatttcttaagtcaaatctattaatatgattatttagttaagaacgagataaaatgtcgtaaatatattatgattaattttgatgagtaatacaaatttagaaatgtctattttgagaaacacacatgggtcttccggctagctccacaaggtggtgggctagacgacctgggttcgaagcctcaccccttctaattatttaatactttaggttcacaaggtagtattagattcttcccctaatattcacgtcttttcgaaatgtctactttagaatactctgtcagggttaataacacttatcgttttggtgaaaactatatcaaactttataaactttggttattaataacatttaaaatatttatgagaccatatgtatagattagttttaagaagtaattcaataaaatcatatatttattaatatatatatatatatatatatatatatatatatatatatatatatattaatggtcaaaattataatggtcttttggagactatgttcttgtccaaaataacaagtattatcaatccagagagagtaacaaatatattatgcacataaatatgctaattagaaaagtgacaccatgcatagtagactaacaggtaaggggaaaaattgaacacactcaaataaattggttagagaacatagtaaagaatatgacaagctactccaagtgaagtgaaactacgaggtacatatatccgtacgtagttggccaagaccctgtggaaacatttccttattggttggtattgacgatcaagctaaggaaaaaaggcacacgcatgcaggtaatccactactacgtactcctgtatgcatccatccatgcaagaaaaaggcttccatatatccttgtcacaagctagctcacaaaacttcgaactgacaagatgacaaaagtcacaatgcttgaaattgacaacacctagtagctttacatgcatgcataggagcaaatctctccaaccccaaaggttgtgtgtgttgttgtgtacaggtagatatagatgttgtacttgaacacctgaatatatatactactgctatctaggagtatctgatgaccaattatttctagaaacgggcactttgtgttggaagcttgcgtgtggccatttctcccccatgcccacctaccacccaaaaccccacaaatcttaccactcacacatgcggaaaacccccgttttctccgtgtggttgtgacttgccgctgcgccgcacgcgctacataaagctttggcgagctcgccgcttcggcttcaacggtgcagcttgccaacctaaaccgataatatcgctcgctcgctcgatccatggcgggcgtggtgcagaccgtgcagtgcgaccagccgagcaagcagcagctgacggaggcggcggaggcagcggctgcggctgcggcggcggcgtcgctgaggatatttgggtacgaggtggggggtggtggtggaggaggaggcgtggcggcggcggcgggtgcaaggcgggaggcggcggacgtggtcgtcggggcggggaggaggttcgagtgccagtactgttgccgcgagttcgccaactcgcaggcgctgggcgggcaccagaacgcgcacaagaaggagcggcagcagctgaagcgggcgcgtctgcagctcgccgtcgccgccgcggggacgccggcgggcatgggcttcgcggcggcacaggcgccggcgccgccgccggggcacgtgatcgccgtagggcatcacgcggggtcggttgcctcctacgcgctgcccaggtgggtctacctcgcggcgcaccacctgcagcccccggcggtgggcctgccgttccacgccaccgttcaggcagcagccggcgcgtgccacggcggcggcgacgtcgagacgcggttgctcagcgtcgccgccgctgggcggggcagcagcactgcaggcagcagcgctcactcgtacgaggtgtgtgctcctgcggctccggcggatgacagcgacgaggaagcctcggcgatggggttggacctccatctcagcctagctccggcgagctcggcatgaccggccggtggccgggagtagtaactttatttggtgcaccgcggccgacttaacatgtaactattctcgtgtgtatccccttcattttcttcccatttttttagggcaaaccctgttattttcgttgtttgcacatctcgcaaaaatgcaagagctcgagatatatacagtacatgcttgatcaatcatcaagctaatatacctatgtatactcacacagttgcccccactgcatttggtgtaattatcgctaatttataattctctcttatcaagtcacaccatcttatgccttattcgatttagagcagattgaagaggattgaggggaaatatttccacaccaaaatatgtgtggaataaatcccctccaatccctcccacatggggactaaccgaacaaagccttaattatttgttagtcattcgatgatcaatgtaagacgtggattatttacctctcttcaccatcgtcaatattagtaggggtgaaaacaggtcgagtttggttggatcttacccttcctgtatcctaacccgtattttataattgaaattgggtcaatcacggatagtgctgaatatagatataaactcggataatatcggtcacaaatataggacgaatatatgccaaaacagatacgtacactataagttaaaaaacaactagttaacgtatatggtcaaaattgtttttttttcgttgtgagatgtagaagttaaatttaaacttgcatgtttgcggagtaatatatcatatgttaatatattttctcaaatttttttcataaccatttaagtgatatacagacaatgaggggatatcccctcgaaggataaaaatctactcccactattgttgtctgtatttgctcacaagctaaacgtgctagctcgagttaacaaacaatctaacaagaatagattaacccaagcaaacacaaattactagagggatggagaagaagtactgcagagggacagtgacactacagcgtcacaccgatcaacacacgacggcgagaaacaagcgactgaggtcaagctgaaatactggcgacgtttcatcggaagtggattttctaactcgagtgacaatccttatttgtacatgtcgttaaaaaaattattaagatagatcaatatatgatatattttttcacaaacatgtgagttaaaattcttctgatacaatttgaaacaaaaataataaatttgaccgtgaattacacgtttttatagtcaaatttgttatttttgtttctacttatataagttgaatttgaatttgcatgtttgtgaagtgacatatcacatattgatctatcctactaaattttttcaaattttttatgattttttaagtgacatgcaaaataaggggatatttccttaaaggatgaattgggtttcccgttatctgtaaatccaattttctttcctacgtagttccgaggacaataatagagccatcgatattactccctccgtttcaatgtaagtcattctaccattttctacatttatatggatgataatgaatctagatatatatctatctaaattcattaagatcgatatgaatgtgaaaaatactagaatgacttatattatgaaataggggaagtattagagagtcatacacaaattatgtggcggcaatctgtgtatgactatgactacagcttaatcctatatacatatacaagtcatccccactaagtgcaattaaaactaatttcctgttttgagagtaagccacgtcaccttgattcattccagccatcggattgctcataaacgtttggatagcaatcaatcaatcaactggagatagcaatcaaaataaacatttagcaatgactaattaaagaggcccacctagccatctcttaattttgaaacatacagttggaataccaacagcaacgcatgtagtaccccagcagttataagctctttaatcttccattgaagttattttatctcctgtaaccggtgaatcagatgaacagttatgcctttatatactctctcattcactaggactttgttcctgatcgatcatctgcgcttgacagtctttccatgcatccagttgatttatttgcccactcctctgctcatgctgatgcttcaacagatcaacatgcacaatccgctttggtcatctctctcttgcttgcttgctcatggatttatttttctttttcttactaatatcacttcttgtttagttgtagaatctgaagagaagaaaagaagtagcagtttcaaatatttcttattttctgttctttgtgaaggttgcagatcttatagagagaattgaagggttggtgcattactatattcacataccggttgaaataaataagaacattttttttgtttcagttggttaaaataaataagaatacttttttgtttcagtaggttattgacatcttcgactgaacttttgaaagtttctacttcattaaaactatagtttggaataagcaattacatagcatctttgtgtaatcaccatgacgtatattgtctaccatttttctttcttgcaacatagcatagaacaatctatgttagtaccattctatttattgcatctgtgttcaattggccttggttccagtaaaaggaattgaccattcactaaacaatcagcgtattctgttatgattcaaatttcagttgcttattattataacattgttggtgaagtgttcagtgtatatcaatacgatcattcatacctaatttttcatctttacattactcttatattcccacatcaatgcgcggggtgtcatctagttagagttcgtttagtgctcatatatgcgtggtggacgaaaccgagatctcgagtcagtctcagtcgtcgtggtcataatcaatcatgcgtattcaggagaaaataaaaaagaaaaaaaaggaccagctgatggactgccgctaccctctctttagtcccggttgataacaccaaccgggactaaagatctttagtcctggattggtagtcccggttttatctcggtttgaaaaccaggactacagagggttatgaaccgggactaaaaagcacttctccaccagttataagtgccgtgctacttacgtgtcagggtctcagggacgactaatatggcgacgtcgatggagctggcgcccggcgacgcgcggttcgcgaagctggcaaaagagctcgacgacaaggcgccgcccaaggccgcggccgcgccaccggcagcatcagaagaccaagcagcagcgagctccgggaagcccaagtacaagcacgacttctacaacggcgcgagcgaggtggtggtgacggtgttcgccaagagcgtggcggcggagcacgtgtccgtggacttcggcgagcagatgctgagcgtctccgtcgaggtccccggcgaggcgccgtaccacctccagccacggctgtcgggcgcaaggtcgtcccggccaagtgccgctacagcatcctcccatcgaagatcgaggtgcgtctcgccaaggcggatgagcaagtgacatggacgtcgctggagtacacgagcaaggccaacaacaagctcgcggcgacggcgacgacaacgacgaggaagaaggtagactgggacaagctggaagccgaggtgaagaaggaggaggaggaggaggaggtggacacggcgacgccggtggtgaacaggttcttccagcagatgtacggcaacggcgacgaggacatgcggcgagccatcatgaagtcctacgtggagtcctacgtgctgtccacggactggaaggacgtcggctctaagaagattgaggccagcgcgccggaaggcatggagctgcacaagtgggagtattgatagtgttattattatatatatagtcgggctaattaggaatggatattgtccgtgagttgcaatgagattttaattttaaaaatatttttaatccagtattagcattattttctatatacatcatatatactgtttcttacttatatgtggatgttctaaactctgcggggtaatttttaccttttcatataaagtagggagttgatagtgggggtggttgacatatagaccctctgaccctacatgtcttttcttttctaaaaagtagggagttagtggtgtcttttcttttctaaaaagtagggagttagtggtggaaatggtgacagattcacttttcttttctaaaaagtagggagttggtggtagaagtggtgacagattcacctatcactaattcaccaccatcattactctcttttataggtattataggtatataattcttgttatttgtaaccttatataatttttgttatttgtaaccttttctgtcagtatccttaaaaatgtggtactgtcttattaaggtatcattatacacatagtagtacatgttctttgttgggcgtgttactaatgtgctacaagtttaataaactcagttggaacttttattatgtgtaagttagcgattacggtggcagagtcgtgccagctactcgtggtagatggcaaagctcctgcctgcatgcctgaatggaccagaccaaatcatttaacatattgttaagtataattcaaggcgataatacatattgataagtgaaaatattgagtttgttctggtccattgcaaaacttaggttaaaaagtgaccctaagtgaaatttattttaaaattattgagcggataaattggatattttagaaaatatacttagctgatagcttaaaataagtgttctaagtaatgtaatgtagtgggaaaaaagggaaactatttatgatccctcgatgagatatctcctcgtttacttaaaatccatccaacagttatgaaaaattcttaaaagaaaaattgacaacactcatacaacatatacaactccacaagatcttaggtccaaactcaactcacatattgagatataaaaaagacaaattcagcatatgaatagcaacgtactgtttacatatgaatctatctttttgtttttcaatgtgtagggcgagtttgaacttaatttttggtggaccagtagataatacgatactcttcaatgtcatttttagaatttttcacaaccatttgtatcgaatatggaaggaaaaggtacatgaggggacatccccacaggagattagaatccactcctgggaaaatggatttttgagacaacattttctttaaaaaaaacataaagcacatagtttcgataattcgatgaataatctaaaaataacaagggctaaaaaattgctctcccccctccccaagataatatttttttttcgaggggacaaacagggagctcctgcaatttcactatagaagaagagagttgattcagtttgtaaggaaaaccggacctaaaaatcttacaacggcacggtttattaaaggaaaaccggcaaaaacctcgacattgacaaactgaacctaagtacaaccgtccaacaagaggaaagctcctaaaacgaagccttcaagaaggttacgccgacagaacagcgacatcatccgatcctaatgaatctaggttttcacccggagaaatctcttgaagtggagttgaatgagggctccagtagcaacgccttcaagaaggtgaacggcgcccaagggcgtcgccgttgctagcaccgagagcggagcaaggctttcgccttggagcacccatcaaccatagcatctacgacgggagccaccaaatgttacctgcacaccgagggtacctgcaatattcccatccccacccgaggacgcgccggatctgggcaagagagccagatccggccgttctcctcaccaccaatgccagccgacgccaaaggagtgccggagaacgccagtggcagccgcgggatgcctgcgtgcgctgcccaccgccggccgccacgccgccgccggatctgtggcctccaccaccgccgctccatcgccatcgccattcccgccggccatcacccacaactccacccagcgcaactcacctcgaccgcctccatcacccgtccccaccgccaccgtccttgcggccgcgcggctttgccggcggtgtggagattgtgggtacccaatacccacacggcatggttatccgactagttataggggataacttatatctatagaatatgtaacagatcatgacttgggtattatgtttccttgtatattacggaacggcctaaagtcctggtttgataatattgtaaagtagatttaggaaaccgataccgtattggttaaggtttctatcttgtaattctgccccccaccctatataaggtgggcatgaggccctctagggggcatgagcacatatgatcgtcagatctatactacacccggcagattcaaatccccaaacaggagtagggtattacctctcatcgagagggcctgaacctgtctaaatcctttgtctccgcatccatccacttttaggtctcgtgtgctaccccgttttattattgccaaattcatgtttcgacatttggcgcattaggtaggggtgcgtcgagtttcccgtcgaaaagtgtgatggaatcaacttgatgagtagctcgcttcgtcttcgctttgggagctttttgcttcctcgctgccgacgactacaacaaactctcgctctttgacttggattcaaaccagtcgggagagattcaatctagctaaggaggagatgcaacttccgtatcatcttcatcaacagcatcacgcctcgccaccgatcgatctccctccgatcataggaggccacatccacatctcccgccagcatcatccacaatgacagcaggccaagctgcagacggtggtcggccttgtcgccatcctctacggcacggacgcctgaccttgccgatctccccgatgcccatgcgcacgtgacccgcgcatgacgcccaagcgcgagcgtcgcctctgtgccatgcatggcttatggctgggagatccaatccttacactatagaccatggcaacatggccgaccaatgaggtgaagacacatcatcgccaggctataggaccatacaacaccttgcaacaggatcttggctaggagtgctttgcacgccttaattttttcatctacacatatacatatgctttaatctatgattgcttataagattgatttctccttttttgcatgtacactcggggaacggcgccgcacgcccgggggcttcatcctttgcgtggctgacgcggcccgactacccccgtggcacatgcgtccaaggcatcacgtcgcatgcccgggggcttcaccaaccggcttgctttcaccgccaccgactggtgttttcgcctatatggttggcggacttcgccgccgctgttgggcgtctacgacttcaccgccggtctgcctccgtcgccgccgactggtgtcctcgcctatatggttggttggtcacaccaccgttcatgggcgccatatcttcaccgaccagctggcctttagcgccgccaactggtgttttcgcttgcacggctggcctattatgccgacactgttgggcgtctacgacttcaccgccagcctgcctctgtcgccgccgactggtgtcctcgcctatacggttggttggtcacaccaccgttcatgggcgtccacatcttcaccgaccgactggccttcaccgccgccaactggtgttttcgcttgcacggctggtctattatgccgctgctgttgggcgtctacgatttcaccgccggcctgcctccgtcgccgccgactggtgtcctcgcctatacggttggttggtcacaccaccgttcatgggcgtccacatcttcaccgaccggctggccttcaccgccgccaactggtgttttcgcttgcacggctggcctattatgccgccgctgttgggcgtctacgacttcaccgccggcctgcctccgtcgccgccgactggtgtcctcgcctatacggttggttggtcacaccaccgttcataggcgtccacatcttcaccgaccggctggccttcgccaccgccgactggtgtttccgcctgtacggctggcctattatgccaccgttgttgggcgtctacgacttcaccgccgaccgcctaggctgcctccacggcgggtgtttttattgccattgatggatgaccttctccccacatcggctacttatgccatcaccaaggagaatattacaaagctaagtcatcttttattatatttctgatatgatattttccttttcctctgcctcactccatcaactggttctccgttgagttgttagtcgggggctatagacgttatgtcatattttttcaacaattttcataatatttatcttgatttgctcgcgacataatctgagtacaaaagtgcctatcgagttatggagttccatcttcctatgctttccgtttggtttgccaatggatagttgcctttgggccgattcctagcacccggaggctcgttggatggaccgagtaacgcaaggtgctaagtattactcggaagaaatcaaaagcataaagataagataatttattttctactcttaacaattgcaaaagtacccgagtagtaaattccaattcgtgaaacttcgttccattaatgacaaactcatgtcactcatatgcatgtttgggaagtgcctaggccgactcccgatgcttgggggctatgactagtcggacagagtgtttaaacgtaaggagtcatccgctcggggaaatcaaaattgacaaaagaagaaatacatatttataaatattttaaaatacttgaattttcctcgagtattatatttacatcagatactactcatcctatatatttgttctgcaggatccagatccagatatgcataaaagggattcatggctttaagcttatctcttacgctccaggaatggatcagtcagaacatcaccaccggcttgccgtcgtcgccgccgactggtgtcttcgcctatatagttggttgatcacaccatcgttgttatgtgtctacatcttcaccgccggcttgccttcgtcgccgccaactggtgtcttcgcctatacggttggttggtcacaccaccattgttaggcgtctacatcttcaccgccggcttgccttcgccgccactgactcgtgtcatcgcctgcacggctggcctattatgccgccgttgttgggtgtctacatcttcaccgccggcttgccttcgtcgccaccgactggtgtcttcgcctatacggttggttggtcacaccaccgttgttaggcgtctacatctttactgccggtttgccttcgccgccgccgactggtgtcaccgcctgcacggctggcctattatgccgctgttgttgggtgtctatgtcttcaccaaccggccgccttgtccgccgccgactagtgtctccgtctgcacggctggcctattatgccgccgttgtcggacgtctacatcttcaccgaccggccgcttcatatgacgccaattgatgctatcgtcttcacggctggccacgttgccgccaccacaaataggcgtcatcaccttcaactcaagttgtctatgtctgcagccgactggtttcttcacttccttgaatgcatgattctgccactagttattggccttattgtcttcaccgccggtcgtctcgtctgctgttgactgctgtgcaactttgtcaccatggtggagctacttcatatttattattttcgacatcggcaaactctatagcctatactttgcatgatttgccacttcaccaaccacgatgtctacaagagcgagcatctcggcatgtgtcacgaaatattatgccgtgttattttactacaacaagtggtgttccaatctccaatatttctactcggacatcttcaacacgtatcttcactcaagcaatgactattcgacgacaagaagctacagttctcgactctatgttcagttgtttctcaactaaccaaagagtcgggagctacacaaatacaagactctcaaaattcgacaagccttatgtcaagatgaagcaatcaatcaatcaacgaatcaattcggggagttattatcttcgtcttcgcttcagagccgacatttaatttcagcgactccaattattacatcggcaattttggcttcttcatgccgccacaatctactccaaatttcttaagtttgagatttaatttacatgtctgggagtttggagtcatcaaccaatcaactcagatcagatccaatgagttgaacaacagtttctactttcattcaagtgaagcatctacattagctataacactaagttttgcagtcatcttcgtaaatcaagaagctttgcatcagtcttctttatgcacacactcgaatcaaggaaactactcgagttttgatatcttctcaacaatttgatggattattgtcactgacatcatcaccagcacctctacttcatcggccctgacatctctaccgttgctaatggatgactacgttttcacctccggctgcttctgtcattgccgactagttatttcgccttcatggttgacctactatgcaaatgctgatgagtgtcttcgtcattatcattggttgctacactgctattgactggatcaccgacatcgtcatcttcatcatgtcggttgcgtttgtcgtcgtcgactatttttcttcatcttcatgattggtggatttcgtcatcgcctttgatctgcctcgtctgtcactgactgattatttcgctgccatggctacacaactttatcgctaggcgccttcatcttcattgatggctgacctgactgctgccgactggtttcttcgcctccacggctatgcaacttcatcacttttgattggtatcactatcttcactaccaccaatatttttgccacctctgctgggcaatattatctctatattggtcgtcttgtctctatgccaactgcgtcagctaccatcaatgaacaattgtgactacgtgcttagggcttactagctcaaacacaagtatcataccttcaatttggacttgctccgaatacatgcaacatgaattcatgatcatgggtctattttctatgctcaaagactggactatttattattccccataagggttatcaaccgaatacttgcgccagtcgggattcaattattatatctattttggagtatcccataagggataatcactcagatcagaaactattgatatgagctacacttggtctatatcacccggaagatgtattactcgggagcatgttatatgcgtcatcctttaaagggtgtcgaaggcatattttttggcctaggcctaatatgtctgcagcccatattttcaggtgtggcctgtcacgttcttttagggacttaggcactttttgcttaggccaaagtgcgcgtgatcaagtgtccaataccttaaaatcattttataccgcagttactcaactttttaggagttagtacaatgcatcttaaaaggtgtcaaacagtaaagctttatatagctgcctcgctgacttttttatatagtcaaggcactgtttgggtttatcaagcaattgattggatacaatatcgttgctttttgccacgtaagtgtgcatttttattgactaatattatggcttaggctgattatacattgtggtcattttccaggcggttggtaaatcatttatgagtttatttactcagattttacaccacatatgccatatatttccaggtatggtgaaaccatgtgttttttagggacttaagcacatctgttaaagcagtgtgcgcatggcgtatgcccaatactttggaaatttctttattcgcagcattcaagcttctttatagctgttttgctatgtgaatttttaatgatgtaggcaactttaggttgtactcatcatagtttacaaagcagtcggtatatcacttggatcatgttattcggggattcacatcgcatatgctatatattgatatcaagtcatttggtttattacaattatcaaaaccactcagttagttagattatttattccttgactatatgcttggtttgttcaactaatcacatggtcggaggctacacctattaggtgcatatactcgatgcacctaaatttacattcaattatttttcagccctccacagtcttcatatttggtaaaagtactcgggagaccatggcaaagatgattgaagcacttggctttggagtaatctggttcgagagaagattatcttttcgtctgttaaggtcttaggggctactgtggagattatgggtacccatacccacacgtaggattgcaagtgggacgggttgcgggccgtcccgccccgccccacaaccatgccatgtgggccacacggcatggttatccgactagttatagggaataagttatatctatggaatatgtaacagatcatgacttgggtattacgtttccttgtatattacggaacggcctaaagtcctggtttgataatattgtaaagtagatttaggaaaccgataccgtatttggttaaggtttctatcttataatcctgccccccaccctatataaggtgggcaggaggccctctagggggtatgagcacatatgatcatcagatctatactacacccggcggatttaaatccccaaacaggagtagggtattatctcccatcgagagggcctgaacctgtctaaatactttgtctccgcatccatccacttttaggtctcgtgtgctaccccgttttattattgccgaattcatgtttcgacaggcggaagccgtgtggccgctcaagtgacggcgaggcagagagggaaggtgggggagagggtcggctaggtcgtcgcctcccgagccgcgggagagcgacgcgagagatatctatgacccaagataatattgaccttgcgcatctgcaacagcaaaggaggggtgctgtccagcaacgacgctgatcaacttgcacaagacgatagatgactagcgaagaggcgattgacagttaattccgccgcatcaacaacaattcattagttgattggctactcgaaactcttgtgctagacagcgccaccagtggcgtaacaatatctcgcatggtttcgcctttcacaagacctttttttttgcttggccttcacaagttaatcaggttaggatcactggcatatccttcggcaatggattatcgtgtaaaaaagaagagcaggagaaaaaaagaagagaacgcaagaataggatattccattagcaataaaggcaccgataagttacaaataaagaataatcggactatcatactcaactcgcgagaggcaagctgcagttagttcatgcacctacaagagaaaaatggagacatactctattcactcgcttcacattttcctttccccaatactacttacaacacggcggctagttcctcacataataaattaaaatgcaacctaaaattatccgaatcgcctaaaatcgagagagagaaaaattgtaacacaaagagcgctcacaattgaaaaagaaggtgagtttgcgggagctacaatggtggctgattgcaagtgatatcatagaaccttgacgccacttggtcgtttaccttccatggcatccttcttgtcgcggcaatcggaacaaaggaaagggccttcccatggcttagaggagctggaagagaagattgaaccagcatggactgatataccttcacttggttcaaggtccacctggcagatggcacatgtaaa

SEQ ID NO: 9587 - DNA, 45176 bp, Oryza sativa
cctagccacagaaatgatgtatgaagcattcatttgcttttcttcatctgtacagaaagtgtaaatttttcaggaaacaagatctgaccagcatgcaccagaagcagatcataatagccaatctagcaatttgtacataacagtggtggtaaaacaatgaatacgcatacaagaacaaaatgcatggagcatgacaatggggtaaatttaaacaggtatgcaccaaaggagtaatttaaaacaggtatactgggtgacaacaataattcaaaaggagacccactagtttatatttccacattaaagactgaggaaaatatgaatcacagggaatgatggaaatttgcaatagcatcagggaaatgacctttttctcctttggtaacaaggctccaattcacaacccgaggttccacggcaccaagtaaattgaggaaaaatatgccacttgaaaggcttctatcctgtaagtattacattcagttaaaatctgaaactaaaaggcaagaaaaaatagtagagaatgtagtcgaaacttgaaaccattgtatattagtttgataataagatcaggattgcatatttcattattaacaaattatacaatggcagacattgaagaaaactttgcggctaactaaccaaggaagaaacagtaatatgacattatcaattaggaaatatatcaaagtaaaccaaccttgaaactctccattcgagaatgctttccagaatcctttacttttttgtttgcccaaatcagtatgtcgttatctgtgatctctttaccatttgaatggaatctcagattctttaacaattgaaggatattgtacctcatcaattgccacagaaaagctggggaaataaagtaccatatgattaccaaattatacaagtgtctatgcaacagaacatactcattgttgagttaaccagcagtttaacaagaatcactaatggagcaatctaaatgccctccaaaaaatgaacagttcagcaaagcatcaacaagtaagtcatataaaattatcaggcgtcaaagtgataacaattatcagacaataatgaggtcctatgtaccaaacttgattgctattatcaggtacttacagacatttataagcatagtccaatttgtttcttacatgtttatgcagatctggtcaagttatcatttgcagactaccaggacaatgcagcaatgccaatatgactaaaaacacattgtattaaattgatgaaaataccacttacctaatatcagtttcttgtttccttgcacaatatcattaccagcaatattcaccaaggaaaattttagttctttcccaatcttcagaacttgattgcaattttccactttcctgaatggtaattttattgggggcctatttgccattttccaattaactgagccaggagcaatcttgtcaatcacctcaagaagcacccatctgtcatccccagaacaaaatatcagatagagcatcggcttgggtgacgattaagatggggggagataactttaatgtaagacctacccatttctaagatcctcaaacacattgttgatgtatgtagaaattccaaggctattaatccataaccggaatgacctctcttccctcgaaacttgagcatcatcagagagtccgtcgacaaaggaaacttgtttcatttgttttgacagcccattcctgaagtaaaaggagcaaaagtcaaatactttcatgtagttgttcccctgaaatttttctggttgctaacctgacatttcaatccctgatactaagaacatcaattttcatgcaggcttcaacctcagtacaagacaacaattttttggtaatcatacagcccattagaacagtcaatctcattttgtgacccaaatgacttattactacatatgttattgttggctatagcatatctgccagaaaagtaatactgatagtccattgtaggtcagttcaaagaagatatgttgccaagaaaacaattccagaatttctagttgaatccctttctcaacctgtttcacgccatcacactgacaaggatgatcatgcatagattgcattcctttgctatgctatgaacaatacatattgatgaataatacacaaaagaaaaatcataaacctatattttatggaagcacacaaggttgaacaaatcatgcaaactgaaaagggatttttgtgtttcaaattgacagttttccgagggaaacaccactctagcgcacctttagtgagtgataagatgaaggaaacatgggatgctaacataacattactagtagcttcacgaagataatctttttccaaataattatcatatgttaactgtagtatttacacaacaatggataccatcatgtctatccctatgtactgcctttatttcatattataagtcgctttgcctttttttttctttagctttgaccaagtttatagaaaaatatagcaatatttttaacataaaacaaagaaactatcaaaatatattcaatgctagatttaataaaattattttggtgctataaatgttgctatatttttctataaacttggtcaaactttcaagaagtttactttgaaaaggtcaaagtgacttataatatgaaacggagggaataataaaaaaaccaagcagaaattcaatttctttgaaaaaatattaaattaaataaagaaattatgagaactatctataccttttctggaaaatatgagccacaaaagcaagatttagatttggtaaaccgtcgacaatgtcttttggggtcagatatcttttgcagcccatcctatctgcatgctcaagaactaatcttgctctatgaagaagatctttaactgacattggggatggtttagcactgcattcaggtgccaagacattcagtagacaagcatatgcctcactatcctgcatttttatgttacaaaaatataagatatgcattcttcatactgggatgtagatggaactaaagaacagataaaccaatatttatccatcaattgactatagtggaatttaacaaccaaaaatttgataaccggaaaaaaaaaagtattcatgatgttacatgaactatgagaatgaatgcatcatgatgtatgattaattaattattgaccatagtgttataaaataaatttaataacataaatatgtaattcgataaattaacatttttactgcactaactacattttctggcaaattagatgcattcattctatacatcagaatcctaaatgatcaaggaaaactatcgtggcatgtgaatgctaacatgtagaaaagatgtcacagctagcaacaactaaagaagactggttcatattggaaatcaagtgagcatacttttatatctgatgaaaaatttgttactgttctttggaaacctcctttcttcaattgaaagttcatccatctgagtaatattttttcaggagataagctcataagctcctccatctcctgcaaaaagcacagacatatgaatttgagttattttcccatctgacacaaaatcagtcaccagtgtattagaataaatatgaatcatgaactaccttgctgtcttcaactaattctaccaattgaggtgtgctcttcaggtttacatcagccaaaagttgtatctggtagtcattatgttagcacagtcagtgagatacatgaagaaataacagaacttcagttcttgtgcgcaacaaaataacaacaggaacacaccttaattatttgtgatatcaaacccaagataaggtgaggctgcaagcacataagagagttttcataagatccatgcacaacttatatgaatgcttgagtatataaatggagtgaaagcaggtgtaatcaatgaaatgcacacaagaacaagagcagacataaaaacaatgcaagtatagcagaagatgcaaaagtatctgtatttactagagcatgtaactagtaatatgcgaatctattcaagagaacaaaaatggcataagttacaagtattctgaacaaacaacaaaattcaagaaagtgaaacctatcacacaacatatatttattcatgtagttgattctttctttagtggatttttcatggtattatcgaaacaatttcaagtatttgatcacaaacaaaatagaagggcagatggataaccataccaatcatatgccaccatttaagcttttacagataattgtgccatggtgttccagtgacaaccaccaagaggtacagatataaaactaattaaagcaaggagaaccaactcataatgctttacagttctggccatcacatggactttcagtctagtgtgtcccaacatcccctacttgaacacacacacgtgcgtacccgcaactaaaaagtgaacaaactgaaacattcagctttattctgaatctcatactgtcgtaaatacgttaatgtactaatgtggtgatcacacaaaagaggacaaggaattgaattaaagaaacaggcagagtccagtgcagtcctacccttccctcggcgaggtcctgcgtgccgatgttcacgacagtgcagccgatggccttggcagaattgaggcagagggtgtggttctcgttcttctcccacaggttgagcagcttcttggtgttgatggcgcgctcgtcgatcgtccccggcacggccaggttgatgagcttgctgaatcaaaaagcaggggggaaaaagagaaagaaagaaagtcagatcggagcacatgtgagtggatcggagtcgaaaaggcgatcgatgagatgagatgaggaaatggaccataggagcacgccgtccttggtgaggtggaagaggtgatcggtggccggatcgatggggagcgcggtgttgaggaagggatcctcggcgaggtaggcgttgatgtggccgacgtaggaggccttctcggactcgctaatggtgtggagcagggtggtggtggcggccgtgaggaacgccgcggccgacgaggaggaggagcgcgcgatgcccccgccgccgccgcccgccttcttcccggcggcggcgcccttgagccgcagctgcatctcggcgtagacgcggaggaagagctcgaagccgacgccctggtgcggcctctcgtcggcgcgtgcgacggccttgagcacggacgcccactcctcctccgtgagctgcgccgccgcaggcgcgctgttctccttctcggcgtcccctcctttcccggccccgacgccggcggatgatagcgccgcaggcaggtcccgcagccgcagcctcccgctcggcgccgcgtcccgcagcgccgcgtactgtaacaccaccaccacacaaacaccaaccagaaacgcgaatcacgatcaatgcggcggcggcacggcggcgggcggcggatcgagccgtggccatggacagggtcgtcgtacctgggcctggagggcgcggaggtcggcctgcgagaagcggcgctgcaggtaagggtcggagacgacgaccagcccgtcgagccccatggcgcggagcggatggatcggaggagagaggcgggggacggatcggtggccgcctctctctctggagtggtggggtggcagctcagaggagagagagaggggggatgggccgaggaggagggggaggaagagcgttagttggtttcaaaataaagcaagaggaggaaggagatgatgaactggtgtgtgggtctctgggattcggggggtaacggaaagccttgccttttgcgtgcctacagagtacaaccactcacacagtcacactagtggggaggaggaattcaaattccgtgctgggctttgggatttccacgctcgctggggtagcagtagcagtagcagtagcgggcagtggctggctggcaggtggggcgcgcggggggcgtgacagctggtcccgaccgttgctgtttgggaaggtagcggggggaggagaggaggggggcgagttctcagcggctcattcgctgccttggcttcaactgatcatcatcaatggcgttggctgcaaactgatcgtcagtggcttggctgcaagtgattactgctttgactcttcgagtttgagctcaaaagatgagagggagcccagtgctcaatattagaggcaatttttttatacgtaagttgctttaaaaaataatattaatttatttttctaaaaaaataataaatacttaattaatcataagaaaatatatcgttccgttttacgtgtgcggaaggtgagtttccaaactatcctcccaaacacagccttacttcataataatttgttggtttgttcagataattgaaacttaatcactacgatattgctctaaatcttataggttttgttgtacagtgttagtgcataattattggggggccaagctccaccttgcccacaatgaagctctgttgttgtggggattgtcagataatagttgaatttgttttttttctcaccccagagaagccaccatttacacaaaagggatcactggattttatctttgagtgagtaccctttcgttggagggacgaaagaatttctcattcatttcggaggaaaatcatctgtaccattttcatgccaaccaatacaattttcacgtcaaatgtgttttggatcgttgttttcaatcaatatgggtattatatatcaaagtaaatgcatatatctagctaatttaatcctatttattaactccaggaaatagacatctgggagcatttaaacaatagccagttgtagcgtggctggagtgttgaagtctacatatgtagccaagtgcaatttttatgtcgaatgtattttgcaccgttgatgtgtatacacgtaggcaaaaaccaaagtagatgcatcaattgaaggaatttcgcaggaaatttagaggatttgaatccttggaaattatttctaatgagatcctttggaacataggaatgaaacttctgaaatcctacgaaatggtttcctatgtccctcattccatagaaaaacaaacacttcctctctctctctctctctctctacactctctctaattcctgaaaaaattatgtgttttatttcctatgaaatattcaaagtagggttcaactttctaactgagtgttggatctcaacctccaacaatatgattttttttgcaaaattcaatcaaattttgataaaatttattgtttgaatttgaattcccaaataccattcaaaatttcactcaggcttttgttgctcgtcgaaacctcaaaacttcatggtttttcattgaaaaaaaaaaaccttgattaaagacactacctctaacatttcgttgttttcgaatccgataggattctattggatatgacatcatattcctacatattttttgtccctgtatttttcaaaatcttgcattacaaagaagccataatcatatcctattcacttacttaagagttcatcagagtttgttgtttggtagagctccaactcctaaatttaggtcctatttagcacagctctagctccagctccacccctcctagagctggagtttagcctaacagttcagctccaccaaaactgggagtggagttgggtgtagctttctcacaaaatgtactggagttgtggagctgggtttaggcaactccacaactctactccagactcaactcctggagttatatttaggagttggagctgtatcaaacaggcccttagttccaggagttgggtttgaagtggagttgtggagcagcttaaacctagttccatctctctagctcattttgtgagagcgctgtgctcctattttaggtggagctgaaactatttggctgaacaccaactctaggagaggtggagctggaactgtgccaaacagaccctaaaacagtatgatgaaaacaataagttgcaagtactggtcgagtattgtggattggaatatcatgtcggagtgaatcacacatgaatttaaaagatgatgtatttggatggctcatagaaaaacaattcggttttttggatggattctagagaggagagacagagaggagttgcattggatttctcaaagtaaaaagaaaatgaaggttgagctcatgtgctaagggcatccacaatgtacatgaaaaccagtccataggaaataaaaaattccattcagctatcttaacacattgtgcaactagtctatagcaaagaaataacaaaagttgtccatagcactatgggtagtccatagacaattaaaaaatcatagttatgccaggtgcatgcatactgcagcctgcagcttcagctccggctgatttttttttttgcctttagtgggacccaccttaattgcacatattgtggtggtttctaaaactatgactctcaggtgtgggtcccacatctatagactagtttgccaaatacattggtgttgccctaatttcctattgaattgaggtataggaattgaatccaaaggaatttggcaacatccaaaacctatgttctaaacaacctacttagaaaaaaaaattccttagtatttcaatctgccaaaattcctacggaactctctaagatccaagtagccctgaaatcaaaagcataatgttactgtagaaatttcacaatgttgctgcagaaaagcataatttacatatactatataaacagaacgcacttaatgtttactgaagagaaatcatcacagatcttccaaatcgttagatggtacttgatgatatatcaactattcttccgtacgtacccaaacgaatcattttcttgctatattggactagtcctcagtaagatttacgattctgattctccatattgcaactgtaatcagctgatcaatgttgtaacatctctttatttctccttttctcttcttctttcttatactggaattctctcttcttttgctgtatttttattttctttctctcatccctcctctccatgttaccttttctctattccttttttctttcaatttctgtatctttgacccaccgttaaatacaggttataaggtagagtctcttcaccattttgcgtcaaaaaaaaaagtcgtgtgacaatgtggcggtgccgtctctgatattaccagccggacaaagcacgcaatcttaaattgattgcgatcggccaaagtatataaaacacatatatttatatttatgggagataaaatatgtcacattgtgtaatacaattatataataaaataatctatgagtaaattgcacctgcggtacacaaatttaagaggtgagtgcaatctctactatttaccttttgaaccaaatatatcgtttatccttttgaagtagacatattgtttatttactattaagcaaactattttccctccttggcccttgctaacgatgcgttgccaacttaagaagaacttgtttttcattgccaagtgatcagaatctacaaggtctcatcgatgtcaagcatagacctatgttttacaccaagatacatgcttctgagaccattgcctttttctaacaacttaatggatgtaaagaatataatgatgtaaaagtatgttccttgacaaattattctagtaatgtcattttcgcttaaaaagccttttttttttgggggggggacaacattatcaagggatttatatggcattaacttcaagtaatcaatatttacttataaattaccatagcacaattgatggcgatgattgacaaattgcttaaacctccaagaaggaaaacctgtttctttagctacaataatccagcatgattttttaatgagaaaacataaatgcatggctacgaaaataggcatggtattgaagcaccatatgtaggaactaaaaaaaaagaggatctgaatcagttccattgatcccatcattaccaaagataaaatatacagtacttgcaaaaaccttttcgtctaacacgtgaatgttaaacaccaggcactgtacgtgtttgggactttaggtcatgtgctacccattgattgttttttttaatattactgatactagctttgtcgaaacagaaaatactgaactgtacggatgtaccctattctttgcttaatagtgcttgcttttctagcaaaagctgagcaacctcacttagtgagtccatttccaaacctccaatagttttttttaagagtgttccaagagttcgtgacaaatattcatgcactttcctctttggcactgttacttttggtctggagtttattgttctaattctgcatttactaacatataaccataatataaaatctatattagaagagagaactgcattaactttcatcgttcagtacaaccttcacacgctggttacagataattgcttgtgctggagctaatgaacacctaacaactatgagagtgacacataaatgatgatgtccattatggtatcaagtactgaattaggccgttgatgacctaccagagaaagctaaaagggacgaacctccgaaaaaacttcaaaaggcagggtttgcctccaagtttggattgagaaattgctcttgtgaaatcttcaattcaggatattcattcaatccacaccttgggtaaaatgctcttcttttgtttcaaggagctttagggtgttgattacctgtaacaagaagcagcatgtccctcttgatggtggaggaaatagacatgttgcatagaaaagattcgaagtgtaccttgcaaatggaaggatgaaagtttatgtgcagttttaatccgcaaagggaagaaaagatgccgacatatttgtaatatatggctttgatcatcatcaatttgcaacttagaatgtagttgcaattattagataagaacatgagcaagatggatgtgtggcgtcaaccagcaaggactaggcttttgaactctcttgatgtgatatttctgatatcatgatgtatatataagcatatatgcaatgcatatgtaccaaacaagctgaagtgcatgcacacattatatttatggagggcccttgaggtgtggtgcaaatgatatggcaaggatgctatcagagacagttgtttcttcatcctagtgatacaggaaatggcatacagcatcatggaagtgccccaaataccaatggaacttcttttcctctcttgtgggaaaattggaaaaaggggatctgaagaaattaccttcgtagatgattgaatgcaggctttatccctgaagttttaaactgcaaaaaaaaaaaaaggtggcttctggttttcagacctttcagacacaacacaaatgaaacagacattgtggaaactgtatggagcaagagatggggggaccaatgtatgttcctgcaaaagggaagtctcaacagcccatcacttagtaggcaaagcagcagcaacatgtgggggcaaaggaccatgcccattgacaatgagccagtcatgtaatgccagggaccaaatggtactgtaggtctctcatacatggatgcacggtgtaatctcgaagtatgccaatcttcgggtggtaggagtaacatgataaaatacatagagttgagaaggatgacattgcacacttgagttgcgccaatggcctacagctacaaacaaaagagtgaaatgttgaagaactaaacacgataactgcaaatattacattggactgactttggctcgtgatccaccattgataaatggtgagaaacagcaagcttcaagcaatcaaaggtcgctttcatgagctaatatgatcaaagagtaatcaaccagtatgcattagggtttctttccagctggcacaattttagcatgtcacttgtgggaccaagaaagagacatgaaaattcttcttgagattcagaaacctcagctttaccactatcattttctggaatagcatggatggaggtttgcgttagaagtgacaacacaaatatgaggtgagtcctatcaaaatattcagcaataaacgttgagattgatagtgtaaataaaaatatcacaactcatggtatgtaaatcactgagagaaaaaaaatattgaaaatgaaatttcaaaaagtggagcagcaggtgcacatggagatggaaccccccaattaggtgcaaagaatatgaaatgtccagaatcagcttgacaagattgttaaagcagaaaatcttcatactgtgatactacgtagcttcttatatgaaaagatctagggccaccatggaccacacctatttagtgaccaactaggcttcctatcatttgaacctaaaggaaaagaacaataatggaaaaactggagtcgaatatcgaacataacaaatattaagtcagacaacaatgaagtccgatacttttacgattattaacaggtaatattaacaaggtttggactttctgaaagtggtaaatagatgatacctagtgaattggaatttgggaaagggaaactccgtgagggcagcaaattcttcaaacaaatacgcccatcgtatttgcatcatggctttgatatcacaagccaaaataagcacaaggaatatctgaagcaacaattttcaaatatcgggctgaagcagttaagtcttgtgtcttacactcctcgtctctcgagttttgtggactactactgaaaaatacctctatgtgttacgtgattcatcaatccattgaggtttaaaagatgagtgttaacagattgtactaagtcaaaaaccaagaatgggcatggacaaaactatgccaagaaatacaaaaagcatacaccccagaataaaaaagcagtaggttggatgaaatatttaagccattacaaccaccgtttacatttccaacattgatgcactcattgtatgattagctaaaagcttgaaaatacaaaaatgagaataaattgctagaatgcaagttaaaacataaagtccacaatttatttacaataaaagggcaaagaaaaggtcttacccttatagcaccatgggtgtggtgagtatttctgatttcatttgggagaactacgggattatttatggatgaatagagaatatgaacttggttgttatcatcaatgcaacacaatacttcttgagcatacatatcttacttgactatttcttgaaaactttcaaaaccaacttcatgcagctccaggatcccttaggaaagcctggaaagcatcttgagttcttgacctagtactgcaaacctgcaatactaggatttcagtcggtctgtgcatttttagaaattgcaatccaacacatcatatgataaatgatgtttattttacattttacgaatataaatctgaagcatcggttgttcaaaaagctttgggcaacaagcaatgaacctaccaaagattcaaatatagtttctgtacatgattgcagctcaaaagattatttagttataaggaaaacattcctcagcaggaactaactgatcaatgtcaggactgggaacacattgaagaagtatttgatagtagaaccattcttcaatatacattgaataagtatttggtagtagaaccattcttcaatatttcagtcatactattgctcaaaggaagagaccattcttcgagtcataccaatttaagatctgttgctaaaaggaagagaatgtgcagaaccttgttcatttaccaaatttaatcagaaaaggggtcccaaaatggggcactacctgctaaagttcacctccagtgtctcaggcagaagtagcagcatattatttccagtagacagttcgttcagtgctggcagactctgtcaccatagaactagttcgagaccagtctttcctacaaaagagaacagttcactgatctaatcataattatcagggataattgactacagagaaccaagcatcataagtgctcctctaagtaatagaaaaaaaacaagtaatctaaatagcagactactaggcttggaatcttgtatgtgccccttaaggaagctaataagaatttaccacactaccaaaacaaagtaatcaaaccggtatagcatcttttaacaatatatttgactatgccaagcagtttcattacatgatcatatcgtttagtctttatttatcattcagatcatgcaacttcaatagttggccaccttcctatgtttgctacatctgtgctgaagttggtgactagaatactccaaaaatttaatcacataaaaaattaatatccaggttaaaaatgaattatgctatcaatgtcacatcaagtgatctcagttgtttgaacaaaatttcagaacaagaaaagcctcaaatgtataaaaagataacaatatgtgaaatgataagacataactggaattgatctatatatcagaggatagttatctgaaacaataaaatcatttttaaaatcttaaaacacattcacatgtaccgctagaggatagagacatattttatgtcactcttggaatattttagtttttgacacaaaacaatgtgtcgatgttaaatcgcacatattttttcatcatgtccaatggcacaactgttgtcattgcaacaaaaaatccaaaaatatttaaggatgaacaaaagtaatgtagttcatagcatatttactaacatagataagctaagtacaatgcttaatttcatatttctcaagatgactgctttacaaacttacactagtgcgaaaaaaaattggccctaccatataatctcgtacccacagtaaaaaactgaaccgaattgttccccttccccacttattgcccttgtaagtccatacgacaatatcactcatcaagtcctaataccatgagttgaagtcgatcagctgtactcccagactacccttgtccaatataatcctccttggttcatccgattcagaccattgtctagcaacagcatgaaaatttgatattagcacatgacttcctggattttctgggtcaacctccagaaggtgcagagctactttgttgcctctcaacacatccatgttagctttacatgcattcaacatagccacacagatggaaccagaaagctcacttcgggttataatgaaactacaatagagataccatgcctcatcattctggcctgcacggcctaatagatcaataaaacatgcatagtgctctggtcccggattaatcccatattgtcttttcatcaaatgcaacatagctcccccttcatccacaagaccagattgtccacaagctgaaagaacagcgagaaatgtaacttcatttggcaagaccactggtgcaactttctccatccttttaaacaaacctaatgctgcttctccatgaccatggcaactgtaagcatcaatcatactggaccaggaaaccacgttcctgcaagccatttggtcaaacacaatgcgagcagccattgtccgcccacattttgcatacatatcaatgagtgcattacataagatcgtctgtgaagtagacccatgacggacagccttgcactgcaccagcatactgtacatcaaattcgctgtcgctgagcaggcagtgagagcacatgtcagcgcaattccattaagctcaatcctccccagaatcaagaaagcgtccatgaatgatctgctgttctccacacagcctgaaaaaacagcgttgtacagaacaacatccttttggcaatccgtgcacagtgcactgtgcacatgaacaacctcatcgcttcctcaacaaggacatagctcatatagagatccacaagcgccgtcgccctgatgacatcgtcctggcatgcaagaacgcagcgcgcgtggacctgacaggctgacagccagggcggagggccatggtgcagagggtcgcggccgtgggcgcgaaccgcgcggtggccattccccggaaggcgtacgctgcggtgccggggcgcgcgttccaggcgacggcgtcccgggcgggcatttcgtcgaacaggcgggacgcggcggctgggaggcccgcgttggcgtaggcagtgaggagggctggagggcggtggccgggatagggctggagagggaggaagacttgatgagggtagcatggactacgggagagtcggacgggtgggaggagaggcggcggagcagcgcggcgagcggcggcggccgccgcattgcgcattgcatgggatatctatgacgggataaacgctgtatttagctccggttccagccggcagccgctgccttccgagtcgtggttagagcaaggataatggattaatggtgagttctttctcccaacttttccctgctcatatcctcgtgttccgcgtacgtttttcaaactgctaaacagtatctttttcatgagaaactagaaagcaaacacagcctaatagtagagctcacttcctacaattagtttattttaaagccaacatataaaatatattagctataaaattggctacaattttcttctcctctctatctcacttatacatttaatgtatttgtcctgaagcttgtgttaagctagctcttgtatgagagccaacacccttgattttttctgttacctctcttatttacgtaagcttataataggcttatagcttactattatccttgctcttatctggctttcttgaaacatgttgttgtgtactctttcttctcgattcctgccactgcgaccgccaccgcaaggtttggtggactttggagttatcccgatactggcgatatgaatgctagtatcttacgattatatcaagccgaaacaattccgatctcacatagtatcttaattttcatagtatctcaagacaacatggatagatgacacaaactcacaaaccccacgaggcaaaccaaacaagaatgtagatttaaacgcaaaccaaaccctttttttttaaaaaaaaagaaaataaatcaatagctctggtcaccctatatacttatagaaatccccactaagtgtagttaatgttatttttctcttctcttattaagccacatcaccttaattatttttagccattggatgacaaatctatagttcaaattgtctcttctttcttctctcataacaccaagtaatctcaatcatttttaggcctcaaaatttataagtatcaatttgttttagttttaatattcatatttcatcttatttgtacatattatgcaacttaatttcccacagcaacgtggcagggtattcatctagtttatagatatagtaaacacatactctctctttcatctggtcaataccagtagaaatgtagaatctcttagctaacattcaaatctttagatttggatttactccgtgaagttatgcacctgcaactttgtttagtgcaatagcgtagtattgaattttcggtaatgttaatagcaaccatctgcttctagtcaaatggtcattcatcttaaaacatacttatggattccctttaagaatctcaagattatgaggtctccttctgagagcatgagcaatgggtggctctgggtcgtagtcctagctcacaccatccggctttcattgcctttcgaacccgcgtcgtcccctaggagagagccagagatgcgcgcttgctcgcgggggaacgcgcccctcggccacttttggcggagccacagagccaggctccgcattgggcgcaccgtggctagggaagtagctcgtggacaacgctccctacccccgtatttccctattcaccctcgcccccctccctcgccgtcgccttgagttgcgtcgcactcctcctctttctctgcctcgccttctcttctcctcttccatcctcgctgagcaagaacgcaaggattagatctgagattcgatcttccactcaccctgccataaagagcaagaaatcggagcaggacgagagcagcggagagtgaagaggagatggagatggagtgggcagtttctttcacttctccctctctctctgtacacgtctcatcactttggactccgagccaacaaaatgcttaaacaagtccaaaatgtttctctctctcatttctcacctctcccttcctcttcaatgtgactgcacagagggcaaggagaccgacaaaaaaaaacaaaaggagcaaagagcaagagaagtagtactccagtgagggtgtcggtgggctcaaaagaaaaaaatgtaagagagaaaatatatagcaatggctacgtggattggttggattggtgcacactgttatgggttaggccatctataatcggtaccctcaacgcgtacccttgcaaacggtgcctcctttccaccgccgggtcattccctgggaaagaggcgcaacgcctggcagaggaatgcgtgcctcggctgcttttctggagccaccgctcgaggctacgcgttggaggagggcgtggctcgtggacacggctcctgctccacaaatttccccttccaccctcggtctcgttgctggcagtggggaggagtcggaggcgacagcgacggcgacgagcgacggccgccaccatctccttcccaatctggccaggaggggggatgcagatccgtaggcgccggatctgctgccccccgaccggcgacggcgcgaggtggaggagattagggaggcggacgacgcgagaagaagagaggggtagtatagtaaaatacctacgtgggttttttttggttagggacactcgtgggctactaggggtatcattcattgtgaggggagtttccctacaagtatcctctagtgaggacactttaggagtggctcacattgtggatgcccttagagtatctccatccagttgcttcagattttgaagagtccagctacaggtatcctccattgggatggagtggcttcagttagtgagagtaccaatggagtagctttgattgtagatgccctaagtgctgaactcaaggttcatgaatccatgaacttaacatgcagattgttacaaagaacattgtttggcacgtataaatctgaacaagtctatgacagcggcactctcaaagaagacaaccgctgactaaggtggtatttggatccagtttagttcctatcacatcagatgtttggacgctaatttggagtcatgaaccataaacgagtaactcagtgtaaagtttgcattactaaaactgtactctgatcagaatgtacaacatgatttacctgttttctatacagaaagtttgacctaggattacaacaaaaatatgtatgctttactctcagcaacggaaaatgtattttctgtctaccgtgacctccccgccttaccaacaatgaataaaaagaatttccaccttgatggttgtgaaaaagcacatgttaccagagaaaatggagctggaaaaaaatatgaagaattaacaactgggcatgtatttgttaaattttaactgggctcatcgctgccttttgctttgcctcgtaacatatctccaaaaccacccagcattatacgaccaaaccttgtgttctcttgctgagtttgtggggtaggctgagagggggtcgtggcagcagtatcatgttgttccccgctctctttcttcacaaggaggctgctctcaccaaagaagctgctcatcgatgatgcaatcccaagatgtgctcccattaccttgccaaggctctcaagtttacctcccgacctttcgcgggctataacttctagtgcttccttgtgtgcagggtctagagcatccagatcttttaacaagttctgtattgacggcaaaagcagatcacgtacgcttgtagcaggaagatctgcaacaaataagagaaaacacatgtaagaaatggcagattaaactatatggccaagccaaaacagacttatgactatgggttttactaaatatcatcaattaaagtccctagttaaaccatgactgggcagtgctctactaacaactaataaactggtgtgaatcaaaagccaaaggagttgttgattctgtcaacactggtaacatgttctacccctctaaacaaaatataattaagttttgttcaaaaaaaagaaaatataattaattaatcattccattcattttgttcacttttataagttgtattttgatttcaaaaggtcaaccttttagactttgacaaacaattagccagattataagtactttcagtatgaaaaatacaccgcaaggatcatattcaaaatgctttcacacaacgctagttttacatcttttataactacatattatgagacatcaatggttaaattttaattttgaagagtgtcaaactaaattgtcttatggaagtaaaccgaaggtacaatatatgcttgtaaagatttaactacaacacagaaagggcatgattgcttcactctcaagcaacagcacagctgtatttacttataagtttatgccttaattctgccctgtgatgttgaaaactgaaattatttagaatggatttgcaaatgaaaacatagtctattgttcaaaagcttctgttggcttcatcaatttaccatgtacaagatggtactccatctctatattaggtaatcaaggatacagtcaacctttcaaaacattcaccattaatagacatgccaaattgtatggattaactgtatgaaaccaatgtatttgggtttgtcacacaaatacttccgttacatagttttatttttactagtatgctatggtaagaacccatagttatacctaacattggacattgtaaaaactgaaaaatgacttgatagtttaagacagaatatgacagtaacaagctaatatgggatcaaagttggatatgcaagtgaacaaactaatgtaaatggaattcctgatataatatgtcattgctaaatacttttcaaacgcatcttgaaatataaacaaaatatactgaaaatacatgcagatgccgacttgaccaaagttacagggttgtggtataagggaaggattagctagttttggataaggctaacctgtagcatccacagcacgcagtgcttcacagaatacatttgctatctcacgacgccgctcaatatcatttccagtaggtggggcgctcgttagcttaaatatcttagttaaaagatgtatgtaatgtcaaagaaaacagaacacacaagcaatctaatgaatcatgaaaaaatggtaaagactttagaaattaaatgcggttgataggatatattcacgtagtctatctgttgtatgtggcactgccactgcaagtgcacgaataacagaaacagtagcttcatgtgatccatcttcaagaaaagcatccatttgaattcgtatcttgtcaacaacctgacagcaagtctttaaggcaatgcacgaagtacataaagtatcaaagaaaataaatgaagatgtatacataccatgtcatttttaaaatgctgagcaacagctccaaatgcttctatactagcatattttaccgtcaagttttgatcagaaccaagggttataagtgctggcaaaacatgagttgatgctactttcacactgatgtagggtacctgtgtgttaaaacaatcaaggataccatgaggaacatatggaaccaagaaggcaaaggtggtcaaccctctaagaaactaccaatgcattcttgtaatgaattaatgatacgcttacaagtgctttcagtagagctgcagcattggtttttaggttggcatcagagatcacaaccatctcccacacaatattaaatacagcaacatggtgctcctcaaacatgctacataatgataataagtgagacacattaacatagagcatatcaacaacatcgtgacactggctgcattatggattcagttagttaaagcacgaaccaaaggaaccgaactgcgtcaatgatctcagcagtgtgatgcatagaaaatgaaccatccttcgtgttctggataagtaattttctcaaatattcttctaattgttgacgttttgaaggataacccaaaataccagataacaacaatggaaggacacacacaattccaagtttttcggcaatagaagtttttggacgcaaacctgcaagatttaaacacaatacatacaaatgttgaacaaaggaaaatttaaaccaaacagccttgccatattaatacaggatacttaccacgaactctagactgggttgccagaggaaaataggtgaaatcactgctgtcaatatcccccgctgctacaagaaatacaggtagcataacgtgttccagataatctatgccataacgtcccgatacatccaataggtactaaaaaagtttcaggaaatgattggtcagaattttatacatgataccatgatggaaggatatgcataggtgttgatgtgatctgtagaatttaccttcctgatcaccgttcttaagttatcctctttagcaggcaacaggcaagcaagcttgatcaaatccggtagacactcagtgtgcatccattcaaatgctgaccactctgtgtcacctctgtcaagtgtcccaggacacaattagttgatagaagataaataaactctgatggttcgattaaattgatcgtgcaataaacatcctaattttgaccactgatataactaaacctatctagattagccattcgaaaatgatgccactgcatatactttgaagatatcatgtttttacaagttccttcatgtgcataactgctgaaaataatgatcaaatatacactttggagaccgttcaatttcaaaaacgtcatacatttaagaagagagggagtagtaaagttttcacacaatattacagaggaagacaacttacgctgcatacagttttaggcaggattttgagaagtagctttctggcatagtgcctgtagaaggatcagcagcaaacgggcaagtagatatagctttctggtgaataaatggtagcaactcggtcaacatgcggaggaggacatcaatgttccaacgctcttgctctcctaaaacacggagatgagagtctattgcaccttcaacccctgaaacgggcggacagcgctgaagcataacaattgtgtcagaacacatgtggcacttcaaagaaactataaggttcccaaaatttacaaacatgtatacctgagcggatgccaggatatgtgccagtaagattctcaatatctgatccagtttatctccccatcttacaacagcaggaacaagttccttgagagcaacattcacaacagcccccgaagggtcacagaccaactggaacattagctcctcaacctaccaaacaaacaggaaattaagaggacttccaaaataagtattatgtttcattgatttgtagcgcagcaagctttcaatcaaaacatatattctccactaaaaaaaggaagttctgacgggttaaatttaactaattataagaaaccaaatttcccagttattggctctaagcatttgcaggacttaccttataatatttatccagatttggaaacagaggaagcagcaatgtgaggttatgtgttgcagcttcccttacaaccgttgcagaatcttcaacaagttgttgcacaatggataagataagggaatcacgtatctcaggacgaacatatactgctaattctccacaggactgggcaacaagcaacctacgctcctcatattggtgatttatctaaacatcaaccaatttagcattatgtaatattatatacctaaaaaggttaaaatatctgccacaaattgtcaaatacctgttcccaacattgtggaagtaactcagtttctgtcctcatctcacctacactcttagcaagctccacacaagcctgcgtgaagaggaaaacagttatgtgaataaccacaatttaacctagtactataagtttgcaagctgcatcatgagaagtgcatgtgccatgcaccaattattgcaattgtaggaacttacatccattatgatgcgtctctgttgtccatcaggacgtttgattagattgaacaacgtatgagttaaggaatcacgtacatcactatctggatgtttttctatggcacagatgatcaacggaagaagctcctacaacagtgcagcaagtaacataagttatacttatataaagattgaaacaaactacaagggttacaggtaaacctcacgatggtttataagcacataaggaacaatctttggaagagcatccgaaactattttgatagtctccaaagcctgcatggttggataaaaatagtttgcttaatgaaatttgcaaagaaataaatgtgaaaacttcatacagaccgaatatatatcaagtcactaaccatcttatctgatgatttttgtttataaggactctctactttctcggtatgaactttatcgtcagttagataaacagatatgctatctgaatccccctggctattaccagatccatgcagattgccattgacagataaatcttcaaagcaagtgtttgtgccagatttatcttctcctgaagtgccatagccactgttctcagcagttgagcaggaaacttctgcttctggacctggggaaccttcaaggctactttccatattttcatgatctttctttttaccctcagctagactcacctccgatgctagcttacttgttatggattcggatccttttagattgtcatgttcactgctcagcactactatttcttccatagaattggcaggaattaaaccatcagtatctccagaagataatcgtttacttgacctagtcccttcaatatgcatcttaagggacgtaatttcagctctacaatcattcaactccttcctctggacatccaatgattgcttcaagtcttgaacctttcttaaaatgtcagtgtagcaatgttcagaagaattgaagtataagataactgggttatttctgagagatcattaccgttttctccttctcttttatgtccttgtgtgcagcttccaaagactttcttaaagcagcaatctgactattagccacttccctgctctttatcaaagcatctttttcagcaccaagactttcattgtccttcagtagcgtctcattttcgcggagaatagaaatcttttcctgtgatatgtaataaaagtgatgacttaagaatatatggaagttatgggcttgcaaggaaaaacagagtctttaatgctcagtcatgtacttctgtggtgcctgttttcccaattacgaagaatgaccaagtgatcctaatcacgttggaccatgatacaagtcttggataagaatctaaaatgcactagaaacccccaggtttatgattgttactgcaataacatctagggctagtcaaatattgtgatacctcaaaatggtcacagaaaaatgttaaacatatcaaatgcatcgaatgctaaatcctgctacttattgattctcgaaaatcaattttaaaatactcttgcactgcactttatgaaatgaacattgactcatggcttatgcagcggttttatttcattttgtgtcactataactggattgcacattgttcatgaataagataaatgtgtcaactatatgcatactccatagaatgtaattattactaaacttgaatatgatgtaggcccttcctattagcacgttacttggattctgtcaaaggattgcatgaagcatatgatctagttaccacaaatttccagcccttttcattgaagtatgttggtaaggaaaagattcattccaatatgatttggagtaaatataatgtgtattcttagcacacattgatggaattaaaaacaaacatgtaccaggatctaatattgtcgcatgtaacactgtaatgcatcaagctgtagtcagtaaacaattagcagcttttgtaggaacattaagcaactccatggaatcacctctgcagcctctgtggtagatgaaagatactgatagtagtaacgacgaagggcatcaggcacacaagctgaactgttaatccaaacatcaaggtcctgatcaggaacctgcaatcagaatgatctagtaagctttacgaaggtcgtcaggcacacaagctgaactgttcattctactgttttgtttgattcataattgatttgccagcactttttactgttggaactttgaagcacttatgggacccacctagtgttcattccacagaatgaagcttctactaattatgcctatcaaattttcaagggataggtatgtgtgaacagatctgtagaaattacatttggcgatatgcaaacttcatttgaaaatttacaaccatgaaataaggctgggaaaggatcatccatatatgttcttttaaaagataactttctgtacatacattcccatgaattttttgtgatgctactagatacacatcctatcaaccatgaacagaatttgcatgaatttattttgttgagaaaaggacgtgactttgacgtgaagttccataattttgactttttgcatgagaaacagataaacaaaccctaataaacttaacaacaagaggaagccatgaaagaataataaattctaagagaaaatatgatacagacctcctcaatgaaagtcatggctgcaagtcgatacccagccaaaagcaagtattctttgacagcacagttcagatctttccgttcattatccttaagaggacctaatgttgaaattttggcatcccttttgtcatgatggctagatccttcatttgtcaaagcatctgaaagaggcccagcatgccaaatggataaatcatcttacaagcacaagataggtctagcatggatttgttttcatggaaactttttcagcttcttaagctcacataatcaacaaattaacataaataaatacatgcatattgtaggtcaaaaaatcatacaaggatctatgttccagtgccagtagatttacatttagcagtacatagttactagcataactcaaactgtgcactctccagctggtatgtgtgccctgatattgatcattacctcataattaaggtacagtgcaaaaaatgctaaaaagtacaatttattgtctcaaaaaccagttaaaagctatgatgcgcgctgtcagtaggacctcccctcttatatatgtatgtctatcagttagcaatgaacacgatgaatgatgactcactttgaattatctagtaaaagctagataattagatgtcaccaataaatctgcagcagagcgctcaccgcaagctagtggcccttgaagaggcaagtgttttacttaaaagtaactagaatatctcaagcttgtttgtggaaaactgatcaaagccaatgcatcagttctgttcaaccttattgaattgttgagtgtaaaagttcctacagatacccccagcataagccacattaatgcttataaccttcaaatcagacctgtcttttgtttatttcctgttaccctttatgtccatggtacttcttcttatttcctttaaaccatatagcctccagctgacaagcaaatgccatgacaacaaggacaatattgttcaatacaatcccaattcccaaagatcactgagataaacaccctctcgcgtatcacagccatatttcatcctcacatgagatggaattttcaaagttcaatatgtaagccacagaataatgagataattttcacttttggcacttatctgagtaccaaatgctttaactattgattccacttcaatcaaagaatgtaaaaacagaaaacaatagtttttgctccatgccatcacatgaaacacaatatcacgctatatttgtcatttcaaggttacataccggtagcatttgagccatcaggagaagattctttctgcttttgtaactcaagcttcaacctggaaagatcttctctggctagccggagatcataatcagtgagggccaacttttcttctgccgctattttctcttccagcaagctctgtggatcagcacctgtcaataaaaacatagagataatcacctcacagactcaatgacagatgttagaacattagattgaacacaaacaccgcatctagtgtacatggataagcttgcacaaaaaagtgagtagattgttgagttataccaagaacagacccaaacatttacctgtaatttatttgttctgatagcattgcttggcccataatccatatgctactcaattttaatgatattattaagtagttgcaaacggtgacataaacaatgaaactgccacgccttgtgtggtctaagtaaatttaattgtactgttcaaattaataatgccccttcaactgcgaagtaactaaccaaccaaatcgtctgtagaatgtaagtcgagcaccaaggcacatacacctaacataccaacaacaagatgaattcaacagcgccaattcggacgtaatgcagggatattatgaacataatggcaacacaggaagcagggagcgccactacgccgcgagatccagccagctgaggaaaagggttgggggggaagggggggtgcaaatgcgggggacgcaggggctcaccgggcggcgcggaggacgcgcgggcgacgaggtcgggcgggaacagcgcggggtcggagaagaaggagcggaggcggagcgcgtgcgcgtggcggccgtcctcctgcagctcctgcaacagctcgagcgccgtgaggtggtacctctcctccagcaggaagttcaccacgcagttgcacagcgacgcccaccgctcctcccccgcccccgcccccgtcgcctccatcacctcgggatctggtggtggtggcggtcgccggcgccccacccggtcaatcagccgccggcgacgaggcgcgctcccgccgcatgcggtggtcggtggatctcgagagaggccggtgggtcgggtcggaaactcggacgagacgagagaggcgaaggcgtgtgatttttggaagggaagagaggaggaagaaagaggaggagatcgacggagaggatcgaggcgcgcgctgacgtcagctcggctacagaccgctggtgtgtctgatgtggacacgttgcaaatttcaaatgggccgaaatgacgaaggcccatcaggtgccggcccatataaagcccggcccttccttccacctgctagtaatctcacgaacccttgcgccgtcggtctctctctctcgctctcgtccccgccgcggcgccgccctgctctccccctagggtttgatttgatcccatcctactctctcgtggtccgcggccggattgtgcgagctccgatcggagtgtgtcttaccggtggtttcttgtgtagtgccgctgcgatttcggagggccggtagtccggcggcaaggaaggaggcggggcgcgatgaggttggagaagtgctggttctgctcctccaccatctaccccggccacggcatccagttcgtccgcaacgacgccaaggttcgcgcggtcatcctgccttttgctctttctttctcattttcatgtacagtatgttacgttttacggtggagaagcgcgcccttctgtgctcgggttttcttgaggaagaaattatcctttctaggatgctacagaatttgaatacagcagtccctgaagggatttaggtaccacggttgtacttgcttagaccaatctgtgtgtgttttgtagtactttgcagcattttttgtttgcagtatgtgaccctcattgtgtagtcacacctcgcattgcctgcccatgtcattagcgttgaaactaacgcctaaactacacaaaccaacaaagatatattggtctggaagggttgaagaatagaagctagaaagacagaaggaatttagaatttgtaaaacgttgggatgaatgtaacagctgtgggctcaattttcagaagaacaagagttagggcagaatgcagatttatgtaacccaaaaaatatgattatcaaactacaagatttgttgttacctaaacacctcagttttcattgccatagtatttataaacaaatatatggttatccaacccatggtggccctactgcatgtgtcactggctctctctctctccatctcttttgctttgttcagagtctcagagagctagttgtcccatttccacccaatgtatagagtagtccaatggtggtatatacttcttcactttcttccacacctatgtttatccatccaatttaacaatgtactgtgtcatgttcctgtcttttttcttgtttttcatagtaccaatgaattaactggagtagtggacaaaataatcgttgttaaatttattactttgacacatatgtttctcattcagtatttttctcctgctttatggttttaatagtggtggatgctaaaagctgaggtctgttggataacaacgctgctttcgtccaaaataagctgctagaacatatgaattttttagaccatattatagtaaaagtaattacattaattatgtcagtcatcaaagagatgtgggccgctagattctcctgctggttccattatattaattattgcactcccaaatggactgaaatgctatgtcatttttctcaaatcggaatcatcacaaaatatcaactcaagagacaaaatatcaacacaagagatgattgagaggagaggaaggagcgagtgggaggccaccactgcccctcgtcgcctcgctgccgtggaggtcccgagctcggggccagatcctgagccaccgctccatcgggaagatgctgcgccactgaggatccaccgcgcagccgctgtgccggggagcagctgacccgccaagcggccagggagccgtcgacctgccatgccgccgggagccatcgacccaccggatctggcgaggagcggggcggcggcaccctgatgagaaggaaagggagcggtgagatgctggtgggggagcaactccccctgccacctcccgccccctctcccccactacctctagttgtggccgcagccgcttctcgccccaccgcaaagccggcaggtgaagaagctaaggaggaagccctctcggccgtcattggccctagcgccggcggcaaagtgactggggaggattggtcgcggtggagcacatcctcgcctctcccggccatggtggctgccgtcgttggcgagcctctcgagaggaggaggtgcgcatgaacggagagtaggaggatggacgtagcaggaagggggagggaagagccggattgaggagggggaggaagatgcgagaaagagagagaacgatggagaaaacgagaataggagagaaagaacgacaaaggggatcgatatgagggatccctcgatctgatccgatctggtgaccttatctggacttagttttttactatgaaaaaaccgaccggtctattttaaagaaaaacatgaaaaccgaataagtgaaccaactggtgaggccataaattttgcaaaagcaccactcatcttttaaattttagagcgcagtccaatttttgcaatttcttctcccccaaatatacctatataccaaattaaaaaatttaggtccttatctatatatatctctatctctactacttaaaaaattgaaaacgtttccgtcatccgcaatagcgagaaaagggcaaaaaaaacatgaaaaaaaaggaaagtccgattcaatctatctaaaattttccaccgcacgtgcgatcgatggcaaaaaatgagtctgcatcaaattcaagaacacaagaaaacactaagaaaacgctgacgccgaaaggggagggtgccgccgaaccgccaccgccattgcagggatgtcgggccgccggctgctcccctcccactggatccggtggaaggggccgctgggacgctgggccgccaccacctcccctcctggatccgtcggaggggaaagcgccgcccgccaccgtcgagccctcccgcggccccatggcgagggagaggaggtgagggtggagaggcgccgctgcctgcggaaggagagccgcctcccctcccgttagatccggcggaggtgagggagctgcccctgcctgccgtctccctcccaccggaagggagggcgcagcccctacctgccgcctccatctcccgccggaagggaagagggggagatagagcggtgccgccggtggggttgggaaaggaggagaggcggagggggagaggcgccgccgccaccgttgagagagaagggggaggggaaatgtttttagggttagggttgggctgttgaacttttatataggtcgggatcaatcaggaccgtccatcagatcgtatggctacagcttctcccgcgtcgggccaaatgccactcccaggccgccacatggaataagttcactttaggtcccttaagttgtcccgattctattcctaggccgcccacactattgggccgcctcatggaccgcgtttacgctccgtatgaaataagttcactttaggtccctttagttgaactttttttatttcattcattttgatctagagaaatgaatattgctgccttatttctcgtgtttcatagtaggggggcagaggggtagttagggcttgagccctatgccttgctccataatccccattataatcttatgaaaatgctctgtaatttgtgataatatttgagctcctgttagctgaacgcatgaagattttctggctccaccagtagcaatgaatttaagtggacatgaacaaccattgttaaatttgatgcctatgtttctcattcagtccttttctcttatattttatggttggaatagtgatggatgcctaaagctgggcctttctgaatatcaacactgttctctttcaaaataagccacaagaacatatgaattcttttacacaatatataagtaaaatcaattaaattaattatgtcagtaacaaacattttgtcggtatgctgtaacaacattttttttgtcggttataggaatgtaacattttttttcccttgcagatcttcccttgcattcctataacaagctggattttgtcggtatgctgtaacaacattttttttcccttgcagatcttccgcttttgccggtcaaaatgccataaaaattttaagatgaagaggaatcctcgtaaggttaaatggacaaaagcatacagatgcttgcatgggaaggacatgacgcaggtatttgcttgttctattttcgttcagtattaagtagagagcacattttctatgctgtgaaccactttctatgctgtgaaccacatctgaatcgtttgaaatcaggactccacctttgagtttgagaggaagaggaacagaccagagcgctatgaccggaatgtcactgcacaaactcttaaggctatccctcttattacaaagattagacatgaacgccataaaaaacatattacagagaggttggcatctgttcttttggctcagtctgttaattcttgaaattatctctttgcttaacatatgcactgaacttttaacaggcaaaaacagggtaagacaaagcaaagggagagagatgctaaggagttggaacaggatattcaaatgctcccgaagaaggataccatgctgtcaacacaaaagacaaaggtcgtggtcaaagtttctcagcagcagaccgaagaaaatcttatggaagagtaatgaaatggaatcatgttgcatgcgctctcattttgtcatctttatgcaacacttgtgtttctaattgttactttgcaagttgtatttgactgattaccagcaagttttgcacgtactgtgtgcctgtgtgctttgtgacttccatctatatttgagccttgggcctagtaatggtgtctgtgcggacttgcgctaagcccaaggtggtgtgcaccctagggctaaccctaggatatctctaatcatatttattttatttagtagccattattgtttagagttggattttgcttagattattatgccaaatataatttcgcagctaattcgatttgtagaactccaacttcaagtgcctaatcatttatttgcaattgaggtgtcatgtaccatggtgctgcaatcgctggattgtgtgtgtaagtgtttgccaaatcgatttttatccccacctaatggaagatcgggtagcccgttgtcatcaataatctaagaactcaacctttttttatcagatctagaggaattccttcacatctattctaccatcctctatgcagctggcgcaacgacaacgttttggtaaactacctatccactacattgaaaggccctgcctgctcatggctcatgcatcttcccaaatcttcgattggatcatgggcaaagctctatcaattcgtggccaattttgccaatttcaccaatttccagggcacatacaagaggcatccaaatcgaggatgaccaccatgcaacaagacagagaaacggtgaaccccttatagcaagttcaatagtatagcctggctccaaatcatctatagccaatctaatagcccattcatacaatagttacctataaaaatatacgacatcattaatatccggtcctatctctcatacactcataacgtattgcagccggctacaaatctgtagcccgctttcttctctcttttctcttttcttctcgatacgtggttatagctggcttatagcctgctattgtacctgctcttagggacttcatacaacgctttaatgagtgccatagcactattcccaaaatcaccaaagccttcatcaacacggaagagttatcatcactcaaatatggagtccaagatcgttataccatccaagagaacatggaagaaaacttcagcaatgaagttgttcaaaatcactgataactcatgcagacgaggttgactaacaaaactaaaaggaagatgtctgacgagaagttactcgccaagaaagaagaatctggaactagaaagacgctagaacaatccagaaagcggaacaaatagcacaagccaaaaggagaggtcctcgttgtacagcgagaaccacaatattttctaactccgcgagatcctggttcctgaactccatgtgttcctgtgagaaagagtggaaatatctctatgcattctttaaatgattcagcctttaaccacatggcaagacgaacttttgatcatcaatttgggggcaaaatttggaacggaatcatttcttaacactacttaataaagaatatgagaacatccaagtctctctacactggtgatgaaagaagaatacaggttcaagagaagattctacacagactgaagcatgttggcaccatgcttgcatcaattcaccccctgtcaatcctggccttgaccaacccagaagctcagccacttcacctttggtccagagcaccaaaatttttatgagattatatgatccttctacctcatcttaacaaggaagatgggcatatctctgcttaccaaagttgtgtcttctccctgatcatgtttgaaatgggctgccaacccatcagccatggcttcctacttgcagggactgcaaaattgagctcaaacatctccttgctgatgttaccaccctcacagaaaccaaccagcctggccactatatcggcgctctcatcaatgtgagcttggtcattggggtctgtccagagcctgttcacaagctggagcttccgctgcttcgcctccaggggcacctgccatttgatgaagaggcgctctcgctcttcttctgtcagccttgagcccatccttctcgcgaggaattctcgctcattcctcaatgccttgatactgcaacatgaaatcagataattggtttatatatcacgattcgatatcagttatgactaatgaaacatttgactcggaaaaacattcatgttaaggcttttctatcagataactaagctccatcttcactatcaacatataaggtttctcagtaagtgttcttttacagaggataaaactactgtgagaaaacagattacaaggttttgcttccagcaacatccattttaaaggcctaggggacatgactcttttttagaccttccaacactattttctttttctggaattaactaacatagcccgtaaaactcaaagaagtaaaggctaatatttaccttgaggctaaagaaattgtggagtcatcaccagctgcaggacttgcatcgcccacctcagcaaaatgctgttgcaaccatgtcagtcttctaacttcgacttcaatatatatctgatcagccctatcccccctgaataataagtagaactgggtcctgtgtatgattgatacatgacagagatcccacagttggataatgtgctgcatctgctccttaaataatctgtcccatgaatcaggaccatcctgtagagatcctgcattttcctctgaatcttcttccatgtcatttgtcttgccttcattcgattccaactccaagacctgtagtaagattacaagaaaacatattttagtggtgaaacaaagtaacctttgcatgaacaaaacttatgtgtgcaagataaacgatcataacctgacagacaagcagctgcttttggtattgaagttttgcaactctctccttcagttcagtgacataagcccggatatttctaacattctcctcagcagcattttggaacatcttctgcatctttttcatgttcactgagctggatcgcctatagcgtggggtttcatcacgcgatgatacatctccagtgtcttcactcttagtaggagtagccctttctgaaccttcatgagacacagtgtcaccctctggagccctattctcaacttctggctctaaaggcctactagaagagaggggagagcatggtgctcttatcagatttggtctgtttatgttgctcacgcccagtggaagaagcatcctcttcttcttctttgctctgttggactttggtgtagtctcgttacattgtgtgccaacatttggaagtgacatcaccaatctatcaatagacctctgtacattttctagtttagcctcaagttttgcaatatcattgtcttgcatatgaagtctactaatttcttctttcaaatcagatccatttccttcatctgtgatcatgtcaacatctctgtcagatctgacagattgcatccccctgatttcagcctgtagtttagcaatagtttctgctgcatcttgattgccatgtttatggcattcgacttctttgtgcagtacttcaatagctcggttagcctcaacctcaagctgctgttgtagctgctcaagcttgcgaatttcatgctttaacataaatggagcagtggctgattgtctaatcgagctccgtatcttcattttgttacttggctgtagtgatccagaatatgtgaggcatttccgtgtcctttgtggtgagtcaaaaggattccatccctaaaagaaaacatgggtttcggaaagattaggttgacagtaaatgaatgtggttctgactggctgatatcctttgaaagaaaagtaaatttgcaaggaaagggcaaatactcactggctgattatcacccatcttcttctgtaattcttcaagtttcaactgtgcattgtctctttgcttcttgagttcctccatttctttttccatctgcagtgttcacttaattaggtcagttacaaaatggaaatgattccagtgaacttcatccttgagcatagacattacctgtctaatcttcctgtccctttccattataatgatctcagaagaggaggcacgatcaggggttctcagctcagcttcgagtctagcaacttccatctgtaggtgcttcaccaattgcttatctgataccacctgtacgtaccaaggcccaagggatgaagatttgcattctcataagtaaataaatgatgcatcacagtcacagatcttaccatattaacttttgcattattcgtaacctccttggcacaggttgcaaagaatagagtatttctagattgttctacatgtgtttgcgctggactcatggtacagatgatggctgttcttgcatttccacccaaagaaagctggagaatgcgtgtcaacttcgagtctcgatagggtatgtgtccacttcttttatccgagctgcattgaaaatttagagtcagtctgctaatattcccaataaagatatacttcattatagtttcctgttcaaaccaagaaacggtaaaaatacaaatatgcagtaaattatctaagtagaaaagaggtctcaaactgtgtattagcatgacactgcaaataaattatctagtttaacgtgttcatgacactgcaaataaattgtctagtttaacatgttcatgacactgcaaatacacaatgctgcttattagtcctgccataccaatgtcacttagccaacacattcaagaacttacaattaactgtgttgcagctatgagattttaataaaactcactttagttctaaatatgcagaatgattaaacagtatagtggcaataggacagagtacagagcaattgcctcccacttaaacaaagtggcctgggaatattttgatctgatgaatctcattagcatgttttagaaattcattaggagataagatacatcattaacatactgatatcattacaaatcaacagataacattagaactgagactaacccatgagtgcatcgaggtaactcagcgactactttcaagattggtgcagataagagataatagacccagagttttttctttctttctttagaaaatcataccttagctttctgatgacagtagtaagagtcagtaagctgcgatttatatggcagccttctttcagtcttgcgccaactgcatgtgtttgtgcagctcgttcacttccagcaagatcaacaaaattctgtgaaaaagcaacacatattattgagattaaaaaaacagcatgtacaccattgcaaaatgaggacgttatgcttaccagattagccacaaaagatttaacacatcctgacacttcacggagcctactctcaactgtctggatagagataatgcacaataattatttttctcactttcatgaaaaagatctaacataaacatggaggcttatttttatatataccagcctaatgatctggtgggaacgtgaactggtgtcatttagtgcagtctccccaacctgtctttgttctgcagtcataaagacatcataagcaataggctaccgcgtcaacaaaaaaaaaagtaaataaggcaacccatttcttctggttcttcttgaaaaaataagttaagacaatatatacagatagtagttaccttcacaaatactgattagatgcctaagatgttggctatccttggcaatttcttcttccagtttttctacaattgttcctttctgtcaaaccataacaatttattaaaggataatcatggcatgcaagagaatatgtgggggcagtgcatagactctgtcgaactggaaacaaacctcaggatcatctaacaagcgaagattggtagactcaggtcgtagaagatccttcacaatctcattgtaaatttccatagcagatatcttgatgataaagtccctctcaggagtctatgcaatcaacaaaagcaagaaacaattatgtgttatgtgcattttagaaagcaatatagatagcatgattttgttgctccatgtataaaaaaactcacattttctatgtgcctgtatatatcatttacagcactctctgtgacgcctctcatggtgaatgtcttaccactgctggtttgaccataggcaaaaatggtggctgcaaaacaaaggaaggtaaagaataaagagtagataaaggatcattcaactttattcaaactactgagtgagaattaatttaccattaatgcctgtcaatgcagacatagcaacatccttagctccctcttcatacaccacttctgtctgggaagctggtccaaacaccttgtctggaagggtaagatggaatttaaattagtcaatttagctactgaggtaacttcaaacttataggattgagatatgaagtcattgatcaagagtgtcactacaaacataattgcttgagatatgcagtcatgaatagatcactgaaaagcctaccgaaagtgtaagaggtgggtgcagcccgatcctgtggggggcccttgtacaaaattgtctggttatcatcgcactcccatgccacctgatccttcaaggccagttctttcttgctcaatggtcgcaccctcactgtgacaaaaatcttctcctccttgaccctagtgctgccaccaggggttggggtcgacatcggtgtgcgctcaatctttgatgcaggggtgcttggaggtcttgatacacccattttcgctagtaaattgcagattccttgaagtctggggaaaacagcaagaacccagccttctcacgaagctggcacaaggcaaaaaatggtcagattcaatttatcacacagttgcacataatattggcaaacaattccgggaagatagctctgcagcaacaatgtgctgacctagccaacacaactatttcactattacaaaggaaataaattacatagtcaacacacaaatatttcatttattacaaacggagtaaattgcatgttttacttcaccattatgagtagtattacaaggagatctattaccaccattaatgttaaattttaaaatgaaaaacgaatgaatggacggcactaaacaaggcaagcacatctgcacatgtgcgggtgttttttcctaaaattatagcgtggggcgaaaattactcaatttcatacataaagctgtgccaataagatgtaatcttcataagaagaaatgtgttatctgcatcgctcgggtcacattcagatacaccccaatctaaattacgaaatggtaccgaattcaaaaacttcggatcccctctccccacctccaaaaaaaaccccacaatttcagattagggccatgggccgagaaaaacacgcaaagcaaaattggtaagaaataaaatgagagggagacgaagtgtattaatatttggaaagctcaatctagcaagtagataccgatcttaaaaaaaatctagcaagtatattcatgtatggaaattgcaatctggtaaactgagttcacaaacaaaaaattccacgagttagcgccaaaataaacagcattcctttcatggacgaacccgccctgtaacctccgagcggcaaacccgaccaacttccgttctccatccgccgcgccgcgcgaacgcacgggaggccacagcggcagatcggccggttccgccgccgccagcatctgcaccccccctccttacggactcaccacctctcggctactccgtcgggcccggcgggaaaacggcgccggccgcaggcagagcagaaccagggggctcggaagagagggagacgcacggggacaagcagaagcagctgaggaaaaccactcaccagcgcagcccggggattggggatccgaccgcgcaacccgccgatcgaggccactgccgctgcctgctgccgccgagagccgccgccggcggtgggcgcgcgcccgacgacgaggaggcggaggcggaggagcttctcgccgtcgctggtcaagggcggcgcgtgcgatgcgccgctcaaccaccgctcgctagtgctagcgctagtactactacgtagtacagtttgaattctctccggctcggtgtgcgtttcagcgttcgtttgtaggggagagagagatagagagagaaaataaaaagaaaaataaatcgagggggagcggagcgagcggggtgacccgtgcgatgtgtgggggagaggccgagtgaggccgcaacggctagttttggaaaggggcatccgaagcgccagtttctccggggggacgtgcggctggcaggtgggccatggggcggagttcggtcgtcggacccaccagtcggtgactggtgtattatggtatgctttgatttcaggtgtttttgtgggggggttttgctgctagctggcatcggtagggttacacagtagagtggactagacttggtttaaattcactagcattgtttttttttggcatacatggctagtgttatcagatgcaatggacatataaagtttgtagtcttttggattgtatatctactactattaatgtactgatttcttatatattttgaataatttgacggtttctttttattttaaatggttcaatcgtttcttttcatttccaacggctataattactaggattttgaatttgtcaccgttttgttcagtgatttgtgcttgtgacacatcgggccacatgtgctcagacgagtttatttagctttcgtgggctctagctagatccctagccaatgtgggctcgtgggttgtatttcgattgagctgactaggtgtgggcctatgtcaatggttttgtgttgatcgatggccattcgattttgctttagggtccgtgctgagactcgtagtcaacatgaggctcatgtttcactatttccgtgcctatctttttgtttcgttgatgttgagaaaaaaaaggacatacttctttttctttctagtgttgagtaggtccttttgagcatttttctcttgtgttgctcttataagttcttttttcctagatatgcctatttgcaagcatgtgattgattcatgagagggcaatctacggcgcttctccagttagtgtttctatgttattttgtgtgtgatttgaaggtaatgggaagagctcgcattgttgtgctcgtgttgatgattctccgagtttgaatcgattggtatttagcgagttgcgcttttcccttatcgatttgaattgttagctgcgagtttgacaggattaacgtttactcatcaagtctaaagtggtttgatccactattctaggtatatctctatgtacctaagttaaactaagagacgacttgtgaattgatacggtgttctggtgtggttgatgattcagtgttctgatgtagcctgtgtgctatagttaagaggcatttgctgattaattattggtatttcttaacgacattagcagaaatataattcccaataatggcgcagaaatactcttggtatattatgattacagagttcatccgcaagcgcacggatataccattgtagcatttcacccgagagtattccaagggtatcatatttatttaatcccatgggaagatcatagtagagagaacctgactaataatttatatgttacttgtaataatcatagtctaagcagggattaagataaatccaagggtagagtgacacataagtaggaagctactcattctcatactataatatctaaactaagtggaaagaaaatagaaagagaatatattcctatacttctaatatacatagtttacatacatcctagttatctgacatactagctaataccctatatccgatgccctcctgggactttgagaagccacccctgacttccgagttccttacgacagcccatcatgactatacaaccggggctaaatacgaaggagtatcatccccaggaaattaacttaggattatatacatatgcggaggattaccgtactgagctgtcaccatcaacggcccacctctcatccgcagcatataaccccaaataatgatatcccataatctagacaccacgcctaaactaccagatattactctaatatcatcgtcatgacatatagtaattgcataagcaaacactacacacgtaccaaagcatctcctagataagctagcagtataatcagtataacatgaacatagtgtaaatttggcattcatatacttggaaagtattccaataccataaatgtataaagaagagtattctaataaaagtacaaagcttacaaaagagaacagaagagctactagagccatacccgaactcttccgaaggcttctggactccgatttctactctattcctattccactagcttgagaacactaaactaacttgagagaatatgagagaactcttgcttgaggtgtatgtacagagtgaggaagtgaagtccttttatagcctcccaatgacggttatggcagttggaatggtcggaaatactttctaaccatcattggggagcaatcctggacgtccacgccaaaccctgcatccaacggagcagatgagggttcggccgaaccccctggttctgccgaaccatgggctggtccaatccaacccattttcggctggtagcctcctagacttctcctctctgcagacttgtgaattttggcccaattggtcgtgccatttctgagttcttggcacattcatacataagtccgatcctcaacatcgtccgattgatttatcgtctggtttgatgttgattcctctccattttatggttattctccgcaaaaggttagtgatccaaatactagttgtcagggttatggataccacatacctaatagtagttgactaaatctcggcaggatccaccacataccatgtcctatacggaaacaacctgcggatataggaggagttccggataagaaaagacaaccagagttctacatggaaacgacaaggactactcggattgtatccattttggtttccctagttctacttggacaaggggacacctatgggtataaatacaagcccccctaggaggagagggaggacaatcaacacatgaccacctcaatcaacatacacagaagatcaacatccaacacaatcaacatagaagcctagatacgccaagacacgccgccggatatcgacttcagggtaagcacggctagtaccctacggtatctccggatactgtcaggagagacgaaagcgctatctttgatctcgccgggcacggattcgaggagaaaggctaccctgttgtcgactacgagtcagatcgtcagaccgccatgtcgacaacagttagataggctaccccaaacattgtactggtgtggttatcatgaataagagcaataacggcttcggccaacaggatgtagggttattacctgacaattcaggggcccgaacctgtataaaaatccctgtccccatctcttttacctcagtctcgcatatatcctagcaccgacgatcccca

SEQ ID NO: 9588 - DNA, 29870 bp, Oryza sativa
  unsure (1)..(29870): unsure at all n locations
ctgagccggtttgtttcaaatccgggagatgatcattggcaagctctggaaagggtcatgcgctatctaaagggtacaatgagctatggaattcactatactggttacccaaaagtactggaagggtatagtgactcaaactggatatctgatgctgatgagataaagcacaagtggatatgtgttcacacttggaggtgcgctgtttcctggaagtcttgcaagcagaccatcttaacgaggtcaacaatggaagcagaactcacagcactagatactgccacagttgaggccgagtggcttcgtgaactcctgatggatttgccggtgattgaaaaaccagtgccagctatcctaatgaactgtgataatcaaacagtgattattaaggtgaacagttcgaaggacaacatgaagtcatctaggcatgtaaagagaagactgaaatctgtcagaaagcagaaaaactctggagtgatagcactggactatgtccagacagctaaaaatctggcagatcagtttaccaaggggctaccacgtaatgtgatagacagtgcatcgagggaaatgggcttgagacccacttagagttgcacaatagtggaaacctgtccgttgtgatcggagatcccgtgaatttggatggcgaaacaaactattgtgtaaccgagagaagagacccttaaatgggctcattttcatgatgtacttctcttctattctgtatggtaggatggcttatgcctcaatgtgttccgagtggctttcattaagcagagatgttgacctgcagaacatcttagaaggaacacacctatatgagttcgactgctagtcacaatctatgagatttgggtgatctctagatactcatgaaaggcctggagtatgacttataagctccaacccgagggaatactaacggttgcctagtatcagttatggaattgagtgaaacctaactgcacaagactgacaattcaaggcatagtccattgttcagttgtggtcaggtgtagctccttttctaggtgaaagttcaacttaacagtcttcaccgaaatactggtatataaaagctgctatggaatagagagcattctcatgagccttgaaatttggtggggattgatagatttaattggataattgatccatttaaatcaattaaatcaaataaattccaaggctcattatgctaggaattcatgtgtattcatttttttatgggatatcaatgggatgaagagttttgagaattaatccatttgattagggaattggtaacttatatcaattagttctaattgatggatggttgatggttgtgtagtggaggatggttcatggctagttgatgacaattagttgctctattcctcttcctattccattggtaacttacatcaattactcttaattgattgttggttgatggttgtgtagtggaggatggtttatggctagttgatgataattagttgctctattcctcttcctattccatgactcttactcgtcatcttccattcctcttataaaatgagaatggatttgatctcccgcgagaatagtgagacacactttcatccattttccaacgttgttgctgctacggtaatcccatcccgacgagtgtgtgcacacgtgttgggagagtaggcctccgaaaccacgcgctgctgcgacgtttgcacggacgggcgggcgatcaggtttttggggagcgcaacacgcgactactcactgttcgtcaacatctacttcactttcaccaatatgtcgaacactggagacaacggcaacactggatacaaggagaaggaggctcccgtcaacaccaacggaggcaatactgcctcaaactccagcggaggaccatgcttggggtataaccttcttacattatttcaattagaagttttactgttaatgttcatcgcaatgtcaacattgtgttattatgtgattgttgatgcttattctacattaagcatgctcatgttgattacattcaccactgtcactggatcaaatcccattgtaaatatcatgtttattatcttgttattttggattaaaatataccaaattatgaccaaagttctaacatcgtcctattctaattcactgtattttagaacggatgtagtagtaattatgtaaagttttgaaaagtaagacaaatcgtcgaacgtgcgtgatatcaatcaacgatgttatctgttaaaaaacaaaacgtaggtagtacttttcttccgttggacgtacaaccagcacgaggcgccgtgcattgacattgcgttttctcgatcgccgcctcggcgtctcgtgatcgtgagctcatccaatccgccgcgtgatcggcgatcgcggcgaggcggcaatccatgtttctgttccgtccacggacacaaggaatttttcccaaggtcaccgcggccgtacgagagctagttgtcagcacagtgatcgtcatgtcgcatgtccttcccctgattataatacagcaacttaatgccggtttatctgttctaacagtcactgatgagtgatgaagcagctgtttgtgattagatctgtctgtcctttttcggttgaacgtttgtagccaattggtttctataaacagaaaagtggtcgtcctgcattgagaaaaaaagaacaaatgaacttaagacattatcaattacaaataattaatcttaactactactccacagtgttgtcttatcactatcaactttatattctgcataatcaacacttgctcgagaagtcggcactcggcagagatggttgtgctctacattcatcttctccatttctcttttgtttatttgtttttgaattggtgatataaatccgtgcaagattcaagagccaagacagtttttattttttgctactctgacatgaattggtaattttatataggctttatctcagagcaaaagttcattgagactttcagacgcagtagtaacagtaacagaacttgctagtcacaggaaacagaggggcaaatgggctcggctcgtgatattgcttgtcaatttcttctctcattcaaaatcagaatccaaaaggatacgtctattttgcctcccttattttcttgcgcaatcattacccacaacctcaaaactggatataatgtctcccccattttcattggatggtttgggggagcggtttctgataacatgcaggtgttttaatcagaagtaggacaggagggatgacaaatagacttattccaatccagaagtaggaagctataattattgggcttaaatcagcaagcaggccgagccgcacacactaacaagccacaaagccccaaaaaacccaatggaaatatcgcaaccttgggagccggaggtttatccccaccacgaacgcctcctcttcttcttccgatgcggggaggctgagctcgcaatccccaaagctcgcggagatggacgccaagctgctcctcctccccttcccctcgccgccggccactctccaccaccacccgccgccccccaaatccctcttcctcggcgcctccctcccgctcctccacccgccgccgccgctgcggctgctgcggcccggcgccccgcggcggctggcggtggtggcgcaggccgccgtgaagcggcgcaaggagatcccgttcgacaacgtcatccagcgcgacaagaagctcaagctggtgctcaagctccgcaacatcctcgtctccaacccggaccgcgtcatgagcctccgcgacctcggccgcttccgccgcgacctcggcctcacccgcaagcgccgcctcatcgcgctcctcaagcggttcccgggtgtcttcgaggtcgtcgaggagggcgtctactcgctcaggttccgccttaccccggccgccgagcgcctctacctcgacgagctccacctcaagaatgagtccgagggcctagccgtcaccaagctccgcaagctcctcatgatgtcgcaggacaagcgcatcctcattgagaagattgcgcacctcaagaacgatcttggactcccgccggagttccgcgacactatctgcctcaggtacccacagtacttccgcgtcgtccagatggaccgagggccagggctggagctcactcattgggaccctgaattggcggtgtcggcagcggaggttgccgaggaggagaatcgagcgagggaagaacaagagaggaatctgatcattgaccggccactcaagtttaatcgggtgaagctaccacaggggctgaaattatcaagaggggaggcgcgcagggttgcgcaattcaaggaaatgccatacatttcgccgtactctgacttctcgcatctgcgatccgggtcggctgagaaggagaagcatgcttgcggcgtagttcatgagattttgagcctgacacttgagaagcgcacgctggtggatcatctgacacacttccgggaggaattccggttctcgcaatctctgcgtggtatgctaattcgccacccagacatgttttacgtgtcgcttaagggggacagggactcggtcttcctccgtgaggcatacaagaactcccagttggtcgagaagagcaaactcgtgctgcttaaggagaagatgagggctcttgttgcagtcccacgcttccctagaaggggtgtgccggcaactagtgaggaggctgatagaaccaatggagctgcgcaaatgctgagtgaaggaagcgatgtagaagatgatgaagacgagggattgtcggatatggaagacttaattagtgagatttctggtggcaaatctgacacagactaccactggggagatggctgggttggcgagaatgatgactcgccaccagacttcgaagacgatgatggctcaagtcttaaagaagtcaaggtgactatgaagaaaactgctaattctgccaatggcaaggcacatgttcctgtttttcctgatggcagaccaagggaacgatggtaaaatgatctattttagattgtttggtagagtgtgtaatctttgttgttagttatttcatcatatctagaaagtcgcaaaaccctcagtcctttgaggtgctgcttgaattttgttaccgagcacatgaatagcatatcagaatttgaacagttcacatgaatcatcactaatatagtgaacgaatttgaagttgtgggggtttgtgatcaagcatacttggtgatataaataggtgcaaactgtaacaacttaagtataaatacaagcttaatttgagctatgttagcaatggacttctcttaagaaacagaatgaggtgatgttcctacaaagtaaaatatagtgttagtttgagtgatcacgcaacacgttataacttgttctctttcttttttttttttttttgcaaaacaattcataacttccaaatgtttctgaatcatccttctggtttggaaatttattacctcctagcaattgtagttagtgctaaaggggacatcatcattagctctccatgaatcggtgcttgtaaagagtatgtcccatcttttcaaatgaactcctatggagggaagaaattcaagccactggagtaatggaatgccctctcagaacaaggattgcttggtaaaaactagggaacacaaggcatatcgcttgctgtctgctagattggcattttaaaatggtcagtttgatgaccgaagctgaatttgaggaatgatgtccatttttacgactatgcaacatgttctctgttaccttatctgtctgaattgccaagtttcagaagtattcgacgcttaaacatctgcattcccagtccttgtatattcagaagtttgagttgtcagctatacttgatgtgctcctttggttttgtttttcacatcagtcacaggaaggttcaggatggaatactcggttcattgactactactttgttgttgatgatgatgatgatgagatattgagttctgttattctgtacgtttggtttatatttgcatctttgtgtaacattgagaagctggtgcagtggtgcataagcatcatactgcaccctgtcagtctcatttcacaaaattttgttattcagtcatgggctcatggcctacttccgctccttcgtcgacttcgcagggtcccacactgactcaacaaaattgaccgtagtcaaagcaccacgtcggatcaaacgggagctatactgccttgggacgtaagttgatatggttttgaaacttcggggacgcactatatctggactggcggttcaagggtaaacttgccgacaaattgagggatctgaagtgaccttattacttttggacgcgaggtgcacgtctctccatattgcgcgaccagagtgggcccaccaaggttcgcttctggaatggatcaagtcggcccatgcgaatttggcgctaccgcagcgatccaactcggcgatactgcaactaactacacgtgtcgtatcggctacacgaggcattatgttgggacgaaagctcatccatgcagaactgttcgatggagacgatgccggtcccggcgccgcgtaccgatgaatttcaccgttggttaccacgtatgcatcaatgatctgtgtgtgcgacagagaaggggggtggggggcggaggaggagaggaaaagagggaatatagacttatccagagaaaataaaggaaatagaaagtagggtaaaacctttttcatacccactctatttatttttatgacgccattaattttttaagtatatgtttgatcattcgtcttattcaacaactttatgcaaatgtataagttataaatcaagcttaaattactttgactgataaaacagctcacaacaaaataagttataattatgtaatttttattaataagacaaatggtatgtgataaaaaaatcaacgccgtcatctattaaatcagaggtagtagtttggagtgtaaaacgagctaaaaaaattatttagaaggtttaaggaataaaatgaaacttttttgtttagaaattcccaaggactcctcgtgccgcacggccaccagattcagagacgcacggccgccggatacagacggcgagccctttcgtcgtggacgtgtcgcgcgggacgggataacatacgatcgtgggaaccagcgggaatgcagcgttgcaggccgctgcaggcggcggacaagtcaaccggtcaagcactcgcgggatcgcgtcgccgtcatgcgacgcaccagaggcgaacagcgtacggacttatattttctcgcgtgaattttctgattttaaatcgagtttttttatcctagtttattttttagcttttatttctagattgtttagaacacctatataaaagttctattccattgagcagccaaaggatggggctgttagcctttgcggtcaaagcgtcaaacaagcacaggtgaataaaataacttccctagctagctatttgagcgatactccagtttccactccacttaaaggaaggaaatatcaacggcaacctttgtttctgcccctttttttcagtccaaaaaagcgatagatcgagcatgcaccagcaccagctcggctaatggctatgcctacaatatctatgccgctatgatgtaaaaagcgaggaagcttgactgaagcttctgtctggagagagagaaacttcggtgaaaagatgcatcaaacattggctcattttcagaccagagggtgggattttcggcctcacgtgaaacggtattgtttattagctgataagtaaggccccgtttagttccaaagtttttttccaaactttcaactttccatcacatcaaatctttcattcacacacaacttttctatcacatcatatcaatttcaaccaaacttccaaacttcagtgtgaactaagcacaacctaaataagtattaactactactccctccgtctctaaatatttaacgttattgacttttttaatgtcttatttaaaaaaattaagtaattattaattcttttcctatcatttgatttagtgttaaatatacttgtatgtatacatatagttttacatattccacaaaaggttttaaataagacgaacggtcaaacatgtttaaaaaagtcaaaagcatcaagtatgggacggagaagggagtataattttgaaaacatgatttatttgattcttttaagaaacctctacgtataatttttttcacaaaatatatcgtttaacagttcacgtcatgatttagagttgtagtttaaaactcagccaggtatgtgcgtgtggctctgcaactataggatccagtagggtagagtgatcgcttcaaagtaggaaatgtgatcccaaaaaggcatgtgttttttatgaactgaactgttgggttgccgaggagaaaaaaaatggaaaattccactactcaattgggagaatctagggcaaaaagaaaacacatcacctttcctgggtacctgtcgcttttgcattggctgcttggagattattaaagccatgctcttttagcttatttatcgaatcatttaaaacggattatttgctacacgttttgaaaaatattttccacaaacaatattcttttgatgcactacttatactgcttgtttaaaactatttgtcacatttatctcataatttatatctgcaattaagttaatagcgttttacagtaattcatttaataatctaaattgaatggggcctaccattcaattagtagtaagggcatgaacggtgtttattagtggtctctctattgccatgcaagtaaatttaatgacatggaagaaagagaaatgagtatggttagctcagagtcgacttttaggatttattagagcaaattttattgcatgatggtgaaagaaagaaaaaaagtaagaaaaaagtattttgatacattaatgattaaagaccatattatctctaattgttgtagcatatagtctctagataacgtagagctcatatcttaccctacctttgtagttgccctaggaccacaagctgccgatgacgcaagtgaatccatctctgctgaccagtctactgacgtggcgcacagactgagaccgacactggtcgttttcactcgacatgcttgaccgtccgcacgagcgctttgcttccaatacaccttttctactagtagtactaataattagtgttagtataaatcaccaaaattagtactactaagtactaatactaacagtagctttaggatgagtggcaataattaattaacctgatctcgtggtttagtcagcctggtactgcacaaggagtggactagaccactgaatcgcacaaatgctattcgtccggtgattcgattcggtcagtcgcttgatcgcactgcacgtacatgcttgcattgccgagtcaaatttaacatgatctacttctaaccaggccactgcataattgaacgtgacaatacaatgtactccagtgttttacaaatctagtacaaatcctgctgaattagcgctgtagacggtggtgcctactacaaacgaagacgaaaacgtcaggacaattcttacacactattgaagaaaattttcttgtctgaaaggttcatgtgcagcagtagctcccagccaaaatatcaagaatttgatcacacatgcacttttccgcccatatgtcttgttaagtttttttttccctcatttggaatgcagaaatcaaatttcgtaggaattgcagcagtagttcacttgctgtctgaaagataactttcatggtgtctcggataaacacacgagtgcgttgctgcgctataatactgtactaacaataattgtccacaaactatacgcaagaccagaccaacactacaaacatggtccagtgacagaaaaggtgattaaaaccttattaaggaccacttagctaaactataggaggagaagtgaactgaggaagaagccgagcaaccgcaagccgccttccaacctcctccctcccgacacatagccacctgcacatctccacactacgtgcaccccattttcccatgagaatttcaacgaatcaacacagtactatcccaaagtcctattttagcgaatgcggtatcccaaagtcctaaagaaatacaacaatcaggctggcaagaaagaacactgtgccaagctaattcactgtccaagctgataatacttatcattttgaaaaaaacacagtctttaaaaaataattttgaccatttttttattataatataaaaatatcaataaatatcctattccagtgaagcatttttaacacttgttcaaaacaacaactagtattatcaacccgcatgaagtagcaagaatcctatgatcaatactaaataatattccttcgttctaaaatataacaaccttagtggtcctattcgaatctaccgtaagaatgaagattaagtgtgcgcgcaaaacgagataagtcattagcatatgattaattaaattttaattattaaaatcttaaaaatggatttattagaatttttatagtaacttttatatagaaagttttcaaacacaccgtttagtttgaaaaacgtgctaacggaaaccgagaaaaaaatgtatcttaattaatttagaacggggccattattagattagatataatactaagacgaatttggacaagggatcagtacagcgtccaacacacatagttgtcagttgagcaatgcgcagctgcacaagtgtgtccgtctgtggtaggttgagagttgagaccattctattctaacaaatggtcagtcagacacaagttttttttttccgaacggtcagtcagacagacagaagtagtgattagattagagctggattagtctctgcacatctccatgatggccaagaaaccaaaagaccggtccaagtgtttgaatgacactcgggtagtgatattctctgcttagtcataatcttttccctcggtccggtcaaagtttggatctgaacatgacgcaacgaatcacattttgctccctataaatactcctctccctgtcactaccacactcgccatcctacctcacacgctctcaccaacacaagaaaccacacgcttacgagacgccacggcggcggcggcggcgatggtggagctctgcggcggcgagggggaggggcagatcatgctggcgacggagctggcccagctgcgggccatggcgagggagctggaggcgaagatggacccggacagggtggccgcgcgggagctctgcagggcgctggcgtcgtccgtcgaccggtccatccgcctcgccgcgtcctgcttcccgccgccggagcacccgccccccgccgccggcaatgccggcagggacgccgcgttcaagaagaggcaagtcatggttcccggtcatggtggtttaatttcagggttgagagatcgccggagcaacgctctgacatgtgtttcgatgcaggaaggggatggccaaggtgaggaggcaggtgagggtgacgtcggtgcaggacacggcgtcgctggacgacggcctgagctggaggaagtacggccagaaggacattcttggcgccaaatacccgaggtcagcatcgacgtcagcaaatcatccattgatgacgtcactctcaccttccgctaattaaaaaccaatcaatggccgccgccgccgccgccgccgttgttgtgacacgagcttgatctctgctgcagggcctacttcaggtgcactcaccggcacacgcagggatgcaacgcgaccaagcaggtgcagcgcgccgacggcgacccgctgctcttcgacgtcgtctaccttggcgaccacacctgcggccaggccgccgtcgccgccgccgcccagagcgcgccgcccgagcatgccggccaggagcagcagaggcagagctcgctgctcgctgcgggaacggaaggaattcatcagcaggtagtggcagagcctatggcggcgccgttcttgttcacctcgacggcggccggcggcgtcgacgacggctacttctccttcatctcgccggcgaactccgactgccagttcagcagcgacttctcggcgggcagcgtcggggttgacatggaccacgaggctcgtttcgaagatcttttctcgagcactcttgagtttttccaatcggagattcagaatctgtaggtggccgaatgcacgcagtaaccgtactttgttaaaggttcgcatcagtattagctactggcctactccatactactctgtacagcctctatgctttttccttatgaatgaatctactattagttgctaattgttcttttccatctccggaaagaccctttttttttctgacaacctgaacctgcatcatccttaattccttgttcatgtccaacatactctgaacttgtgtgattttctgaagatgttgacttcaaagcctgaatatatacaactacagtagccaatcaaggtaagccagggcatccgaataaaaattatgggaaacgttttcgaataaaatgctcatgttactgcaagtaatgacagtttcagtaaattgaacactgggctgtgtttagttcctgaaatttgggagaagtttggagaaaattggtagtttgaaaaaaaattttaggagtttatgtgtataggaaagtttagaatgtgatgtgatggaaagttgggagttgggagaaagtttgacgtgaactaaacacaccccaggtaaatagagagcagatcgattaattaggaaatgctcacggggagtgcgacgttctgacctgtggtatatgatatgacattagattagtattaaaacattaggcaatgatctcgttcattaggtgaggttttctcccatctttgaatatttatatatactttctttatcatacctactggtaagactggtacatgaacaacaacaatgtacacaactccaccaatcaaaatgtacaatcatgttattctttttcttctcaatgaaattnnnnnnnnnnnnnnnnnnnnnnnnaaaaaaaaagaaaactcacacaaaatcgatatcatcatcagagtcaccttcttcctcgtcggtgccttcatcgctattgcgataaatgaattcctcttctaacccggacaaaatattcactttgaggctattaacgataccatcgttggtgtaaaacggttcctcatcaatttctggatcaaattcgtctccgcaggtatcttctccacataccatcttctcaaaatccacctcacgcccatggaaattttctatcgacggatgcataatcccaaccccttcatgttcgcagtaaaggcaacgcacttgttctagtagagaaaagaaaaaaaaacacaaatagaatttcttcagttctgcagaaggggaaaagctaaagagaaaattcagatttgtacatacctgagcatggtggcgatatggttactgggcagcaaatgccgtcgtggttgaggcgatagttaccgcattctgcaaagaagagttgaagagctccctcgccggcaatggcagatggatcggagtctctccggcgagccaagaaattgacatgacaacgaaagtatatcagaggagtataactgacgatgtcatcgtcagtgcaatacacgggtcctgatacgcaattgttcatgccacagatgacatggagctcgtaaccaccgggttcctgaaatcccagcaaaaacaatagagatgtttaattacaaagatttgttacagtcaaacaaaaagtacttttaagatactgataacttacgataccaaataattttcaattgttggatctaacaatgaacatcatgtccagttaaatcaaacgatacgaggatctaacaatgaacatcatgtccagttaaatcaaacgatacgaaacgatttgatactgtaaggtactagtacctcgagttactttttgctggaccggagcaaatctcttaatcatattatagcaataataattgttcatcaagaaagaaagaatcaggttaagatgttgaattacgttgttctgcaacgcgtatctgtccaatgcagccttcaccttcctgcagatcttgttctgatcacggatgatctgcgccttcagtttgagctgtcttcgccgccgtggtttcgttggtttgcgctgcattggcgagacggcggcggagggagttggaggcagtaaggcggcggcgaggcggcgaacgtcttccgaggagagctggccgccgttctgcaggagcagcggcgtcgtcatggctctgctagagctgaggaactccacttgttcgtccggtttggggtgccgggccgccgcggcggcggcggcgtaggactcctggatagtgcaggagggacggtgctgccgccgatctgcttctcttgcggcggcgttgaggtcgccgtcgaagtcgagcaaacaccggatggcgtcatggaggccgaggttggggtagcgggtgcagaggaaggagacgaggccgaggaaggaacgcgtggcgatgctggacatgctcttgggcgggatcatggccagctcgagctcttccaccggcgggtgcgcggcgtcgtaccagacgacgttgaggatgatgttggagacggggtccatggggccgtagcaatggccggccttcaccaggctccggtggtagtgagaccgcagctcgccggagggcagccgggcgagcgcccggaggtagaacccctggatcgcgtagaggagcgtcctctggagaggcatggcgtgccggtaaggcggcgcggcgatgccgttgtcccggccgagaaatcgggacgctgccagctcccacgccctctccatgttggccgccgccggcgcctccgcctcgtcgacgaccagcgcgacgaggccgcgcacgtcgtggttggcgagcgcggacacggcctcgtcgaggcggcgagacagggacagccacgcgtggacgagccggtcgggatgcggatgcttcacggccagcgcggcgcatctgagggccaaccttacggcggcgccggcggtgtccgaggcgaacccgaatctcctcagtccacggtcccgcacgacgaggcgcgccgcgacgaggacgtcagcgtcggcgtcgagcaggtagcgcacggcctcccagtccgggaggtgagggaagaacgtggtgaggaaggtgaccgcgccgtcgagagatcgccccgtcctgtcgttcccatcttccgcttcggcgaagacggcggcgttgacgatggcgttggagacgggatccagcaagccgaagcagaggccggcgtcgaggtccgccgccggccgcagccgttccagcgcctccgcgtgggaggcacgaaccttgtcaaggagcaacgatctgttcttgtcttgcgtcctggaagacggcgtgcgactccggcaatcccttgacatgatgacgcggcggtggcgggcgtcgtcgtctatgtccatggcggctgcacggcgcacgcaaagatgcgatgagcgtgcgtgttggctcgtttaggttttgtttgttatacaccccgatccttcctgacttttatccgaatcggctcctcgcacaagtggcattgtcaaatctttgaagtttttgggatttgctcttgctgcgtttgatttttgcactggcttacaggttttgacacgaaaaggattgattctcttacagttcatactccctgtcacataaaaaaaaacaagatagaactgatgcgagacacatcctaatactacgaatctaaacagactgtactataatatgtcatatctaattctagattcgtatctaattctagattcgtggtttatgggaccgagggagtctgttctatttcttaatatgttcagactagagatagcaacgggaattcctggctggagatttacaccaccagacccgcctccacggaggagatggcaacggggaattcctagtcggaggttacaccaccagacctgcctccacggagaagaattttctccatcaccatcaccgtgaaatgcaaacggggcaagatctttcaccatcaccacctccgtgcaggtaatttatctccgtggagcctccatccccgcgagtggtgaagacgaagccatggccgcatctagcgattggtcgtcgttttcccctttgacctggtggggcggcaccgggacgtggcggcacggcgagccaacggccctgcgcgtgcgcaacgggacctgacggtgcgggcgcgccgggacgtgacagcgcgggcgcggcgagccggcggccctgcgcgggcgagggcgtggcgagtcggcaaccctgcacgggtgccgacgcggcagacgcacggtggccttgcgagatcgggagtcggcgccggcgtggggactagggatggaacacagaagggagaaaggattggaatggctagggttttgcagatgctttatatgctctaggtgttgggcctggtttctatgggccagatgggccaaatatacatgataatactacacatacactattatgtcgggcctccacggagagcggggacgagggacgctgaaacaaacctgcccctgccagacccgatggaaggtgtttttactctatttaatcctctgtggagacatattttataccacccccaccttctaatgggaggattcaccgcagggaatcggaggacggggaaccattgccatctcttgcttagacccttcttgaactggaatatcctacgtcaaatagtcaatcaagaaaataaaacaaaattccaaaaaataggtaggagtagttcgcctacggttcggaaaactttggcccagtggaactaaactctccctaaacatgccggtataagggctgaacatgaacattgaacatgtacacagctccatcaatcaaaatatacagtcatgtaaacctcacacaaaatcgatatcatcatcagagtttccttcttcctcgtcggtgccttcatcgctatctcgataaatgaagtcctcttcgaaccatccatagcacctgcatactcgaggttgttgacgataccatcgttggtgtaaaacggttcttcatcaactaaaagatcaaaatcgtcttcacagggatcttttccacataccatcttctcaaattccacctcacgcccatggaaattctccaccgatggatgcacaatcctaatcccttgatgctcgcagtaaaggcaacgcacttgttctagcagaggaaaaagtaaacacaaataaaatttgctcaatttttttgaaatataaatttcttcatatatgcaaagtgaaaaaagactaacacaagtactctatctggatttataatattcatcgttttggacaaggctaagatcgaacttcaaaatatttaactatgaataatttctaaaatatttattttgcaaatatagagaccataaatatagattagtcttaaaagttactttaataaaatcatatactcgtttgatatttctactacaaaatagtggttaaagttgtttttttgaaaaccgtgcccttattcaacatgattagtattagagcaggtacaatagcagactattagccagctacaaacatattttaataagataaaagatgagagagaatagcagtgggctacatatctgtagccagttacagcacggactccaagacgcaatgtgtgtatgacaggtgggaccatatactaatagtacagtaatcaattattatatgaattggctatagatgaattagagctagtaaaacttgctcttatcaaccggagtccggagggagtattatatacctgagcatggtagcgatatggttacagggcagcaaatgccgtcatggttgaggcgatagttaccgcattctgcaaagaagagttgaagagctccatcgccggcaatggcagatggatcagagtgtctccggcgagccaagaagttgacatgacaacgaaagtatatgagaggtgtataactgacgatgtcatcgtcagtgcaatacacgggtcctgatacgagattgttcatgccacagatgacatggagctcgtatccaccgggttcctgaaatcccagcaaacagcagagattaattgattaattatgcaaattgtgttcatcattagcaatggaatagtagtcgagcaagaaagaatcaggttaagatgtttacgttgttttgcagcgagtatctgtgcaatgcagccttccccttcttgcagattttgttctgatcacggatgaactgcgactgcagtttcagcttcccgcgctgccgtggtttcgttggtttgcgctgcgttggtgagacggcggcggagggattcggggacagtaagccggcggcgaggcggcgaacgtcttccgaggagagctggccgccgttctgcaggagcagcgacgtcgtcgtcgtcgtcgtgatggccctgctcgagctgaggagctccacttgttcgtccggtttggggtgccgggccgcggcagcggcggcggcgtaggcctcctggacagtgcaggagggacggtgctgccgccgctcggcttctcttgcggcggcgccaaggtcgccgtccgcggcaagcaaacaccaaatggcgtcatggagcgggaggtcggggtagcgggtgcagaggaaggagacgaggccgaggaacgaacgcgtggcgacgcggaacatgctcatgggcgggatcatggccagctcgagctcctccgccggcgggtgcgcggcgtcgtaccagacgacgttgaggatgatgttggagacggggtccatggggccgtagcaatggccggccagcaccaagctccggtggtagcgagaccgcagctcgccggagggcagccgggcgagcgcccggaggtagaacccctggatcgcgtggaggagcgccatctggagaggcatggcgtgccagtaatgccgcgcggcgatgccccggccgcgcaagcgagactctgccagctcccacgctctctccatgtcggccgccggcgcgggcgcctcgtcgccgaccagcgcgacgaggccgcgcacgtcgcggttggcgagcgcggacacggcctcgtcgaggcggcgagacagggacatccacgcgtggacgagccggtcgggatgcggatgcttcacggccagcgcggcgcatctgagggccaacctgacggcggcggcggtggtgcccgaggtgaacccgaatcttctcaggccacgggcctgcacgacgaggcgcgccgcgacgagcacgtcggcgtcggcgaggagcaggtagtacacggcctcccattcggggaggtaagggaagaagctggtcaggaaggtcaccgatccgtcgagagatcgccggcgtctcgatctcctgcgtctgcgcgtcctccgccgcgcccttctcatcttccggtttctcggggcggcggtgaggacggcgttgacgatgacattggagacgggatccagcaagccgaagcagaggccggcgtcgaggtccgccgccacggccgccggccgcagccgctccagcgcctcctcgtgggaggcacggaccttgtcaaggagcagcgaccggtgcttgtcctgcgtcgtcgaagcaagcgtgcggctccgacagtctcttggctcgatgacgcggcggcggcggtggccaccgccgtcgtccatggcggcagcaatgacggcgctggactgcggctgcatgcaaaacgcgcgtatcggcctaggtctaggttgttacacaatacaccctaccgatgccgataagaattgcaattgttgctgccccggattcagaacggaatcccgataattataagtcttttgacttctttatcagtcaaagtcaaagtgcaataggtttgatcaagtttatggaaaaaaattagcaatacctacaacaccatattagtctcattaaatttaacatcgaatatatcttaatacaaaatttatcatgtattgaaaatgttactatattttgttagaaacttggtcaaactttaaaatatttaactaaacaaaagtgaaatgacttataatatgaaacggaggcagtatttaggttaaaggcactggaacaacatactgcatatagatttgtcttataaagtagaatactaaaaactaaaaaaaatatttattgaatatgttatggtagaaaaatgtagttaaaatatattttggagaaccaaagagaatatttggaaattggaagtcttcgagggtttagcatatgcacagagcaaatcttcgagggttcttaatttcttacagtacagcgcacccttacacaagatttttagcagaagaaatatacattctacatcactacatgggacttcagctgtgctgataaaaatataaaacaaagtaactagatagaacctttttctttaatgtcctgggattcttcagaagcgctctcttttgtgtcctccaatttcctcaaggctccccttaaccccaacacgatgaataaattggtaagagtaagtagtgattctgcactcccgtgcagccagtcgacgttagacagcgaggttccataatgaacttttgctgcaaaaggttatatcaacaagacagttagtactactgactaaatatggggcagagtatgtgagaacaacaaaaattcacaactcgattaccatatatcccagcaggtactgctccagggataaaaggccagtgcatgaaacaacaggaaaggaattaatcatagggataaaatttcccggcacctagctaaaagaacagaaatcaaacatttttgaaagaaaatagggattataggggtgtgtgctaaaggatgatcaccaagtacaaacatttcagtatcaataagtctgcaaagcaggatcaacatagaatgccatccacttgattcgcttttgtgtattctgcctaatccattgtccttattgtgccactttatgctagataaccaaatcagcagtgaacttgatttgaattaaaccacatgaaaaagtcatttcgtgattattcttctcatcgtagtaatttgttgacagattgttcggatagaggctaactgtcatccagaatgactaagctgacagaagatcaattgccatagttcgttggatatccatatagtttaatcaacatgaaaatagaattaaaagtcactaactatgtaatatattatatatgcatccacatagcattgcatttatgcccctaaatctatgtcaggccttacaatgttgctgtgatcaatctaaagagcacctatttttttagaacaaagagcattgtgtttccacacctaaacctatatcttgtcttacaatgttttaacatttacagaccatctatagcctaactgtcaaggttaccatcacttctatcaaaaaggtagcagtcacaacatcacatgcatattcatacccatatgccacttccttgtatttttttcccaaccatactcaacacatttccgccaattacatgagcaatttgagactagagagtctatctatgaagtattattagcttacatatgcatcatctctgcagacaaggaagtattgacattccaaaacattccacaaaatttttaatacgtactactaagaatcagtgatccagggaaaaaatccccaacatatcatgttcagaaaaagctacatctacgtgaacggattaaacacaaacttttgcatcaccgttactttcacgggtcctatcaaggtgttattaccaaactcaagtttgacatgtatttgtcccgaaaatttcaacggcatacgtcggcacaataaaggatacagagtgacactcgaagcgagagagaagaagacgcgtactggtggcgccgacgaaggcgaggaggaagtagaatccgaagagcgtgagtcccggcgccgtcttggacctggtcatgaagtagaggaagccgaggtaggggaagagcgagacggcgaacagctgcgacgccacgctctgggagtccatggtgggcgcccacgggtccacggggagcagcccgcaccgcaccaccatcccgcgcgccgccgccgctctcctcttcaccccgcgagcgcggccgaggccatagcctcccctggctctaccggcggcgagcggccgcggccacgggcacggcggcgcgcggcaggtggtcggcagcatttgggcgtggcgaatttctccactcggtttgggtggttcgcgttcacctcgtggggatgaggctcttaactgggccgggccgtcaatgcaagagccatcggcccataagaaaatcaagttattttgggccgcatgggctcatccttaccattcatctgggccacagctggaaaggtttcttcagagaatcaagtgaacaagcataatatgaattttatattggttaaagtaaaaaaaaatgttactagttattggccaatcttccaagaaatgggaaaaaataaatttacatgaaattgtgttcggtatttttttttgcgaggaaatagtattgaatttagatcgagcgcttaaaactttttatctgtcgtttaatctcgaggagctagcttgacagagcaacatgaatcttgagttcttgaccactagctagtcctgagtcacccaacgtcctataaaaaagaatcatatgcatcgcaagtaaaacggtactaattaattaatcatttaattatatgctagaaggagtagataataggttgagtaggaagtgattccccgcgcattgctatgaaaattactaagtaatttttaatatattttttcgacaatcaaactagactaaaaaagaaagaaaataatgaaacgcgagaattaatcagtacttatcataaaacaaacaaatatacaccagtacaaagtttctatagattagtataaagtgtatatacattagtacacagtttttatagattagaagaaagctttttctatacaggtgtaaaattttgcatgtacatacttttgtgtatatacatgtatacatacatataaatatagacccatgaaagtatatatatgtatagggagagacgtggccgaaattttcacatctaagcacatgcaatcttctaattccaaatatgagaaggtaatggatgaaattctaattttaatcaagaagcccacatgtgtgtgcagtggtcttccatcggacttaacgtcaaacgaaatataacaaactaatggctgcttatcattggagaaatcactagctgtagcaacttgtttaggtctaattgattgtttgttgtcggaaaagaaaatcttattaccatttgcaattggttggatcaaccattacgagatagggcaccgtgccgtcgtgccgttagtctcgagctttctttgtctttttttttcttaatccatatttgatcacttggatgttttcgttttgaaaattggaactgtagcggtcggttgaaatataatcatctgcttggatcatgaaaatcattgacaaatcttaatttgtttcacatagaagctgcatcaacaaagggtaattataatactagcgaaacatgttaatggatcatttgctttgtggctgctagctagtttgattagaaacagaattcagggcaatacatgctcacatttggaattaggaggtcgcatgtgattaagattaaaaaaaatcgggagacgtggggctgggggaatcggtcgcgcggggactcctctgtcaccagtcgtgccccctcctggtcactgacaaggaaaaaaaaaaagagtaaaattagctatgttgggaatcacttggtgtaacactctagtccaaatagaatttggcatatgtgcgcatgtttagtaccaccttactagttagggtggaaccaacttataagttttccttcctccaactatataactttcgagttaacctttttacatgaaacgatgacgaaagtataagcgaaaccgtgtgggtaagtgggcccgcccatctaatgacgcgagcttgtctacttgtctagtttgtggtgaccacgaaatttccccttgatttccattcctttacctccccttagttttcttcattcaatcgataaatctgaattgaaatctccaaattttcaaattgtattcaatttcccttctcagaaaactatcaaggaataagttcaccggaggaccctcaacttaacagcgagatttttggatgtcctttaaccgcaaaatcagaaatcttcacccctaaactatacaaaaccgtccaatttaggtcccatgacagtatatatgcctagtttcgctgacgtggcatccgagtcagcaaaaaaaaaataaaaaaatatgtgggtcccatatgtaagtgaaatgagatagaaaatgtgggggccacttctcttcttctctcttctctctttttttcttctcttcagctcctctcccagggaggctgccgctggtggcagatgggggcgaggcgagccggcgagcctggccgagctccgccgccgccgccgctgcactcacggacacgcgctcacccgctattgtttcctttgccccctgcgttgtcgcttcccctgccccctgcgcccccgctcccgacggcgaagaggcagttccgggcaatggcggatctagaaatttttttcagcctgagcaagtctaatgagatataggcatacatataaaattcatacatgtacatatgtactccctccatccatagaagttagatatattttacatttgagtttttccaaataagttgttcctatttatagtctttatgcatttaagacttaaatgaagagataaattaaatgtttgatgataacccaaggagtcatctaaatactcattttctgcatgcttacattcactccttgattttacaatatataaaatgatttagtttctccttggtcttggtgacaaaagtaatatgtgtaacttttatggacggagagagtactatatatatgatttaatctataatttagtagaataaactcaacgtaaaaggttatatcgattaacgtagcatgcatgggagactagtatattcttgcattagccttaattactttgctaattgacttgttaattaagcaggtacgtgctagtgcagctggtggagccggggcacttgcccgaggtggccaggccgcccctggtcccggggacgttgctcgaggacaagtagcaccgccacctcgaccagatctgggagcgtcccactgccacgacagcggaagtggctggaggaggagtggagcgcggcgggtggagtagaccggcagagcggcggcggcggcggcggcttgactagccagaagttgaggatgcggcggctagtgaggtcgaggcgggacaaggggagggggaagtggagagggggttggagaagagaaggggaggcgctcgccctaaatctcgacagtgccatcggcggtgagcacggagtccacgtaggaagtgtagtttgcctcggcctcgatgaaccacaccccttcgctggtgctgtcgatctcaggctccctgatgatcggcttcatgatgcggctgacgacagggtagtggtggacgaccgatgcggcctggtcctcgacggcttcggcggagacggaggggaatacctggatgaagtcaacgaagatgcagacggcgacgatcttgtcgttgttgtcgatggaggatagcgggagggagctgcctagggtaggctccgcagtgggcatcagcgccgcgtcccccccaacagccggtgccgagtcactgtctcctcctcgccgtccctagtcaacgtcttgtcattgccgccccaaactcgtcgttgcagcgggtcacgaccccactccacctcctcaccaccatggatgcaacagccgctaccaccacatagcctgtgccacctcctctccccctttctcgccggtgcgtccagatggctctctcgcctgtcctcctctaccaccggcgtgttgtcaaccccccctcctgccgctgcatgggaagaagatagagatgttgatggggctgatacatgggccccatatatctttttttatttttattttggtgactaagatgccacattagtgaaatcaggcatctatactatcataggatataaattggacggtttttcatgtttagagggtgaagatttctggtgttgtggttaagggacgccaacaaatctcgctgttaagttaagggacccccggtgaacttattccaattatcaaactccgctgctcaaccaggccgcctccctctcttttcggcccaacctcccggggcccgttaggcctcctctcgcgtctgctgagtagattagtccagcctcctcaaaagaaaaaagaaaaagaaaaagaaaagaaaaaaagagagaaaagactagtccaggctggacgcggtgggcttctttttgagatccaacggtggatcgtcgatagatccaacggcagaaactgtgcttggcacggaaggaacgcgcggatcgatgacgtggcgctgatcctgcctagtacaaaaaggagggtggggatccccacacctgctctcccattccccatcgccaaccagtccgcggccaccacgtagagagagagagagagagagagagagcgcggcggcggcggaggaggaggaggaggagaagtcatggcgcttgtggcgcaggacatctacaccctcgaggagctcaagtccatcatcggctccggcgtggcgtaccgcgttcgtctgcatggggtcgagtccctcgaggaggccatcaccatgtaccgtacgctggacgacgccgtgcagttccgcggttgggcgtgcccccaactgaacaagctggccctcgtcgccggcatcgccgcggaggtggaccgcgtcatcgacgagttggttcccagcctcctggaggacgacgagaacagggtcctgatgcttctcctgaagaatgcggcctggtctatccggaacaacggcaagttggtcgacgcggacgccggaggcatcttccgcgtcaggatgcaccccatcgccaaccgcatcctcaaggccgtacgcctcttcctcaccgcgcgctccaccccaaccggtcgccgtgatcgcctccacgccatcgtctatgatctcaagatcttccgcgagtcctactacctaccaatcccatagatccactcaccggtacatgcgccccccccccccacccacacgacttggttctcagcgctgcgagttttggtggtcatattgatgctgtccatagcctgtagtttgcttcaaatcgtggtgttcctctccaaagctgtacgtacctgatggaggttttgaacgccatgggttgatgggttacgaaagtgagatttgagattctgttagtgtttcctcttgctgctttgagatttgaggatgagatagttcttgctgctttgtgaattgggatacgattgtttctgattagtattgtgcagttacaatacaatgtcatatggtggatatattagctgaaatcaattgcaaactcattttggcactttctgagctctgatgtttcctgacctctgagattttgatgatctccaatgctgaaatgattgggctggattcctgttatgattcttgttgtgtgctgcttgttgaaaaacagaattcggtgcaaaatgtatgtactgtaggtgcttcgatctctgcggttagcagttcactactgcattttggcactttctgatgagttccacctgtttcccctgtgtttagttaataggaaattggaggtagttttgtttctggatactatccttttggcgttgccgattgattgaattagttcatttcaggttagtgattgaattagttcagacgtgtgttctgtttggtatctgaaggaaaactcgttggaatttgggtgttcagcctgtattcgtgtttgagattgtttctgattgggaggctgtctgcatttcgtttctgttgtaggctaaagcaatacaatatgtccttgcgagggatcatttgttcattatctacacacgatctgttttcattgccgatattgtaccatatattttgctaaatagatgtttcgtgtgtctgcagcattggctatgtcaattgcttaccagtgagtctttctttttctgaaggaatgaaaaaatagtactgtctccatccatcattttctttcccttttcccacttctactccattttccgtgcacacgcccataaagtttagagcaattacaagggtgcttgagtttgatgtacagtaccatatatattcatactctctatattcatcacaaaataagtttattttctgtacattccacacatatcaatataaaatctaaaagtactaaatacttttacttttgtcaaatttcaatacaactattcttcatttgtcttctctcaatataattattttatatttttacaaattttgatgtaataattacttaaaaataatattattttggaataaatgagtggagcttttttttttaaaaaaaaaacttattactactactactactattcctttttggctgttcaatgcagcgctgcattttgctacaattaccagcctgctggacctgttaaatcacctcccacccccactcacacagtcacacatgtcaggttagcaagaatgatttggagaaaatggtcatcctgatcacttcccatgttgtcattgttgttgctgctctcaggtcgtcacattctgacttttggaaattgtagcacatgagtacatcaatgggtgtgtttagttcacaccaaaattgaaagtttgattgaaattggaacgatgtgatagaaaagttggaagtttatgtatgtaggaaagttttgatttgatggaaaagttagaagtttgaaaaggaagttgggaactaaaccagacctatatcacatttggtctaaataatctatgcacctcaatgaatacagtttataccgcttggtatttatttgaccgtgtttgtctccatgcattattcaaaaatatattaattctttctactttgtgggcctttcattgtttcagtaattcctcattattaacatattatcaacaatcaatcctacaaacacagcaaataaagaatcataagtctcaagagaaataacagaatgaaacattaccacatccatgtcattacaaacctcaacagtaaacagggctgatagcctgatagtttcggggcaaatgtacgtttaataaaacaacacttgtaactgacagttgcaatactggttattaagaacaaccacacgcacatatttgacatctaaaggtcaagagcatggcaccggctgcaaggctccaagacgtttaactcaactttggagggaactttgagctcgatgtatgtttgaacagccttgagtgctctgtgggcttccatgagtgtctctctgcgcatcaagaagcatttaccaagtctgttcacagaacatctaggcgaacctgacgttgtgtccaacgtaagacattcgagtgctgtcgctgattcaacaatgtgacatgttaactcaaccaaagtcttcacagaagagaaattgattatcttcacacacttgagtttgtcatgacggtgctctggcatcatcctcagacctgaaggatccccaaaaattgtggcacgttccgtgcgttctcggagtgcctgtaaaggtgaaaaaaccaaactatgagtagtgattccaccatatttacataaatatatttacaggatggaacttacattcaagataaaagtctccaagaaaggagaagcatcaaaaaaggaaaccagagaaaggtaatcataggtctgtccaccaagggcaatactcaagtacttgaggtgatagaatttgctaggcaccattggtgtattgaccatctgcaggttcaaacaggtttcattgtaagact

SEQ ID NO: 9589 - DNA, 8121 bp, Oryza sativa
aactggcctcaagtgcatcccacatgtccttccctgaaagcatgtgcatgtacatgtccactatattgtcagcgagtacactgatcaatgctccacggaacaggcaatccgaagcctcgaacttagcctcctcctcaggagagagaggcggttcacttcgtttgccccgtgaaacatagaagcattgcatccctgtcaaccacagtagtgcacgtgctttccatctcttataattagaaccatcaaaagcatgtggtttcagtgttgcagcaaagccaactaccgaaaatgacctagcaggtttttggattgttggaactttggtcataattcggcatattttaatccaaaataacaagataataaacatgatatttacaatgggatttgatccaatgatagtggtgaatgcaatcaacatgagcatgcttaatgtagaataagcatcaacaatcacataataacacaatgttgacattgcgatgaacattaacagtaaaacttctaattgaaataatgtaagaatgttataccccaagaatggtcatccgctggagtttgaagcagtattgcctccgttggtgttgacgggagcctccttctccttgtatccagtgttgccgttgtctccagtgttcgacatattggtgaaggtgaagtagatgttgacgaacagtgagtagtcacgcgttgcgctccccaaaaacccgatcgcccgcccatccgtgcaaatgtcgcagcagcgcgtggtttcggagacctactctcccaacgcgtgtgcacacactcgtcgggatgggattaccgtagcagcaacagcgttggaaaatggatgaaagtgtgtctcactattctcgcgggagatcaaatccattctcattttataagaggaatggaagatgaagagtaagagtcatagaataggaagaggaatagatcaactaattgtcatcaactagccatgaaccatcctccactacacaaccatcaaccaacaatcaattaagagtaattgatgtaagttaccaatggaataggaagagaaatagagcaactaattgtcatcaactagccatgaaccatactccactacacaaccatcaaccattcatcaattaggactaattaatataagttaccaattccctaatcaaatggattaattctcaaaactcttcatcccattgatatcccataaaaaaatgaatacacatgaattcctagcataatgagccttggaatttatttgatttaattgatttaaatggatcaattacccaattaaatctatcagacgagacccatatctaaagtcctgggatgggacgaatagtcctccgtcccgtattacttcgtcgctttaagattttgtttgcaatgtttgattattcgtcttattaaaaaaattggaattcttatttattttgtttgtaacttgttttattatcaaaattactttaagtatgacttatttttttatatatttacactaatttttcaaataaaatgaatggtcaaacgttgttgtaagatatttattatgggacggaggtagtataatttacttgtgttatgagttgttttatcacttatagtattttaagtataatttatatcttacacaattatataaaatttttaaataagacaatggttaaacatacgctcaaaattaacggtgtgatccgttaaaaaacttgcttctgtggaaggccggctcactggaaacgagatcgaggcgatgacgacatctgcattttgataatccacggatattaaggctccaacagtagaatgttcacatgatctcacgtcgtcacatgtttatcttctaggagtgagagtgcgtgcgtgctcgctcgctcgctcgatcgatcgaaatgaaaattcaagctgagcgtgtgcgtgtgttcacccatgccccattattgctagctagcagcttgtttacaacaacgcggagtggctccctcactgtgacgtgccccgcatcaaagcatgggtagaaaaaatggcagcgtcgtccatccctttcttcgcaacgccgggtcggtttccccgtggcggacgtacgccgctgcgaaacggccgaggaagcggaaagggaaacgggcgatcgtcgtcgtcgtggtggaccagtagctgtagctgtagcggcacaagctgagggggagaagtagaaatgagaatcggggggggcggcggctaatggccacaggaatacgcacgcgagtaggagatcaagatcgcggcgggtggcgggtcggggcgtatagtttaaaggcgtgggtcgtggcgaggagcgccccacgtcgcgccgcgccggagccccggagcgccagcgccgcaagggattttttttttgccctctcttcacattctcatttgtgtgcgggttcgccgagcccgcgtcgcggctgcagctaggggagggtggctacgacggctgttcatggagattaactgcagcttgattttactggtatggttaatttggcgtgaggcgttgagcagcctttatcatttcctcgcttgaaagatatcagctgcggagtattgtgaaaatcatttccttgcttaaaaaaattggtacagtacattgttgtgcagtaactttagcaaagctgtatcttgaattatggcacattgggcgttgaaaagggacacgtttgaggcccgtttgaactgattgttttatgaattatttccatattcaattatgattatgtactcaacaataagaataaattaatcattgtaagaagataattttaatgagtacagcttagaacaaagagtagatgtcagtatgtcacacaaccctatgtattttggtttaagttgcagaaagctttatgatatgtcatatataaccacagatattatgacctatagtctcataaacccacactgctaaccctttttatctactataaatatgatttctaaacttataaccaaaattaaatttataagttcgtttaatccgtcgtctaaatgttatcatcctcattatcactctgtgcattctaaaatataaacatttctgcacatatcctaaaatgcttatattttaaaatggagagaataaattaaaatagtcagtagtgcaattttatgaaacctgaagaccataatacctaggttatgcaccgcatatcaaaaccaccatggttttatgcaactcgaaaataaaataaccagggttctaaaatatactccttatggtagaagaagtttcttttgtcgagcaaatatatttttagagttgtggaatgaataatttgcgaaataattgcaaagtagctgaacgggctcgaatttaaacttttgtccttgctaaaaatttaactttgcctagtttgttttttgtttaagaaaaaacatttatcaacaaacacacggtaagtaacattctgcattctgccactgcgttaattcatcttgggtgaacatcatatttacccaacccacccgggttaggtttcttgtggtggaaccagtccacccgggttcaaattctagacttgacacgggtgctcgcatttatggctaattattctttcaatggtaggcgacgtacccgtcgacagcgaaacgcctgtggtgacttcgtcaatctcaagatatgccggcccagtcttccggaggtgctcataggggtagggtgtgcgtgtgtgcgttcataggggtgagtgtgcgcacgttgtgagcgtctgtttctaaaaaaaatattaggtaaacatcatattcaattaatattgttttcgatgtttagcagaagtactaccaattagaaaaagtagcatagtgggccatttgctgaagcgattggggtagcggggctcatctcatatttgcagcgactacaccattttttttgcttgtggactgtgctgtcaagacaagaagctggctggttggtcattggtgtcctggaaggcaacctatcttcatttcccaccacagttttatatgctccactttctctatccctttctttctcactctcccctcttttctctattgcccaaacacacctctaattataaatttataatatcctttagttcccataggccaagtttaaaaaatatatttgcatggtcaggaggattcatgctccatgtttttttcccttttggccggagaccacgcgttttgcaactgggcgattaatgaaaaccaatgtgattgttcggcacggtcacacgatattaaacacaccaactattttaatttcgtttctaaaagaaaaaaaactattttaactttagatgcgtacaaataaaatgtcaaagaaatataaaacaaccaaccatataaaattccttatgaactttccacctctccctcccaggcaatgcctatagcttaaattgcgaaaaccgttagttgtaaggtccaataataaaatgagcaaaaaaaatgcattttaaacatccagttttggcaggtgtttgaggggaaaaagaaaaggagaaagagcaacacaattctttccaattcttacagtagacgacatcgactattcagttcgggtaaattttaccaaacggccatgggctcaccagtatccccagttccccaccaccacgaaaccgcacaaaagccggtgaattttcccgtaatttgaccgaaaactagaggccaccgcgaaagcgtgattaggccggacgtaaaccgaaaccgggaaaaaggagataaaaaaaaagaagggaaaaaaaaaggtgaggaggaaagaataaagcaaaacgatcagaaaattcgatttgtttaatcctctcccccttcttcctcgtccctctgctgctgccgctgctgcttctcccccttccttctgtgccacacactcgcgaggagaggagagaagaggaggaggcgaagaaaaaaaaaacctaagcgcttttccctttcgggaaattccgcgcgctcgcctcccccgccgcggcgccaccgccgccgcccccgccgcggattcgccgccttcctcaggcggcgcagcgtgccgcgcaggcgtcgtcgtctcggtaacgtgtggctctaattcgtttttttttttgggtaggaatgtcgctgttaggggtcgacgagttctaatccgtggtctaaccctacaggtaatcgcgcgaggggtcgtggtcgctctgggatggggttgtggcgctgagatggtggtgggcggcgcgaggttgtgttcgccgtgaggtatggttcccaaccgctgaaatttgggggggcgcggaggatggtccggcgaggggtgatctcattgcgagcaggatggcggggacgcatggttttcgtagggtaggcgtggtcgagatggaagcggcgacggcggctgaggtggccggtgccggcagcggcacggatggcgatttgcagattaaaggcagcaaggagaatggtcagactgcggagcagccggcggccagcgaggcgcttgagatgccctccactccgctcccgctcccgagggacatagattggtcggagcatttctccttcttcaattcggtgggcgggtttgggggcagcatggatggcgcgaggggcttgactagtgttggcctatctaattctgagtcgaggccggatagtgtaacccagatccagagctgtttgaacaatgcagacgagagggttgaggagctcacattgaaaaattgcatcagctccgatgcgcaacatgaggtttcagctggtggaagcacgagcagcggggagaagcctacagttatgaggggtctgtggggtaattttacaaggatgtcatggagagctagcgacgtggctaacagggaaaaattagcagcgaatcgtggtgacgttgcaaacttgagggtcggtgacatgcccatcagggaaaatttggcggtgagcttcggcaacaatatgatctcacgaaatgatgcatccaacaaggaaatgggaatgagccatggggatcatgcgaataacgagttcaatttgccgtttggtaatcagcagccttttctgtctccacggcctaatcagaatgagcagcgagttgaaagggagaatgctctcatagtgagtagcttttcagctagaattctggatcagatgaggagtaagaatgtaacaccttcgtctggggttcagagcttcccatttaagagtgtgttgaagggtaaaggtgttgtatatcaaggtgcacgagaggagatccaagttcaaggtaatgcaaggaccagagcccctatggataagattcgcaagatccctaacataccacaggattccatggctagaatggatggtacaatctttggcagtggtggaaatgttttagaaccacagtgcgagggaaccagcctaagggaactaattaagcctgcacgccaaacaatgagcaagtttgagaaaatgcacttctttaagcagattcttgatctcgtagacaaatctcatgcccagggttttagtttacagcatttgcgcccatcatactttactatctcagcctcaaaccaagtaaaatatattggttcttatggtacccaagatttatcagccccaagcaaactggatattgcgacggatgatattttcaatacaaaaagataccttgatcccaaagttgagtcccaagattctaatggcgataatgcttcaatcacaaagtatcaaaaagttggtgaacaaggatccattgctgtaaggcgaccagtgcataccttttgggctaatcacagagggggcaaccaaagtgaaggtgttgatcctggtgctttgtggcagggcaattcgagctgcactgtccgagaacgttttaaggctgcagaacctttctatggtggcagtatgccctatgctcaacgaccatcaagttctggcaaccaacagtcagtatttgaattgaggatgctggaggaaagctggtacagaagtccagaagagatcagtcagttgaaaggcatacttccatcaaacatctacagccttggggttcttttgtttgaggtatgccaattgctttcatcacatatcctgaagtagtcctccaaacactttgtagtgttagaaaagtaaagtgacattgtgcaaatgctatttattttcttaccccatgaggttgtttgtggatgatttttactcttaagccatttgatgaggagttcatgctgtttttatggttccacttatgagtagctgaaaaattgggacatgtatagtgcagagtttcctacttatcctactcaataataagtatatgagtatgctgtctcccttatttgtttagcagcagttggattgctgaaatgatcggttactattatcataattgtatttctacgaatttgagatatacctgattgagatgtgcaattctgactgacacaatgcaacagtcttcttgtttgatgaaataatattgtttgcttatctaagctgcatgggcatattattattcttttttttaacatattcagtaaaatctaatctagccttaactagtacagaaggtctacaggatattccattaatagacttcgcatgtgcacgcacagacaatagattatgatggctactggaaatcacattgaattttatcatttctagtttccgtggaattctttggtgctatcttaagcctggcttgtagttgacaacattctctttcctaccagctcttttgctgctgtgaaacatgggaggtacattgtgctgcaatgtcagatctccgtcatcgcattttgccccaaattttctttcagaaagtcctaaagaagctggtttctgtctttggttactccatccagatccctgttctcggcctaaggcaaggtgagcatgcttgtctctctcagcggtcatcagaaagcaagatacttggtgattaattggataggatcaaatattcatagggttacattttggcaatttcgtaagttacacttcatactctaggcagttcatttggctggtggagtaaaggatgagatctcaagcataattaattaattattagtttgttgtacctggttacttaatgctcctggctcctgtattaacttagcttgcttctattttttttaatatagatacactgctagggctggtattttgttgaatgttgaactgttgagcttt

SEQ ID NO: 9590 - DNA, 9749 bp, Oryza sativa
tgtctcttgaaaactcttgaaagcaaaaggtttgaacaaactggctcaatcagagtagttgtagtacaactgaacaaagaaacaactgtagaaagttatcgtcttttcgagcgtgcatacgaatacaaccattctaacaccaacacacaggttaaaacaagaacctttttctctgtcatctttctcgagttccccacccccgattgcatggagaagagaactagtagtaatagtgtatacactctctgaatgtttgcaagtcattgacatcttctccttgttacctgcatttcttactcttggatttttctcatccatctaagataacacggcaatctgcagttgggaattaaaaaaaaaaaggaaattagagtagctgcttggaattcgagggtggaccctttgtcagattgattcgtggggccgcgatactgtcactgccacactaaacgcagtgactactccctccgaaaaaaaaaatatataaaccctgttttccgtatccaacgtttaaccgttcgttttatttaaaaaaaatatgaaaaaaattaaaaagataaatcacgcataaagtattaatcatgttttaccatctaacaacaataaaaatattaattataaaaaatttcatataaacggacagtctaatcattggcacggaaatccagttttttttttaaaggacggatggagtaccagtgaattaaaagacgtgggcaataaatgagctgagctgagacttgcacgtccataattaaaaaaagaagaagcaaagtgtgggtacacgtgggccacacacacgccactagcacaccagttagccgaggcccagctagccgttggagcgaataggcttgaccaaattgaccccacgttgctgaccgttgcttcgcgccaagttcccttgaaccatagggattttgaaaaaaaacatactacttcctccgtcctaaaatgaagccatttttaatattgacacgggtattaagaaagtaagtgaaaattattagaggaagtgtgtgattggttgaaaagagaaagtaggtgaagaagaatggttgtgattggttgagaggaggaagtaggtgaaaaaatagcttcattttaaaataaaactttgtccttaaaaataccttcctttttggaccggagggaattttgtgtttgccttctttttgttgatgctgcatttgctgcgtggttaaagttcgggagttgcttgcaaatttctgacggtttctatgcgtggctggtgttcgtgcaaatcaaatccgatgtggagaggcagggcgatttcatccggttcctgatcaaggaggtggaaggcgccgcgttcgtcgacatcgaggacgtcgtcaccttcgtcaagtggctcgacgttgagctctcacggctggtgaacttagccagctacatccattcactctcacatgaaacatctgcttaacttgaagctggacatggactgatcgggatgttcaccgtgttgctgcgcaggtggacgagagagcggtgctgaagcacttcgagtggccggagcagaaggcggacgcgctgcgcgaggcggcgttcggctaccgtgatctgaaaagatcgaggaggaggcgtcgtcgttctgtgatgatccacggcagccttgctcttctgccctcaagaagatgcaggcgctgttcgagaagtaagctgtcctgcattggcccggcttacttaatgctgatttgagcaatcagctatgtgctagttctggtctgctatttgtgctcatcatctttgatcattggcaggttggagcatggagtgtacagccttgcgcgagtgcgagatggcgcgatgaacaggtaccgcggctatcacatcccatgggaatggatgcaggacacaggaatagttagccaggtaattcagtgtttttcttttcaattgttacgacatggtatctggttttaagtagaacagcaatgtagcacgaacatgtacaaataatgtcatttgtgcatgcttgttttggttttttcatgcaccagaacacgcacaaggatgcgaaaaacattaacacatataagacatacactcgagataacaacaaaaagaatttgggggtaaaatggccaggtctcgggggaccaatgaaaaggctctcaaccatttgctgggatttgcttatttgcagtgtaatgttcatgtgtgccagggggctctcgtgagtctgtttttttgttttgcatgtactggtagcagagaatgttgatcgtatttttaattcgacatttgtttttgctgctaacatggacccattcttgttgttttccactaggaaatggtccaaatgattgtttgaaatttcctgcatatactagtaggtggttcttttacgtagcacatatgatttttatcttgttcaagacattgttcgtcaaagctccttggtagaatggtatatcaacgtaccacctagtgccttgacagacttccagctaaatggcatatatctcattgctggattcggatcagcttaagcagtagtagtgcatgctattggatgcaaatcggatgatccagattgcatgctgtactgtacatagtactgtagcaaaatactgtagcacgaaatactgtagccattactactgtagcgttcgatctgaatcgttgaatgtaaaaatggatggccaaaattatgtgcagtttccccattgctagatgttacaacctcttttctagaacttgctgcaggattgcttctgctgtaactacactacttccatcattgaacaattagtagcatttcaatgacaaattgaccctgatgtgcagatcaaactccagtcagtgaagttagcaatgaaatacctgaggagggtttcctctgagcttgaggccataaaagatggccctgacgaagaggagctgatgcttcaaggtgtccgattcgccttcagagttcaccaggtactcaatcagaacgaattcactaataagtgctcatgcagcactagtgcataggagtactacttatctagtttccattttcttttcacgaacacttatcaactttccgtagctcagtatggtattcaatccttttgttccatgcagtttgcaggtggattcgacggtgacacgatgcgagcatttcaggagctcaaggagaaggcctccacgttccaatcgcaacgggaatgccaaaatcagcatttgcaacagcacaagctcgctggcagaagctgaacgcctgaaacgatgtattatataccactcctttactgtaggagtataggatatatacccaatgtatcaatcaccatggaacaattttctctcaaaagtatttatttctctctcctcttgatctgtactgtggctgggagtccgggagtgaagtattaacaacagttactttcatgaattgtgttcatgtacaagaaagactacaggtgactcccactcttgtgctctaatttctgaagacagaactacagagatcacacagatcagacaaactgcatttgagcaagagcacagctgaaaagagaaaactgaacatttgctcacggagtcatgagtcatggatggagagtctcgcagggcaagctcttggagctagagcttccaaccagcagcttcacactggtcaggtccacggacgccgtggctctgcgcaatatggacttcatgttcctgtcgaggctctgcttcactatcctgtccacggcgttccggcgatccttggccccctcgccgccgtcgtcgcacgacgccgacgacgcgccctccatgcgagggccggagtgcgccctgatcctgtcctgcccttcctccttgaaccactgcaggatcttggccgccctcctctgcgccagggggctcccgaggagggacacctcgaggagcgcctgcacgacgccgaaccggcgcatccgccgccgctgcagccggctgccgtgcgcgagcaccatggcgaggtacgcggcgtgctcctggcaccgcggagcgtcgtgccacgtcatggcctccacgagcgccctcggcgccgcctcgtcctcctccatctcctccctccccgccgcggtcgccgccaggtcgccgaggacggacagcgccgcctccgacgtcttccggtccagggagagcgccaggagcgcgcgcaccgcgccgctcgacgccacgtcgcggacgtgctcgagcttggccgagaggttgtggagcgcgcccaggcacggcagcttcgtgtcggccggcgcgtcgtcggcgctgaggacggcgacgaggaacgggaggagctcggaggaggcgagggggaagtcggtgttggccagggaggagatggagaggaggaggagcgcgagctcctggcttcttgacatgtccttgtcgtccatgagcaatggcagcttcttcagaagaccggcctgcacaatgtgcaccttgtttctgaaaaccaaaaagcattgctacccattagcagagaacttagatgtcacaactactgaagaatattcagtgcaccgtgaactattgaatacattagaaacagaagtaaaagtcaattacaatataaaagcaaacatgaacatgattaaggtgaaaacaaatgagaaatgctttctcatgtagcaagcactacttctcctgcagttcatgcatcatggtctactagattacacctttgtttcatatgcttccacgggtgtaattgatgttagaaaattcaccattgtggaatatctgatcctacatgatgttgtataggcatatgaggaaaacagaggggaattcagtgtcagtctacatcaccacatgtaaaactgggattccatattcctgagtggaatcacacatacgagaacatgaggtctactttttctacagcactactccctccgtaaaaaaaaaaaaagacaaaccctgggtttacgtgtccaacgtttgaccgtcttatataaattttttttataattagtatttttattgttgttaaaatgataaaatatgacttatactttatgcgtgacttatctttttttttcataatttttttaaataagacgaacgatcaaaagttggacacggaaacccaggtttattattttttttttttggacggagggagtactatacactatcaacgcagtcacatcagtgatgtcacacggctgaatttgcacaccatgaacatgggcggctctatagccatatccacatagaaaatgcccttttatcatgcatgtccacacatgggtctatttagtgttcttttcgtagaagtgattcaaacaacgaaatgaaacacatggttaggcacacttcggtacgattctctcaagaaaacaaggaagataatatgtaagaactatgaagtttggtattgctccaagtcaatcttcagcaaccggcctatgcataatgcatgcacctgccgaatattatatccctgtgctgcctaatactaccaacgaacaatgctgaattttgagtcgtgtaaagttctgacattttgttcctggtcaatgattctgtcatgaagcaatggctttaagggactcaaagaaacaaaagtaggctcaaccacacctaatgcctacagaaactagaatgcaagaaatgatgtggcgtgtgtggctgttgtgcatgttcagatgttgttatggaactattggacaggctagagcagctaatatcactctcaattcagagattgaaagcaattgttgtcagaaatgcttgtaggttgagacatagtaaagctagctagtttcaagcctgaattctctgccagagacttgcagtatgaaagttgtatctggtctttgcatggtccagttgctcttagacattcagatcatggtgaatatgtcagtatcgtggctatagtgcagtctagatacgtggagatgtaacaaccaaaacgtattaaattctacttcttcaagaagagcgtacgggcagttgagtctcaagatcaactttgaacagcaggatcaaggctatgtgcagtaaactagtaaagttccatgctaattttctgctttagaaaaaggtttacatgttaattaacttgaacttgttggaacagcgtagatcatgacaagtttaaaaactaaccgaattctcagcatatacgtttccagagaaggaaagcaggataactcagccaaatgtgccaagttgatcaagaagatcagagcgcggcgtttccttttacagttctactcattgcaagaaccagtaactattcttcgctcatgtttggtccatgctttacttatgacaaaattacgcaaagcgtaattcccactcggatttaatttcagaacaagatcggtttcaacttcatttctctactgtatctctaccctgagaagttgcacttcatttctcagatcgattcacagaacgaaggtgatgctcaaaaaacaggttggcatccgaagcatgaactgaaagtctgaaactgaataacggatggctcaagcaaatcgcaaattcgcaacacacgggaagatatactactgacctgtgtgctcccctggcgagctcaagcagcgcccccgccgcggccatcctcgcgccggcaccacctcccctggcgtcggcgagcatcgagacgagcggcggcacgacgccgagctcggggagcagccgcttcctcccctcgtccgagcgcgccagcctcccgacctcccccgcggcctccgccctctcctccgccgtcccgaagctgagccgcttcaccgccgccctcatcctcaccgccgccgcggcatcatcgcccgctgcctccatgccgatcgatcgtacgcggccagcctccggtgcatgtgcagctgcgcgctacgagacgagacgagacgacgcagccgtgagacgcgaggtgggttaacgtttttttcgcggcaaaggcgcggggttgggttgggttgggggggcctcggcgtacggtggtttttgggggaaaagtgtgtgggatttgcgtggttccgggcgacgtggagagcacttgggggttggggtcgcggggggttttggggctttgcggggaaaaagcttggtgcgtgcggctttatcacgggccggtgagccgcgctgtctactagtgttggtgtcgatggcccgccgcctctatcaaccggcctaccaccgtaccaaggccgttgtgatctcatcacactacaattttacaccatgttttagtatggtttttttgtgtgtgtgttctttgatcataaactgtttatctgcaaactgcaatggcatcatagagtcgtgtccttagttctaaaattctgtctgcgtaatcattttgttctggcttaaacccgcctgcacacttgatgactatgatgatgctagtgacatcgtcgggaatccggtcgttggatatatcatcaaatctgcttaaacccattcgctcttaacttttgcacactcctacgtgcttactgctttggcatttatgatgtggccgaagctggccgccgaactcaagatcgctactagtaccagtgccgctacatcaggcgtatttccgtttgctcgatcggaccttgacagcgttgtaaatgctccaactaattaaaagaaagttcaactcaaatgcaacctttctaaaccaactaaaggaaagttcgactcacaggcaacctttctgaacatttcgatcgatagccccacactgagtaacatcaatcacgtacaaatattggagcagatcttttggtgcaccttggtaggctggctagcttgagcatgcgctgatttgataaaaaataaagaggcaaatgctaatatgggggtggtggtggtggtctggtgtgggtcggctggatattggatagaaaagaaaggcaagactatagtggagcattaagctatgattactccacttgatgataagtggagtgcttggacaaggactaagcccccgtaatcttatcctgtactactgctaattgtgtaccacgtgggcgtacgtgctcatgtgcaacgagttggcactgtaccgaactaactgatgaacaaacaagtgtacgtgcatgagcatgcatgatacttctatcatgtacactcctgagtaattgacctgtttctgacaaagtttggcaacgttactaacagtactgaagtacagtacgcatgggggtattatgttaaaaaatccgaatgggcctcaaatctggcctggttaagatcctctgcctttttttattaggccgagattgaggcccatataaacaaggccttcacgggctatgtcgctctgctgctttttatcgggccatctccaatactgggctaaatagaagtccacactctccgctctgtcgttgtcggagcggatccatgtgacccacagatatatccccgcgacgcagccaccgattgtgactactgtatacacacaccggtgcttcgcatcgcagccagggtttcacttatcgcacgataatcgcgacgtagccaccgattgcgactactgtatacacacaccagtgcttcgcatcgcagccagggtttcacttatcgcacgataatcgcgcgattatcgcgcttattgcggggatacggtagaggaaaccggcgatatggtttggatgaattttgaccaaattcaaaattccgaaaaaaaatcaaaaaaaactgaaaaaattcatggatgtagttcttgatttgtaattgccaatggtgaagaatttttttaaatagagtaagataaattcaaatttgaggacaaaaccaaaaatggtttacagattgaaaaatgaagaggatattggccttaagtatcctgcatatttttgattattctcagtttctagttttctacacatattcaaccgtatttttgattttttttaccctatttattttacatttacattatttcagctacacagcccgcgataaccgtgcgaatatcgcggtaaaccgtgcgattatcgcggtgaaaccgcgaaaccgttgagttttgaattcaaatttttggatgtgatttttgtgcgattttagacgattatcgtgcgattatcacggttatcgcgctaccgcggggtggcgataaccccgacccaaacgataaggtaaaccctgattgcagctcacccctttcgccaacccaaacggccaccgatgaagttgacacaaaccctagcccaaaatcgcacatcgcttcacgtaatctaccgtaaatgtactttctctattaaaaaaaacaaactctaactatatatctgaacatacataaaaaaaataaacatagctagaggcaaatgctatgatatatgtctagatatataacgagtcttttttttaaggacggatgaaatacgttgcaccgttgcacgagcacgtattattttttttcaaaaaaaaaatagcttgacttgctcggctcgcgctcgcgcatctccatgcgttgcacgctgaaaccgacaagttttttttttacgcgctgctcgccgccgcagccgtgcacgtgatcccatccccccaaggacgtgggtgccacgtccgcgacgcgacccgctggcgctgtggccccacacgcctcgacgcatcgcagccgcaggattcactgattcactcacgctgtgggtggttgggaagtttttcacacaaaaacgagattgctcattactagaacataattaatcaattattagttttataaacttaaaatttgaattaatacgattttttaaaatatttttttataaaattcttagagaaacgtaaaaaataagggagtagaa

SEQ ID NO: 9591 - DNA, 47809 bp, Oryza sativa
  unsure (1)..(47809): unsure at all n locations
gttggacaggtcccggccgccgctgagtagtcgcccgcttggatggcgccggcgcacgtcaccatgagattctccgaccgcagggccatcttttccagctccttccaccgcctcgccgcctcgatctgcacggcggacggcggagcacgcccggggaccacagccatgccagggactagagacgcgtacacggcagcagcaggatcggcgtggtacaccgcgccgctgacgttgcccagagcagcggcggcggcagcggcaacgtccatggcggaccagccaccgaagccgccgaactgagccatgcgcgacggcggctaggaggaagacgacgcgggcgagggtgtgaggcttgcttggcttggtttggtggaatgggtggtcgctctcgccgaggcggggtttttatagggggaggagaggagcggggagcgtggtgcagatgacgtggctcgggacacgtgtacagggaggtggtggaggggagggggtggggtggggatacacattaacgcctggatttgtgcaagatggctggatggctggctgcccctcgtgtgtgtgccatttatttgtgctgaatttccctttttctcctttctccttttgatttttggcttggtttatcttgccttgttggatgccaaaagggatggaatttttttgtttcatactactatgctatatatgttgcataagtgattcaacatgcgtgttgttttgcactggagtgaaatgtggcatctaaggaatgagaaatttgaggaggttttttgagagaaaaaattttgatgttccttaaaagaaaagagaagatgaagaggatagattaattggtttaagtgaaaatcatggaatttagttgttttattagacatgagaatgaaggtgatatgcgggcaataccgcacaagccatgcaactatgaatctgtataattaatttctaaagactaaaaaatgaatgatagtattcataatgaatttcactagcttttaaagcaggtgtaacctataccgtgcgtgcgagaaagttgaccatgcatatcgtatctataaattacaaccattacgatctacttgttgagccataggttttaagttataggcaactttaattttagaatttaactatagaataatataattgaattcttttgactagaaaaaaaatcagtattcataacggatgttttactacattgaatttcgtcggatctttcgcatcagcacatcactagcttttaaagcgggagtaacctatacagtgcgtgcgaggaagttgaccatgcatatcatccctttgaattacaaccattacgatctacttgtttgagccgcatagacaactttgaattttagaatttaactatagaataacataattgttcttttgactagaaaaaaaatcagtattcgtaacggatgttttactacattgaattttgtcgtatctttcacatcagcacatcactagcttttaaagcgggagtaacctataccgtgcgtgcgaggaagttgaccatgcatatcgtacctttgaattacaaccattacgatctacttgtttgagccacgggtttataagttatagacaactttgaattttagaatttaactatagaataacataattgaattcttttgactagaaaaaaaatcagtattcgtaacggatgttctactacattgaatttcgttgtatctttcgcattagcacatcactagcttttaaagcgggagtaacctatatcgtgcgtgtgaggaagatgaccatgaatatcatatctttagataccaataattacactctacttgtttgagccatgggtttataagttataaccagctttgaattttagagttcaactttataatcaatataaaattgatttctacaaactagaaaaaaaaactacatcgaatttcatcgtatctttggcatgagcatactagcttttaaagcgggcgtgacctacaccatgcatgtgaagaagataaccgtgatatatctttgaataccaacaactacgatctacttgtttgagcgacgggtttataagttggagccaactttgaatttagaatttaactttagaatcaatataattgattttttcaaactagaaaaacccatgtcataatggatgttatttagcattgaattctatcatatctttggcttgagcatatcagtagcttttaaaacgggctatagactatgtcgtatatcatatcttaggatacggacaattacgatatacttatttgagtcacaggtttattagttgtagccaactttgaatttagaatttaatattagaattaattttgatttttttctcgttttctaactaatgcttggcgagtgtaagagcataaggctgtgttggtgagccattagcgtataaataattaattactatgtacataggagatctttgagattttgtgaaatgtataataaatatcacattgattactatgttaaatttagaagataattaggaaaccgattttcagcaactggctacaaaccccacacatatcaaaacaattcattgtgctttgtgatttttgaactccctttgtccaaaaaggcagtttcatcctcatgattgattgttgttttcttgtttgctttacagagaaagtagtgcactgtactctctaatgcacatgataatatcgtattgtaatataatatattagtgaataataatgtagcatttttgcatattaaactttaggatgcaatgagttgcaactatacaaaaggtatagatttgcatttactaaaaatgttattaccacatagctttataattaaaaaaatattttctaatttagagggaagattatatttgcacttttctattccaaacaaatatatttgcacgattgcaaaaagaaaacatatttgcatatttccatacaaaaataaatacgagtgcattttcgtggaaatttatattgcagataacataaaaaaagatgtaatttttataattgcaaaaaatatctattcatctttcatgaaaattcgtatttccataaagacaaaatacacgtcacattactatttttttaaaatgcatctacacataaaaatgtttgtacatttacattgcacaagtgcacatttctatcttgtgcaatgaaaatgtgcagacttttttttggatatgctcaactatggcaactgcacattccattgcatagttgcgcatatccaaaaaagtttgcacattttcgttgcacaatccacacattattgatgcaccattctcatacaaagaaaatacatatgtgcactttcccatccaaaaggaaaacatctgtgcatttccatagaaaacacatatgcacattttcacccacaaaagatacatctgaatatgtccatccatattttcacacaaaatgttctgcacacttcactcaaaatggttctgcaaatttgacataaaatggtctgcacatattcactagatcattttaccttgcacatctggccaaactctgcacataacacatttcccactgcagaaacgataagcacatatacatttgttcaaaaactttaaaagaaaaactgtagggcatgaaaaagtgcaacacgttcctgaaaaaaggcagcacaagagatctactcatttcgagagaaaaaacacatactgcaccaaaaaaaaatgcagtaggcggacatgtcctacacaaaattgtatctacacaacatacgtgaattttcagtcatgaacatccacgagcatacgagagagtgtggttttagtcccacattgcttagccaagaatacaagcatacaaggccaaggcccaagggtgcaaacaaacttaaaattccagattaacagtcttgtacaaaacgctcagtcaaaaaaaaaaaagtggggaaagtaggagctgagtttttgcgttcgtagtttgttccaagcaggaaagagcccttggaccttggccagtttgggtcttgtagtaaactagtaatgacgccaagataaccatgcatatcgttcccttggagctaggaagtcaagcactcttgtagtatctttcgaagtaggaggcagggcacttttaacacctgtttagaaagctgaaattgaattgttctgtgaatttcctgcaaaagaatccttcaaatacatcctgtaaatcaatttctatgccagctataccggtgttatatgtgtgaatgtagaaagattttaaagaagcactaacacatgctattttgccaatatctctagttacatatattcactatcactaacatggaacaggcaaaattctttagccctatagttgacactgacaaccattacagcgttgttactcctatttaacaaaaaactccctccgtgtcttttttgtatgatgctggttagttctaaccaacgtcatatatttagggaaggaggtagtagcatacaaaagctacaatattctcactgtaaaactaatcttacttggatatttcttttggacattattggacgcaaagatcatctgcatgaagcaccacttaaggggactgcaaggaagaaacactaaaaatgtaagagaaacaataaaggatctccttgtgatccaacaaatagagccgaaaagacaataccttctgtgcaataagaaatgacaaaagctggagtgccagtatctgagctagattttcaacattttttgtcatgtaccaagctgaatacttgcacaaacctaatacatataactgaaaattttaactttgttgatccatgcagggttgctggggcttcttgctatatgcctatatccaaactgctagtgagtatttgtattgttagacgtggttaataactgttgttgcaaaggatttctgtagcagtgcttgcagcagatgcataataatgcatggccacatcttgtattgttatacagccctctttctataagtttttcatccatatcctatatctccacatgaacaatctccatccttaaagcagtgtaattgcttagtgtctctaacagttatctctcttcgaacaatttcagaaattgccttgaatatcacatgacaactctggcaagtgtatcggttctttgtgacagaaatagtggtaccaggtgtagtattgatcaaaccaaaagctacagctaatctttcactgtgaccgcacaagatgtcgtcctcggatacttctttatcttctaaggactcaacaggagcaaaaccacatgctttcattcgctcatatatgccatgtagaacaacatttatttcttttatctgtggatgtgattcatcatctgtaagaaatgcgtgagttactcccttaacctcaacccagctacatccattatcttgctccaatcccttctctcgcatggtttttctcactctaaccacttgagcccatttgccagcatcagtatataaatcacacagaagaacatgatatgcaacatcattaggttccaactcaaggataacttttgcagcaagctcgccaagttcaacatgtcggtggatccggcatccattcaacaaggctccccacactgcagcatcaggtttgataggcattcgatttatgaggttgtaagcttctgttaatttcccaacacgactcaatagatctaccatacatgcatagtgcttgagatttggaactattgaaaatttctcagtcatcatgtgaaaaagctcccagccttgaataaccattccagccctactacaagcacacaataaagcaacaaatgtaacttcatccggatgctctcccatttctaccatttggttaaagagtgataaagcaaattattnnccttcccccaaaaaganccnccccccaatttgggaaaggcctttaannnnaaaccagaaagcattatattccaagagacaacatccttttcactatgcacgctgaattgtgcccaagcatagcttgtctggccacatttcacatacaagtctagaagagcattgggtacataaccttcagatccaataccacaccttaaaacatatgcatggatttccttaccagatctcaaagccccagtagcagcacaagcacttagagcagctataaatgtaacagaattgggttttacatgtcctagcatataccggaaatagtacaaagcctcaaaactcctgtggttaaagcaaaatccagcaatcattgaactccatgataccacatccttctcagccatgaacttaaatacttcaatagccttatcaatgtgcttggatttagcatacatttcaaggagcgcattagcaacgacaacatacctgatgaatcccttgttctgagcaagctcatgcaatttgatgcctacatctaacctccccaagcaggcacaagcagcaagggcacttgcaattgtaacatcatcaggacttacattatgcaattccatcagtgcataaacttcaagggctttatctgggaaaccatttttctcataccccgatatcattgcagtccatgacatggcatctttagtttccattcttgagaatattttacctgcatcccccatcctcccgagactggtgtacatctgaatcaacgagttacagaatgcaacatcaatggcgaaacctctctttacagcaaacccatgcatttcttttgcaaaacccacttcagacaacattccagatgcaacagtcacactggttattgtcatgagattcggttgtacctcattctccagcatggtgagaaacaactccaaccctgcctcacactcatgattctcaaaatgcccagctatcatcgcattccatgatatgcagtctgtcacggccattccatcaaacaccttcctcgccgccacaatatccccacattttgcatacatggtcaccagagcattcaatacatcgacctcgtctccaaaaccaaatcgaagcacatgagcatgcacctccctccccatcctccagtcagggatgcccccgcaggtacgcagcacgcaggggaacgtgtagacatccggcctcatccctgcccacagcatcctgtagtacaggtccagcgcctcctcgaggaagcccaccttgccgtacccgcctaccatgacgttccaggagaagacgtccctctcaggcattttggcgaacaccctccacgcgtgccatatctccccgaacctgacgagcatgctgagcatagcgttcccgaggcggagcccgaagctcgggtgctcggcgtcggcgcgcgcgcacgcccgcatcccggcgtcgaccgcgcggcgccactcgcagagccggaacagcgcgacgtatgcgccctcgtcgggcggctccggggaggactcgaggagccagagcgcctgcgccagctggccatggctacaaagcgcccgcagcgcggcgctccggtcagagtaggtggcctccgcggaggcggcggcacgcggcggcggcggcgccgctgcggagccgactccgcggggacgcttccgcggcgggaggtggccgtgcgccggcgtgagcgggagcggctgcggcgcgcggtgggaggcgaggaggtggaggaggggagggttcgggtgggttctagctggcggtggcggcatcgcgggaggcggccacgagcatggcggtgagagacgcgggggtttaggagaggtttggcgcctcggtggccacctgatccgggagcgcgaatggatagagctcgcctcgcctcgacgcggttgggaagtgaggagagcaacgaaattaaccgtcctagtacgtaaatgggcctcaattgggctggagattaaggcccaggtagaatttttttagtgaattgcactttggacatttttattgataaagtttcagtttggacaatcttataccaaatatttttactttggaccacataattttatactccatccgtttctaaatatttgacacgattaaattttagcatatgtttgaccgttcgtcttattataaacttttgcaaaatatgtaaaactatattatacatataagtatatttaacaatgaatcaaatatttaacaataaatcaaatgatagaataaatattaataattacttaattttttgaataagacaaacggtcaaacatatttaaaaaaatcaacggcgtcaaatatttagaaacaggggaagcatttgttatgtaatggaccactttaactatattcgctagatatatttagcgtctcctttcataaatatatgacatgcatatacatatgaaagttcgccgacataagtggtaaagatgtggtttgagatgatccgttgtgtaacaaataaaaaagctatctagtacaaagtaaaatgattaaaaaaataatccgaaataaaactttggctcaaggaaagttaactctcttttttggacgcgagaggaaaattcaggattttctacgcgtcagttcagttcagcggcgtgaaattttccgggcctgaataaaccggagacagaaacgaagcagcggaaagagacggaaatcggagtaatggcagccatggcgtcgtccgctcccacggccgcgaaacccgtcgctctactgccagccccaatctgccgctgcggcggcggaggtctcagatcgacgctcctggccctgatgccgccggcggcggcggcggcttcccggttccgagtctccgcctccgcctcggacgtgcccgatttcctctcctccgactggtcggtatcccctttccatcttgtgctttcatgttttttccttcctagtttgcttgtacgttgcaagttgcgacgtttattcatgtggacaatcgaaccaacttgcgactatattggggaaaaaatgggtagcgtagtcaggcaggcagttcaaatggactatccggaattccggatgcggtatggtctcacacacatttggagaattcctttgcccagttgctcactcttccagtactttagtatctgtgcgactgtgccttaagaatggaacaaagcgggtggaagcaatggaaggtacaaatgcgttgaattgacgcggctatctgcttatcatttacgatgagggcaatttacggatcattttgtagatttaagttataagtggaaaggaaggaatgacagacatttgctgtgggtgataagtgtgagccgcaaatatttaactcatgccatgttcgtcgagaacttgttcttcagacgattctgttaccctgaatatccatcccttctttttggcatttgtatagaacagaatattctaccattgtgctagcaggttaagtacccgctgtcaaagtgggaatttcttgaactggtatttggagaggtaccaatgaagtgaattaggcaataagggaccattcaaaaatgaaggacccattagatgattcaaccaaaaaaattcatcacaccatgaactgcaacttattcagtgcctcaactgttaagtctgttaaaagctttgttggtttgttttcatgtattctcaggtgtgcatgtagcatccagttttacctaaggactgcgtgaatcagagagaagcatgtctgcagaaatttacagttggtagatacttagtgcattgtgcaaagctagctttacctatcagatatatctgtaggcagaaagcttatgttcatccttacatttacttccctgaaaataattgttgatggcatgggccttatcttctgtattccttgtaagtgctacgtgtgtcatcttctatatctagagagtataaacttcaatagctgctcactttgtatctaatcaaggtctacataattcaaatttggggacttgaggcctttgctaagttcctgtgcaatgatatagaacaccgcatttgttatcacaggagtttgacatgccataccaagatgtgaatgtgcaaaaggcaagccagtgttacacatgttgtgtatatgatatttaaggctgacattggatatgttgaacatgaatatcagttaacccttctattgatgtttttactgtgctggtaggatcttactcttgttctctgaataattcctcatttttctgcttcaggctcgaaacacggaagaaaaaccctttcggccccaggttgaatgtaatgctcaaactggaaactgtgaaatagtctgatgttgatgtcctgagcttatagattttgcatggttccatctttcagtttaatgcagaagaagcagtagaataccaacttgaggcattaaaatacaatgatcagccacgccaagattatgggatagaagtcatgtacagggtaataggctaatagctgcttgcaaattgctcatttttgcttagatgtggtaaaggtttgacacaacttcataagtctgaatctatatggccttatcagtttgcaggctttgatccttttgagagatcaacttattttgggcgacaatttgatctaggacaggtagaccagaagtattttccttctgacatatatggttgttcatgcttcatagctgtcttgctgattgccactagtgctactccagtttgaacgtttccggcggatatttcaccattcaacttatagggttttgcttgcccacaaagaaagaactatattgagcagtttatgggttgaagaggttggtcttaacccccttaatatttctgtctatcgtacaatgagacaaattatcttgatcttgaatctgatcgtgctaacagaacctatataagcaaagagtgtgggttcgaggatcacgtccggaggaagaagctatatttcagtttacaatggttcaggtacctatcaacacatccttctgtcacctctgttccagctactttgttttttaacccattgttgttgtagagggttggtggctcatgggatgggtactggttaactgagagcttaatcaatgatgatggagatgcactctcaggtggtcttgcttactgaccgatatgtgtcttacactcaagcttctagcgtattgatgtactgatgaatctagaaaattatatagccgtgcaattatgcacggttggtccagaaataggttttctttttttttaaaaaaaaaagattgtccagttatatgtcacggaaagagtagcaatagtacatgtgctgtggtagaattgactgcgacactcccattctgggagcattcaatatgtcaatggtcaaacacgccgctattgtacataagtttggcggctgtatggttgtttatgaaataccgtcatctggaaagctttcagcgatagctcaatgtggatgttcaggtcaggaaacggcattgtcagaagaaacaaagtcctatatacacacatctatgtttttattttgtgtacgctatgattgtctattgctccatccaatcagaagttgaattgttaactgctcaggtacctgatttccgagtatatcttcgatgtttcctgattgacttgtgagtttatcctctatgtttcctgcttttaggattacatggctcatgactgcaggtgacgaggtaagcaagtaaacacaagttgtcttattgcgcttatatttttgaccgatcttctgtttttacatgtttggtcagggttgtggcgtcctttccgatcagaatgtgtaaccttcaagtacttgaaaacatgaaagaagaaccggaaggtggattgaatatgttgtttcacactcaccagaaaagggcaggtaacttgttgggaatatttttttaggtgaccatcatcgtcaggtcaataacttgcttgcaagatgaaagtaacatgatatcgatatctatatattttcgcacaacctgatgatgaggcaaagaaatttgtggatacgggtaaagttccattgcttttgtgcttgaactagtaattaatctgacatttcatagtcgagcactgctccacgtattaaaagtttcttacaaaactcgtgtgccctatttttttagcttattcatgaattattgaaatgggatatttgttcaatgtttttaaaatatgtattctcaaaaaaaaaaactttctattacattattgtaatacttagaccacttgtttttagctgtttgttcactttatttcttaaaatatttaacttgctcatatattcaagagatagtccgcccatcaacatttgatcgatcaaacggggcattagtacaaaattcataaccatttgatctaacttaggtggaggttgtagggaatttagatttactaacataatgtaaaacatttgtaaaagcttttcaagaaaaacttttgtagcgtatatgcttgcttttgaactaaactaagagctttttaataaaactttttgtacgtatagacttgccgtcgaactaaactgacgagtaattaataaaagaccacaaggacatagagttgggtgtgttagatacgggtaaagctccatttgcttttgtgtttgatgcagggcgtccgtgagccgtgtggtgtaccgccgaaccggtgatgccatgcatccatacacgtctacactctacacccattaaccatacatggcgtacaacgtcccaccagctcgtggccgctgccacgttgaacccatagcaacctctcgcgtgaaatatcacgttggaaacaaaaaaaaacgttgttaagtctaaggtctccgtcgtttggcttatttcctaataagacaaaatggtttattaaaaaataaaaatgaatttgtacgtaaaatttttataaatatgttcttggtgacttagaagctaatgttaaaaaagaaactatgttaaaaatatctcaaaattaagcttgaaaatttaaattttggctttttcttttgctgattagtccaaccgatgggagctaactccgtgtgaccatgttgcctacgatttccctgaaagcgaggacggaagtgggctcgaaatagccaaccccgggacagacaaatggatcgatcgatctatcgagcagcccactacaggagcttcccgtccacgtgcgcggaacgcacgctaccgctcccaagtccgaaacctccggtgcctcgcccgtttccccccatgaattccccggccgcgcgaatcgccgagcccccgtcacgcacgcgacgcgcgcgagcgagcgtacagccgccacctccatccacgtcgcggtcgctcgatctctcccccccaagcaaaaagcccaacaaccgcccccgcgcgccgatggagacgagccgccgtcccgcccgtccgcgccttgcgtttctgaggccgttcaggcggaacgcatgagcaaggcgttcccccacggccggttgcttatcgcacagggcctttctgctacgccggcgcccgaccggctcggcgttttcgcggtgcgcgcgcgcgtggctggcatgcattatccgatacggatcgactcgatcgaccgaccagctggtgcgtacctcgattcggacacgggtgagttacgttacgtagaatcgtagatgatgttgtaatgtctgcgtttgtgtacttgtgctgtagtacaggtcgcaatcggactcctgttccgattaggaatattggtgatcggtgcatgcatctcttatccctctcgtctatataactcagtcaggggacaaacgagttcgtccaagtgcaagtaaccccacgttctttgtgcttgtgaccgcagtcgtggtttgcaatctttgtgttcggtgaggtttgtttgctgcatgccatggccgagcagcagcagcagcaagcgccgctgctgcagaggccagccgctgcaccgccgtcgtcgagccggctgccggacttcaagcaatcggtgaagctcaagtacgtgaagctggggtaccactacctcatcacccacggcgcgtacctcctgctcgccccgctcccgggcctcgtggcggcgcacctctccaccttcacgctgggcgacctcgccgacctgtggcaaaacctccagtacaacctcgtctccgtgctcctctgctccacgctgctggtgctcgtctccaccgcctacttcctcacgcgcccgcgccccgtctacctcgtcgacttcgcgtgctacaagcccgacgacgagcgcaagtgcagccgcgcgcgcttcatgaactgcaccgagcggctcggcacgttcacgccggagaacgtcgagttccagcgcaagatcatcgagcgctcgggcctcggcgaggacacgtacctccccgaggcggtgctcaacatcccgcccaacccctccatggccaacgcgaggaaggaggccgagatggtcatgtacggcgcgctcgacgagctgctcgccaagaccggcgtgaaccccaaggacatcggcatcctggtcgtcaactgcagcctcttcaacccgacgccgtcgctgtccgccatggtggtgaaccactacaagctgaggggcaacgtcgtcagctacaacctcggcggcatggggtgcagcgccggcctcatctccatcgacctcgccaaggacctcctgcaggtgtaccccaacacgtacgccgtggtgatcagcatggagaacatcacgctcaactggtacttcggcaacgaccgctccatgctcgtgtccaactgcctcttccgcatgggcggcgcggcgatcctcctctccaaccgcggctccgcgaggcggcgctccaagtaccagctggtgcacaccgtgcgcacgcaccgcggcgccgacgaccggtgcttcggctgcgtgacgcagcgggaggacgctgacgggaagaccggcgtgtcgctgtccaaggacctgatggcggtggccggcgaggcgctcaagaccaacatcaccacgctgggcccgctggtgctccccatgtcggagcagctcctcttcttcgcgacgctcgtcacccgcaaggtgctgaagcggaaggtgaagccgtacatcccggacttcaagctggcgttcgagcacttctgcatccacgccggcggccgcgccgtgctggacgagctggagaagaacctgcagctgtcggactggcacatggagccgtcgcggatgacgctgcacaggttcgggaacacgtcgagcagctcgctgtggtacgagctcgcctacgccgaggccaaggggcggatcaagaagggggacaggacgtggcagatcgccttcggctccggcttcaagtgcaacagcgccgtgtggagggcgctccggtcggtgaacccggccaaggagaacaacttcaccaacccgtggatcgacgagatccaccgcttcccggtgcccgtccccaaggtgtcggccatatgatccaaccacacgcgttggctgtttgcactgaaacattattactagcagtagcttagtagtagtagtagaaatgaactaggatctattcgttattgcttgtgtattgatctgatcatatctggttcgctgttcttatgtgaagttgctctgtcggtctggcatgtaagaaggtctgatcataagttcacttcaaaagttaatttacatcttcataaaatggcaagtaaattggctgtcaacctggaaaacaacaatgaaacagaaatgtacaatttaggctctcttttttttcacttaacgaggaatgcacaacttctcaattgccctgtgacgaggaaaaaaaagttaaaataggttgtcataaaacggcctttttaaaagggccaacagtttcagcacccattgggctgtcaacaaacaccgaactggggctgtacagtaaaggccgaaacttccaagtggagagcatctcggcccattaggcccatatcccacagagccaacggcaacttccgaatccgacggccgaaaatctcgcgtgcgacgaaagctagaccgatccgatccacacctgccgaccaagatccaacggccacaattcctgcgtccatccaaagctaataaaccccgcaaccttcgagaaaaaaattgatgccaccgcagctataaaaccctccgcctccgcaaaatacccaattccatttcgaattctagggttttgttggcccccattcctcccccaccccggtgtcctcccctccgccgctcgggtcgccgcctttttcccctatggtgagtacgatctcgatttcgccgcgccgtgtgggtttggatctcggggttcctgtgtttgatccgcgacgttttttggcttttttttccaggcgctgccgaatcaggggaccgtggattaccccagcttcaagctggtcatcgtcggcgatggcgggactggtgagttcccaatctcgattcggatcctattccgttctgaaacggcatgttatgatatgtttgatgcgtctactcggtgtggtttctactagatctgatgggctaagatttgtaccggtggctgaaatccgatggatttttttttatttcgccattagactgggatttgggtattggatgtttccattttatgattcagcttatcccagggatgggttattgctctatttttatatgacgtctaaaattttgctactcctatcttgatgattaggatcttgagagttattttaggatattgaaatcggcataaatatgatgctatacaggtcgtatttagtcagatgtatttattatcttattttagaatggaccatcgtgctatgctgttattctaggattcgcctgggactgaataaatttgaggaaaaagtaaaatagtatataaataccttcgcatcagtaaactattgcgctttttgatcagttgagattggtcaaaacattagttgcagtctgattagtttaggccggcaatatgcctgaatggcttcatttccgtaagaaaagtttacttattgccttctatatcattgttattggatggattttgatggtatgccatgtttgattgcaggtaaaactacatttgtgaagaggcatctcactggagagtttgaaaagaaatatgagcgtatgtactatgactcttatttttgttgttcctgtattctttgctaaattagttattgaactgttatgcaaatttgtcacttcagcaaccattggtgtcgaagttcaccctctagattttaccaccaactgtggtaagatccgcttctactgctgggacactgctggacaagagaagtttggtggacttagggatggatactagtaagtgctagagaagtgcttaagccaattatcatagcttcccttaatatttttccatgcatatggatgtctccttgtgcttgcctgattgttctgtccttaacttctgttgtgcagtatccatggtcaatgtgcgataattatgtttgatgtcacttcaaggctgacttacaagaatgttccaacatggcatagggacttgtgcaggtttatttctgaagacacgataaactttacctaatatattatatggaagagaactcttatgattaggtatcaactcttgcagggtgtgtgaaaacatccccattgtcctgtgtggtaacaaggttgatgtgaagaacaggcaggttaaagccaagcaggtcacattccacaggaagaagaatctccagtactatgaaatttctgccaagagcaactacaactttgagaagcccttcctttatcttgcaaggaagcttgctgggtaataattccctccttattgttttccttttcatgctttcttcttacattgtttgtgtttattatgcaacatattttaatctgtgttaatgcttttggtgtatgtagtgacccgaacctgcatttcgttgaagctgttgctcttaaacctccggaagttcccattgacctggcaatgcagcaacagtaagtgtttatgctttgtccaattcattttcagatagtgttgatgaaatacctagtttctgcaaacatttcaggaactaattttaatactcatgcaggcatgaggctgagcttgcggctgcagcagcacaacctctccagatgacgatgacgatctgatcgagtagagaggatcatgagtctatcatgcttcagcctgagtctcttcataagagtctgaattaggccaatgcatgctagtgttagcttgtctgtggaatgtggacgtttcctgcgtgcctgatgggttgaaaacttttgatgtgtggtgttacatgttgctgccatgaatttgttggctcttttttaacactgctgtgttacttctatggttatgcttaaactatttgtatcatcgagctggtatttatttatccggtgttgcacaatattcttcttcactgccctaactgcgagtgctgaccgcccaagattatgtaatgttcgcatcgcattaagttttgtatatctgtgatgaaagctaggctcaactgttcttgagaacaggggtggtgactggtgggtgtccggtgtccctgtatcggtaaacaaggacacatttgactgctggtcctcgttgtcgttggtggcgatatactgatatagtgagtatgatggcagtatagtagtacagctcctctaccaacttactcactataccgtatgctcaactaaaatacaccatttcattcgacctggtaaagctgaactgaaaatgagtaagctcttccagttaccaacttaccatatgctcgatagaaaatgtagcatcatcttactgcaactctaaaaaattaaaatccaaagggagaacgaaccgggcgtgaagttatgattaagagctttgatggggaacgaacctggaggcacatggacaggaaatcaggattaagtgatcacttaattaatcccaattccaaacgtttccgacattgattaaatcatcaaacagcattaatcgacctcatttcaaactttgccaacattgctcaaacaacataggagtacaccgtattagtcctggcagaaaaagaacagcaaaccaaagagagatcgtcatcgatgatgaatacgagtacaataaagtagcaacgtttctggaacactccagaagtcactctctctcgaagaaaagatactgcaccgaaatcaccttccgaaaggcacaagccaaatccatcgttggtgcaggcggcaggtccagccagtgtagtgcgcgtcactacgaactctagtgcgcaagtggcctcggccagataaccacacagtcacagcaacagaaaaaaaaaatcgcctcggcgcggcgggcggagacgtcgatacccccgacgaatcctctctctctctctctctctctagatcccatccaccccttccacctctcctctattaaatccgccgctctcactcccacccaccgccgcgacacacacacgcacacctgagccgaagcacgcacgaatccaacgccgagatgaggccgtcgctgctgagatacgccgcgcaggcgctccgccgccgcgactactcctccgccgccgcggccgctgagcggaaggtggccatcctcggggcggcgggcgggatcggccagccgctcgcgctcctcatgaagctcaacccgctcgtctcgtccctctccctctacgatatcgccggaacccccggcgtcgccgccgatgtctcccacatcaactcgccggcgctggtacgtctccacccacccgcctgcatccctctcctggctggatctagccgtgtgacgatgctgggttttggattctgctcctccgcaggtgaaaggcttcgtcggggaggagcagctcggggaggcgttggagggttcggacgtcgtaatcatcccggccggtgtgccgaggaagcccggcatgaccagggacgacctcttcaacatcaacgccggcattgttaagggcctctgcactgccatctccaagtactgccccaacgtaagcaccctaactttgatttacactgtagagtttagatatgcagtgaggttcatggatctggttgtgaagcatgctgattgcgctggtcacggcttggggattgcacttcattgcccatcgtgtagatctagcgtttatttgtggtctcggatcgtacactgacataaaactgatgatggagactaaaatagctggttgcccccaaaattcagtgagaatttaatagtgacaaggacttgatgggaatagaaatggacgttttgcccaaattcattgagatttaatactataggaaggtgaggtgctagttgcctgcctcaatgttgtgtggtgtcgctcgaggctgcctcaatgttgtgtggtgtctcactcgaggaggctcgctctcaccaggccttgttttgctccatttaatcgcataccgccgagaacgaatgggatgttagattgtgttctgtgcatgtctactccaatatatcagctgaccattatgaagtttattgtgctcactatatatgaatacaattgttaatcttttgattgtatgctttttaggctcttgtcaatatgatcagcaaccctgtcaactcgactgtccccatcgcagcggaggtgttcaagaaggctggtacttacgatgagaagaaactgtttggtgtgaccacgcttgatgttgtgcgcgctaaaactttctatgctggaaaggctaatgtgccagttactggtatgaccttgatcttttactcataattttaggggacattgacattaaatatagctgtggattttatgataaaattttatctccgcttttctaatctttgtgattgctgtgatcttctgcagaagtgaatgtccctgtggttggtggccatgctggtattactatcctgccactgttctcgcaggtatcatagcttacgatcttgttttttgcaatttccttccgtggttacccactttgagctcaatatacatatacagagtgtaaatactcgatgatgatgatgatagaacctcatagaataggtgttggaatcctgcatgttttaagcttgctgtataaacatgcattttttattcaatgaagaggttgtgctttgtggattggagtcaatacagaatggttatcttcatttgacaatcacgaaaacaatatgcaattgatgtcatggaattttttcaaaaaatcaaagtgcatttatggcgtgtggcctacctcctaacggagtaattttttgtgtgatgtaggcaacccctgcaagtaatgcattgtcgcatgaggacattaaggctctgaccaagaggacacaagatggtgggacggaagttgttgaagcaaaggctggaaagggttctgcaacattgtctatggcgtaagtcttcatatcaaccttaaccaactatatccttagtttactagttagtctgtcaatattagtatgctactatgcctatttgtgatattcttgataaaacatcaggaaaaagttctcataatttgcaaccaaccgatcccttggatgttcttgccatcctttagatatgcatgcctcaaagtacattgcctctaggttcaacatattggcttcagagtacatatatgcttggttctgtccattggatgttagctggttatatattttcctttaaaagtcctgtccacttgcttccagactgttgcggagttgttttttctattctttatagatcctactccatctatgagatgttagttggtatatatttgcctattgcactattgcccgctggctttaaaaaaaaacagtagcaacatatcagcaaaattcagttctaacttcttgctgttcccatgcccatttgattttcattgcagcaaagctttactgtcataattggatatatttaggttgcaatgctgccaataatagatggaaaccaaaatttttctatcccatgattatacatttttataaacagttggcatatctgagcttgttttcagttcttgtatgcaatgcaattgtacaaactaatttatccaaatgaatttccccttcagccttataactctctgttattgctttcatgtgagcacacatgcattcaaattttggaaacatatttgtgctcatttggctcattgtgctggagtactatctggaactggaatgaataggccacttggatccatgtagataaactgtgattttatggctttgcaagtttgtatacttcgccctgacatacttctccttttccctagatatgctggtgcggtatttgcagatgcgtgcttgaaggggcttaatggagttcctgatgttgtagagtgctcttttgtgcaatcaacagtaacagagctgccattcttcgcctcaaaggtgtttttcttgcttctttatggcattgttatgttgctaccagatttctatcgctagatcttcacagctcttgctttttctttcttttcccacactattatttccgtaaacaggttatggatgcaacatacaatgtgttatagacagttctactatatgtcttctcacatttattgactgaagtattgaactattgcagcttgtgttcatttgttaatagcagctgttctatggtcatagtttgaagatttgaatggaatagtttgtagtagcaatatatatgtttaccaccagggactaagcttttacaatatttgttgtgttccgctgccttttcagttagttgcaagttgcaacagatcatctcttatctttggttggatcaaaatagcttttaagacacctttttatttaaatgtgctgttctatcgttgtactgttgtcttggctgtggtttgaacactgtttcgttacttgtatccttcaggtaaggcttggcaagaacggagtggaggaagtacttgggctgggccagctttccgagtttgagaaggagggtctggagaacctgaagggtgagctcaagtcttcgattgagaagggcatcaagtttgctcacgcgaactaggcaacctatgcagattctaacaattcaaatgtgaactagagggggggtccctcgaatttttggtttgactgttgttctgccccgatctgctggggcaccgagatgttgtgctccagaataaaatcttgcggcttgatgccaacctgaactcaaaacttgtacctgaaacagcgactccggtgctatttttcaccttgtacctgaaactgcgtacagtgaacccaaatcatgacccgagtgtcggtcttcagtttgttgggcgattagaacacttgtgttggacgtcgcactgcaaacactaaacacagcagtggatgggattgcatgactgacctgactttgctgttctagcagaaatcgaagtttgttaaggttctcttggaagtgtaggctgtcgagtcgttaaagacgcgctagtgtggagcatcaggcacttggctgtagttcccaactctctctctctctctctcttccctctccccttttgtttttcacgcacatgttttttaaaacgatatatttttttcgaaagcttatatatgaatgttgctttaaaaaattatattaatccatttaaaaaaatagttaatatttaattaatcacacgctaatggaccgttcggttttccgtgggagtcgcacagtaccatcaggcgagcacagtgctcttcagcgcatgatctcggcgagtttccgtggcgcacaactgcaaaacagcacaagaccaccacttccttgtctcgttcaccgttacaaggttgcaggcttgcatctcccgtagagacctgaaggacagtgctacaaatcgagcggtccgctgctgtgtgtatggcacgcatcaagaattgtgatgcacgttgtcaacaagcagctttatgcagctgtactttgtcatcctagtaccagtattgatgttcaagagcactcacggctcacgggtatttgatccttcatcgctgctactagtacatactacatgactgtatgcatatgctcaatgcttccactcaaaagaaaaaacaaaaaatgcatatgctcaatgcaactaaatgatatcaaacggatcagtttcccataacatgcacagtactcctacaaaatcttggtttgccagtgcttgaacaaataacccattcaaacagtctatcttcttttaaatagaccgctaacggcacatttattttccctagaactcataaattcgccattcattttttttctactgcttatcagtgtaactcaaaccgatcagagccaaatagcacgcttggacacttgataatcatggcttatccgataatcacgaagaaattggattcaagagatggataattagctatccatggtcaaaatttctcaagagcagaagcacatccgcaaaaggtactgctgaggatctgcgtccgacaggttgggttccaggtgtgaacaatggatgtttctatatacttcctccatttcacaatgtaagtcattctatcatttctacattctatatagattcattaacattaatataaatgtggaaaatgctagaataacttacattgtgaaacggagggagtaattcatttcaaaccttgttacaaacagcatactcaccttagaatgtttagaggaaagatcattatattaataatgacccggctttttgaagaaagcccagaacagagtcttgatacagaaaagtaaaggacacatgcgaacacctcacttgctttctggaaacagactccaggcaagctaccaaatgacaaggcgctaaactcctacagcaaaatatccaacaactacttaacaggttacataaaacaccctagtcataagagacacatttaaaagatcttcaggtaattgaatatcaggtttccaggacctcatcctccctcgcatatcctcaatccacgccttcaatacacccttcatttcctcaatttgtaaaagactccatttctgcagaaacatcaacacattatgaattaagtggaacggagaattgataacaaccccttcaaacacaaatttgttcctggctaaccaaattgcctaacagcaagcagctaaaacaacccaccagaaaccccccttttttccttttccttctttaataaaaagaaagaaatccgagaacgaaattggagacatctcccacccagctatttccctaatggcacaccataaaaatcttgctaaaggacatctaaacatagtatgttctgtgtcctcctctagaccacacattttacaattaatctcccctttccattttttctttttcaactgagcagcacaagggatcttccctttcatggccatgaataagaagtgtttgatctttaaaggaattttagctttccacaagccctgtgccctggtatctatcacccctccaaaagttaaagctttgtacaaagattttgaagagtatccgttcttctcatccagagcccatttcaattcatcccacccttctttgatttccactccctctaacaaactttttagttctacccaattatcccaggaaactccctccaaattcctcctaaaggttaggcaccactctccttcttgccaaatctcccttacagtaccaccttgttgctcatttatcttatacaaatcctcaaaatacaccctcagagacacttgtagtaaccaaacatcatcccaaaaactggttctcctcccattattcaccgctctctttgtgtatagctgacagaattttttagcaatctgcaaacctttccaaaactgagacatattccctttttgttccctaaagaaactctctcctttcaggtattttttgtgaagcagctcagtacacaaatcatgaggttccttttctaacttgaaaatccactttgccagtaaactcacattcattttccttgtttccaaaaaaacctaagcctccataatctttaggtctactcatagccccccagcttaacatatgatacttcttctttttcttctgtatcccctgccaataaaatcttcctctgactgaatccattttcttatgcaccccttccggcagtttataaaatcccatggcatacaaaggtatagaggacaagcaggagtttattaagatctctttcccaccataagaaacatagcccccaatccaagttcccagtctcttttccattttttgtcctaaaaagaaaagatctttgttcccaatcttctcagtacttataggaagacctaggtacacaatgggcatattccctctttcacagttcagaatgtcagcaaactgttgaagatccccatcctccaatcccactccaaatacttcgcttttctggtagtttattttcatccccgacatctcttcaaagcagaacaacaagaacttcagagttatgatgttttgtttgcatggtttcacaaatagaatcgtgtcgtctgcatattgcaggtgagtgatacccccttcaatcagattaggagataaacccacgagaaccccagctttcttggctgactcaagaatcagatctaatgcatcaccaactaagttaaagaggattggtgataacggatctccttgtctcagacctctatatgttctaaaaaactccccttgttctccattaatgttgattgccactttaccaccttcaacagcatttctcacccacccaataaatttttctccaaaatttttcttcctcatgacttcaaacaaaaaaggccattgcactctatcgtaggctttctcgaaatctatcttaaagataatacccctctctttcttagtgtcgagttcatgtaacacttcatgcagaattaccaccccctccaaaattgatacaacatactcaccttagggcagtagcagtgcggtgagcctgggagaggaacccaaatgtccacgtatgaaagaaactcaataaaagtggttgaagctcccctctccacagtgcacgcgcatgtaacccaaccccaatttttttcaggctggccccaccacggaatcgcttttcagttcgcatccttccccctctctctctctcccgatggttttgtgcatgctcagtcctttttgcagacatttttgcaggcttttttgatgaggaactcgttgctcaccaaggaaccgagcaaccatgcggaagaactctggcccacaccctctctcctccacgccatcaaccatcctccatggagctgtgaagtaactcgccagctcactacactgtgaagagccttatagtgatctaaggtccaatgggaaacagcataaaaacatatgcaaataccaatgtattctgcaggtcttacctcaatctaattctggaaatttctcttttacagtatcagcagttgtgactggagaaggcaatgaacgagttactgagcccagcacatactccctccgtttcgaaatgtttgacaccgttgactttttaacacatctttgaccgttcatcttattcaaaaacttttgtgaaatatgtaaaattatatgcctacataaaaatatatttaacaatgaatcaaatgataggaaaagaattaataattacttaaattttttgaataagacgaacagtcaatcatgtggtaaaaagtcaacggcgtcaaacatttcaaaacggagggagtatatattgtctccagccacctacataggtcagcatgtaatatcgtagttagagagcattttgctgtttggaggaacaatatagaaaaattcaggaagtctacaacaattaaagaaaataagtagtactccaattagattacaaaaaatgttgcacatgctattccttatcctatattttagctagcatcgatgtgttccatatatatgaacagcaaactttgaaggtgtgccatttctgtactgatagtttgaattacagattcttcacttgacatatcatctccagcttctctctaagctgaaaaataaaagcttctggatattctagcaatctggcaaagttgtcacctacacaaagagaacaatgactgatggaccttagatcaccacaaacctaatcccatgttaccttgcagagggtttatcagtctagaattcactacaggataaaaaaaatcaactccccataacattacaaagagtaactgcagaggttagcgaagatccacctattcagtgaaattcagacaagcacatatcgatagaggcacgatgaacaagaccagacgaacaaataacatatgcaacgaggaaacaaaccaagaacagacaaaggcaagctgattaaagtagcataactactatttctccataataacaatgatagtgttccttatccaccaagatagtcaatagccagggtaaatacaccacagtaccaaactatccaaatctgcaaactaccacaactacaactagcattagcagcgacaagacgagacaggaggacagaggaaaagcctaagcggaggtgaacttggtgacggccttggtgccctcggagacggcgtgcttggcgagctcgccggggaggacgaggcggacggaggtctggatctcgcgggaggtgatggtgggcttcttgttgtagcgggcgagcttggcggcctcggcggcgagcttctcgaagatgtcgttgatgaaggagttcatgatggacatggccttggaggagatgccgatgtcggggtggacctgcttgagaaccttgaagatgtagatcttgtaggtctccacgctcttcttccccttcttcctcccggccttcttcccctcgccggcgccgcccttctcgcccttccccgcggggagccgcttctccgccttgggcttcttccccgccgccggggccttctccgccgcgggctcctcctccgcgggcttcttcgccgccggcttcttctccgccttgggcgccatggatggctgcttctctcttcttggatttcgctgggtgtgtgagcttgatttgtgatgtggggaagacgaaggggacgagtttattatatagtactagcaggctagaggtgggcgctgattggtggagacgcttaccacgcggatcggtgacgtggagcgacgtgggacgtccggtgctgtttcggtagacggtcgcgatgagttcccgtgcggatcggtgacgtggcaaaaatttgtaggcgggagaggggatactgtgattggttttctggcgcgggatggtgcttttctggttggtggggcctttcaatcagtttttgggctttttggcacggagcccactactatccatttaaaggcccatttatcatttaaaagcattttctaggtaatttagcaaggatttggtcaaaatttgaatttgaattgcctagatgcatttcccaagattcggattgtttcaaaatgtgtggtttttcgtatattaaaattggtgtacacatacatagcaagacagttaccatggcatcaaccgaaaaccgtgtgaatttcatcttcgacctttagaatttagaattttgaagtttttaaatctcacgacaacagctcgagtgaaaatcataggcatgtcggatgtcatcatcttctacgctgttgcttggagagcatccgctgtaaacaattttcatacagtgatactagtgccatccaagaaaattattcaagttattcctagcagaacatttcctcccacgttctttctccttgcctcttgcatgttccatgatattggtagaagtactgaggactatgtagcctgtagccagacaagtttgtcctattgcatttctttaaatgtgtacccactgaaatgtgggtccaattggtgtttctattttctcttctagtgttacgtagttgtatcgtaggcgtcacacaggatgaagaccgagttaacaagcatataggcaccagtcgagaccattcttaatattgtcgagggctcgatttacagtggttctagtagttggaagacactttcgcatcttgtttgcgattgaggaacacagatgaaacgctacctaggtagcgtttgaatctcatgaaaatgaagatgaagataaagattgagtgtttcacataaaacaagatggtaataacgtgtgattaattaagttttaattattacaaacttaaaaatggattattcttatattttagaacaactttcatatagaaagttttcgcacgaaatacaccgtttaacagtttaactgtagattttctcactagtacgaaaaggcatatataaatcaggcatagtgagagcccaatgtgcactagtcaatctgatcagtaccagacataatagtgtatcgtcaaagattaccaagacaaaaataatctttttatttttcacaagcctcgctccatggctcgggagacatattgtcttgccaagacatccggccatgcctgcccaagctcaattaatatatcacaactcaaagtgcccaactaagcagctctctcaagacctggtcattgatgcttcggaatgcttcgaaatgtgatccaggataattcttttaacctatcatctttaggaggagttgaaaggaaacagaggtgcaggaagcggtgtcatcaccgatcttggtgcgcccgcgtatatttatatggttgccaatagccggcaacatggctttacaggatcataacaaccttggctaatatctctctaactaatcctgattacaatcattatctatcagctaagataagatcgatatggccaggttgttatgcttacacatgattatatctaatactccccctcaatcacaacctacctacattgagattgtacttaaaattttcaagttgtcttgccgataacgcctttgtaaatccatcggccacttgatcacctgtaggaataaactccacttcaagtaattttcgttgcattctttcacgtacaaaatgatagtcaacctcaatatgcttagttctagcatgaaagacagggttagatgataaatatttagcaccaagattatcacaccacagtcgagccattggaggacttggcacactgagttcctctaacagagtttgtatccacatgatttctgctgtagcattagccaaggccttgtattctgattcagtactagaccttggcacagtagcttgtttctttgcattccaagaaaccaaattatcccctagaaatactgcaaaacctcctgtagatcttctatcatctatatttcctgcccagtctgcatctgaatatccactaacaagcatagactttgacttactaatctttaaaccaagtttagtacattgttttaaataccttaatattctcttcatagcagcccaatgaactatagtaggagcatgtagaaactgacataccttatttactggaaagtaaatgtctggtctagtcagagttaagtactggagtgctcctactacacttctgtaattagatgcatcattgggacctaataaatctccttcatgcaaagtgagtttctcactagttgacaaaggtgtactaacaggtttacaatcagtcataccaactcgtcttagtagatcagtaacatatttttcctgggttagaacaatgccactagatgccttgtttacctctatgccaagaaagtagtgtaagtcacctagatcctttaaggcaaaatccttttgtaggtcctttagcagagctggaactgcatcctgtctcgagctagcaacaattatgtcatcaacataaacaagcacaaaaattattagaccccctttattataaaagaatagagaagtatctgccttggatccttggaatccaaggtgttgaagcttctgacttaacttagcataccatgctctaggtgcctgttttaaaccatagagagctttgtcaagcttacacacatagtcaggatggaccttatcttcatacccaggtggttgtttcatgtatacctcttcttcaagaataccatgaaggaaggcattttgcacatctagttgtcttagagtccaacctctagacacagcaattgatagaataattctgattgtggctgccttgacaacaggactaaaggtatcctcataatctatcccatacctttgtttaaaacctttagcaactagcctagctttatatctgtcaaggctaccatcttgttttcttttaatcttatagacccatttataatctataatatttcttcccttttgaggaggaactaaatgccatgttttattatgcaataaagctgtgaactttgcatccatagcatgtttccaatttgtgtcatgcaaagcatcatgtaaatccctaggttctccggtggtagtaagacagccatacttaacagtacgatcggtataaattttctctttgcgaatacctttttgaagatgtgtgacaggacggctcgcttctccctcgggcgtagaggatctcagcgcctgctggtgttgttgcggattgggaagtgtggcttctggtgccgtggcgacggacgattggctggcaggagaagccgacgcactgatgctgctctcatgtgtcgaactgtcattcaaattggggttggcggtcatgtcacctgctgcatcgtctgctggatcagcgttggagatcgtgcctgtgtcgctgccaccggaatcagctgcatcatcacgagtgctggcgagattttcttctgtattttccacgggattttctgcagcaaccatattagcaggagcagtagggtaatagttcacatgatcattcagctgaacatccccagggttaagcatatcggcaggaagaagattaacttctttacgaagattggttccagcatttggatttagttcggcaaaaggaaaaacagactcatcaaagacaacatcacgggagatataaatgcgtccagtagatgaatctaagcaccgaaagcctttatgaagaggactgtacccaaggaaagtgcatctcttagaacggaaatgcatcttatgagagttatatggcctaagatctggccagcaggcacacccaaaggttctaagggcttgataatcaggagtttgtttaaacaaacattcaagaggagaggaataaccaagaaccttggtgggcatgcgattaatcaaataaacaccagattgataggcctcatcccagaattttagtggtagagaagcatgggctaaaagagaaagaccaacttcaacgatgtgtcgatgtttgcgttcagctgagccattttgttgatgggtgtgtggacatgaaacatggtgtgtgatgcctattttattaaagaaggtattcaatttttgatactcgcctccccagtcggtttgcatggatatgatttttctattaaacatacgctcaacaaggcactgaaactcttgaaacttctgaaaaacttcagacttatacttgagaaaatagatccacgtaaacctactgaaagcatcaataaaacttacatagtacttctttccacccccagcaacaggagcgggaccccaaacatctgaataaatcaactcaagaggattgctaaaaacgctagacgacttgggaaagggtagctgatggcttttccctttttgacaagaatcacaaactaacaatttattggactctgctgaaactggtagatcatgattatggactactttctctactatagcataggagggatgaccaaagcggcaatgtcatcgctcaagggacggtgtggtggctgctagtgcttccttgtcttgttgagtcgaaagcgatgaagatggaagcgggaacagccggccatgacagcgtcctctaagaagcatctccttcatggcctgatctttgagagaaaaatgtttagggtacagttcaaagtaggctgcattgtcaaccataagacaataggctgaaatcaagtttttactagcattgggaacatatagaatgtttttcaagtgaagggaacgtgttggggtgttaacaactgaatgacctatgtgagtgattaccatacctgcgccgtttgcagtttgcacttggtcctggcccttgtatttgtcccggatggtcaacttctcaagttccccggtgacatggtccgtagtgccggtgtctacataccaatttgaatctactccataggatgctgttgtgcctgcatatttctcatcaggaacaaaatcctcatcatacctgtaccagcaatcaatcacggtgtgcccccttttgtaacaaagttggcacttggggcgataatcaacgccattgcctccttgtcgctggttggagttgttgccgcgtcctctgccgcggctgtttcctccatggccgcgttgctgctgctgcggctgcttattgttgcggccccttcctggattgccgcggccacgccctctgttggcgagattggccgagtgttcctggcgcatcttcatgcgctgctcaaagctgagcagctgtgagtaagcctctcctaggcttacatgctcagatttggacactagggaggagatgatgggctcgaaatcttcatctaatcccgcaattatatacgagatcaggtcttcttcatcaacgggcttgccggaagtcgccagctcgtcggccaacaccctcatcttgctgacatattcagcaatgccgaggtcgcccttcttcgtgttcgtcagtgcgatcttggtgttgatggagcgcgcccttgtggccgaagagaacatcccttcaatcgtgctccagagagatgcagcactgctgcatgtagccacctgggagagaacatctctactcatagtggttagcagataacctagtacctgctgatcattggcgatccattcatcgaccgccgggttggagacctcaacctccttctcatttttcttgatgatgatggtcgccgacggcttctttgtggcgccggtgaggtagctgtcgaggcgtgctcctcggatgacggcgagaacctgaaccttccagatcaggtagtttcccttgctcaacttctccgtgaccgtgattcctccgagggaacctgaggccgaagactgggacgaacttgccattgatagattggattgaaaggagtttgtggtgctctgataccatgaaaggaaacagaggtgcaagaagcggtgtcgtcaccgatcttggtgcgcccgcgtatatttatatggttgccaatagccggcaacatggctttacaggatcataacaaccttggctaatatctctctaactaatcctgattacaatcattatctatcagctaagataagatcgatacggccaggttgttatgcttacacatgattatatctaataggagtgattcttgagattaaacatgtagttttgagctgttttcattccttctctgttagctactcgccccgaagttgtaataaggtggcgcatgagcttgccgcgtatggctgtaatctccagaccgtgtcttcctgggcaggctgccctcctagtctgtaacggctagtatccagcgattctgctggtttggtaatataaatatctcggtttctcaaaaaaaaaagagacctggtcgttgagacccatttaatatgcacgtagatcggtcaagctagggcacttgcactagtgggaacacggaatagcgcatgtttgacgtggagcggcatgtgcgacttgggttcagacatgttagttgggagcgatggagcgctagatgcggggaaggtgacatcaacacttatcccgttgaaacggaatcccgttgtctagccgttctcttacactaatatgtactattccgtccaaaaaaaagataacttctagcaatgaaccaagacacacatgtgtccaggtggggggggggggggttaatcctgatcctgtccaacgttggatgtgtggtcgttttcagtggtcagaaacagttggaatgtgctactctctctgtcttttatccttgttacccgtactggaatcaataactcctcctgaataagtaaaacccctatgataatatcaacctctgttggatgcttgattccattgatatcaatatctgttggagcattgatttcgttgatttatttatgcccatgctgcacgtacgcttgagagcgatggataggtagtaagcgattttcattcgccattgagaggaaacggacatttatttttgctgagcctgtctatatatctacaatacacaagaagagaacatgaacaagaaaatggtcagaatttcgtggccacaagcaactaaagcttgcacgcaatcaagtgacaaactcactgaccatgtacacaccaatgctggccatggccagttgcctagttgctagctgggatatgcctcgaattaccatcggtttttgcctcttcttactgaaaccagagaactgcaaagttaagttcatcaagaaagtaaatactaataaaaggggcacatgattgcaacacttgccaaccacaaaatcaaagtcaggttgctactagcatcacaacctatgagcgacgacaagaatcaaaccgatatattccttgaccgagaacagctagtagccatcgacgactctatttgcattggttatttacaaattaaaattcagtgtgtatcccctgttatgtttatccacgatgacagtggatcataaactgaaataaacacagtgcgatctggcagaggaacacgcgtaattcttagccagtgtggcaaacgagtgcacgtaggatatatcgcttgttagatagaaagaccgcgtacgcacacgcctagctaacaccggctgtgacgtttgatcggagtccagctcgtgcaaaccggagtaccggacgccagacaaagccaaaaatgcatgatcagtttaattagtacgttaatttagtagtatcatgcacatgtatgtgtggttatgtacgacagagttaaactatatttgatcgaaatcatgcatatataagagtatatgtcctgcacagtgcatgcatgcacgcagttctgtgacaaaatcttatttgggcttatatacttcgttctcaagtaactaacagtaattattttcatcttagactacttaatataagtttttcctatatacacgttttaacaatatagcataatttctagcatttgcaaatattttgctgaacgatcaaaatgtgaaaatggaagtgtccaatatcaggtttttaagtaaatttcttagaggcatgtaaatgtatatagccatataagttactccctccatccctaaatatttgacgccattgacttttttaaacatgtttaactgttcgtcttattaaaaaaaattaagtaattattaattcttttcatatcatttgattcattgttaaatatacttttatgtatatatatagttttacatatttcacaaaagtttttgaatatatttaaaaaactcaacagcgtcaaatatttaagaacggagggagtaataagttatagtagttcaagttatataaggtatttcctccgtttcacaatgtaagactttctaacattgtccactttcatatagatgctaatgaatatctatataataatgtctagattcattagtatctatatgaatatagacaatgctagaaaatcttatatcgtgaaacggaggtagtatatctaaaaaaaaattataggaatacaaggccacgtcgatcagcatcgaccacatcgaaacgacctatataaatacacacgcgccaaagcagaaacgaacaaagcacaagatttagctatcctagcaagtcgccaaaaaaaaaaaaaccaacgtagctgcaagcaacaaaacaccagccgggccatgtcgtcgtcgccgatgcttggaggcatcgccgacaggtggcgcgagctccatgggcaggactcgtggaatggcctcctcgacccgctcgacctcgacctccgctcctccatcctctcctatggcgagctcgtgcaggccacctacgattccttcaaccgggagaggcgctcgccgcacgccggcgcgtgcgtgtatggccacggcgacctcctcgccgcggcgggcgcgtccgccgccggcagctacgcggtgaccaagttcgtctacgccacgtcggggctccccgtcccggaggcattcctgctgctgccgctgccgtcgctgctgccgccggcgtggtcgagggagtccaactggatggggtacgtcgccgtggcgacggacgagggcgtcgcggcgctcgggcggcgcgacatcgtcgtggcgtggcgcggcacggtggagagcctggagtgggtcaacgacttcgacttcacgccggtgcccgccgcgccggtgctgggcgccgccgccgccgcgaacccgcgcgccatcgtgcaccggggcttcctgtccgtgtacacgtccagcaacaaggactccaagtacaacaaggccagcgccagagaccaggtgaattccacttcacttttccagtgattatttgacctaagctattagcctattactaccacaagacgaaagtctcgagacaattaataacacctttaatttgcaaattaatcatccatgcatgtgtctcttttgacgttggaaaggtagagaattctatatgaccacggtaacaataaattataaatgttctttttgtgaatactgcagagaatcccactcgaatactgaatgcacctttcagtttgctccatgttaaccgatttttttatgagaaaatctaaaaaataccattaacaaacacccaaatccaataaatatcatcgacgagtgcaagttctataaaatgtcatcgtacaagcgattttgttccataaacattatcgttgttagggttctattgatcatgtgtcgttaaatgcactgttcatcttatatcacttaacggaagactagtaacgaattgaaaccttgacattggtggtatttctgaaacaaaattgtttgtacaatggcatttcatagaacctgtacttgtcgatgatatttcttgaaattaagtgattatcaatggtatttcttgaatttttgtttcttcttttttattatcattacttttgcatagttgcattaattcaagcaggaaattgggatattgatttatctttgcctggaaaattgacatattagttgaaagaagcacatttttaattatttgcgaagtattgcataggatgttaagggtggtcagctatgcaggtagatacatttaagttgtttcaaagataaggtaggtacattcaactctgaaaaatcctccataccaaaaatagggccaaaatataggttttataaaattaattaaagagaacggtatttttgttcagctattataattctacaaaggggtagaaagcaataatggaatagcgtgacagattacggatgatgtcaaattaagctcataatgagcagattacccaactatgaacaaaatattttaaaagatgctgatactcaaattttcataccttgaatattacaacacgccaatatattttgtcatgaccggaaggggtagtatgctagtttcttataataaagtgtggctagtaaattaaagctgttcaattagttaacttaattaatacaaatagcattcatttacagatgcatgtgcaaattattttttgttatctctggtagcgggcttcgtcattatatttttctaagtatcatcatctagctaattaagtaggtatacacacataacgtgttaaactatgttgctataaaaaaagtttaagttatataatatcgctcgtcaatctgagcgcgccttcttgctgattaatttcttcaattattcgatctctaataatgttcattattgtacctgtcacagcgacagtcagacttgcatatatagatatgttggattagatgcaccaaacttgtgttgttgcctttgactgaattaattgtagctatcctatatttgttatgctactcgtcagatttatctaaactgttctcaaacaatgtccttatcgttagcatttgactttgaaagatttgtttttttgatactgatatttcctatctaatcacatttttctaagataatgtctaatcacataagactagtgcatgaagtcgtgcattcacgtgactatcactatatttcgattagtgacgtaatatctatttctgatattatgtcactaaaatatttattgtgaaaaatatataaaatatatgtttgtttcaagaataaatggctttatcatttctctcaaccatgcaaacatttattttttttctatatttcttatgtgtgttttctttgctctatatctctctcccacatatcaaggagacaccggaaagctctagaacaccatcttttatccaatggctaagatttattctacctgttttgtttgcttattgatttaacggctattatccattagatgatgtggcacattcttgttctgttttgggattgtcttttcaagagttaaaatggcgtaatatctaatttcactaaaaatattattgtgaaaaatatataaaatatatgtttgtttcaagaagaaatggctttatcatttctctcaaccatgcaaacatttatttttttttctttagttcttatgtgtgtcttatttgctctatatctctctcccacatatcaaggagacaacggaaagctctagaacatcatcttttatccaatgactaagatttattttacctgttttgtttgtttattgatttaacggctattattcattagatgatgtggcacattcttgttctgttttgggattgtcttttcaagagttaaaataagactttgaaagatttatttatgtgacactgatattgcctatataatcacaatttaacataatgcccaaccaaataagataatcacatatttttacataatgtctgatcacataagctaccttcaagttactacttgggagccatcgtttcttttattcgtggaataagcggaatggcaaatttacaaacgaaaagtgatttataaataaaacttttatataagtgttcttaattaatgatctaaaagcaaacgctgaaaaataaacttcgatgagaaaacctcaaaatcagctctaaatttaatgttgaaaattcaaattttggttgataaatataagcataagcgaaaagatgaggccccatgattacaccgaaaaaaaaacctctcgattaaccatgcgtcatgtccaaaaagaaaaaaagattaattctgcaagaaaatgcttgcaggttcttgaggaagtgaggaggctgatggagttgtacaaggacgaggtgacgagcatcaccgtcgtcgggcacagcctgggcgcgtcgctggcgaccctgaacgccgtcgacatcgtggccaacggcgccaactgcccgccggcgagctcgtcgtcgtcgcagccgccgtgcccggtgacggcgatcgtgttcgcgagcccgcgcgtgggcgacggcttcttcaaggcagcgttcgcgtcgttccccgacctgagggcgctccacgtcaagaacgccggcgacgtggtgcccatgtacccgccgctgggctacgtggacgtggccgtgaagctgcgcatcagcaccagccggtcgccgtacctgcggtcgccggggaccatcgagacgctgcacaacctcgagtgctacctccacggcgtcgccggcgagcagggcagcgccggcgggttcaagctggaggtcgaccgcgacgtcgcgctggcgaacaagggcgtcgacgcgctcaaggacaagtaccccgtgccgccccggtggtgggtctccaagaacaggtgcatggtcaaggacgccgatgggcactgggcgctccacgatttcgagcaaatttaagctctcgatttcgaaaaatttgcaaaatggattacgtatagaagtgctcgttaatgggcttgacacgtcgaataaatgggatttccccctcatatcacataattcatttgtaaataaaactctgtccagtcaaatgcatgtgttgatttggacattgttacagatacaaaggtattgatttggacacgttgagatgtccagtaattatttcttgatgcatatgcgagttcatgctcatgcacattgatacactccatccaatcatttactctgcactatcctcatcttcctcgcggtccatcagagtccagcggccatcggcgcctctcaccatgcccctgttcgacgggatccaccacccggccggcacggcgtgctcgtcgcgcagcgcgccgtaggacttgttcgccagcgccacgtcgcgctccacggcgagcttgaaccgcccggcctcgccgccgcgcgcgccggccacgccgtgcaggtagcactcgaggttgtgccacaccagctcgttcccgggcctcctcaggtacggcgactcgcccgtgtcgatcgccagctctgtgcccacgccgtggtacggcggcgccggcgggtacctggggacgacgtcgcgcgcgttgcggacgcggaggaggcggaggccgaggccacgcgcgccgtcgaagcggcgcttgaagccgtgcccgccgacgcgcgggctggcgaacacgaacgcggtgaccgggcagcccgccgccgctgccgcggcgcggggtgccctgttgtacccgttctcgacgatgtcgaacgcgttcagcgtcgcgagtgcggcgccgaggctgtgtcccgtcaccgtgatgctcagttcctcgtcctggtacatgctcaccagcttcgccacctcgctcaacacctgcatggcaacatccatgtcgatcagtgacaatgtggtaggtgaccttgccgtgctactccggccattactacctgatctcgagcactgtccttgttgtggctggactcagagtccctggaggtgtacatggacagccaccctcgatgcaccatggcgtcggaagctttgtcccggaggaggcccttgggtggcaccatgacgaagtccatgtccttgatccactccagcgactgcaccgtgccgcgccacgcgacgacgatgtcgcggcgcccgagcgcagccttcccttcgtcggtggccaccgcgacgtacccgatccagttgctctccctgcacctgcgcgcgcgcgacgcggaccggaggatgagcggctccggcacggcgacgcacgacgtcgcgtacacgaacctggcgacgcggtacgccgcggagtggcccggcagctgcgcccgctcgaagaagcggcgcgcggcgaacctcgagaggcccgcgtgcggcgagagcttctcgtggttgaaggcgtcgtacgtcgcctgcgccatctcgccgtagcggatgacggtgcggcggaggtcgaggtcgaacgggtccaggaggccgtcccagtcgctctcaccatggagctccctccacctccgcgccgtgccgtcaccaagccattgctgcgacgacatgaccgatcgactagctaggtcacagccacacaattgacactggcacactgcaacctagcaaccatttatacagcagcggcaatggttgacatggtgccaatctttctcgagcgttcttgcgctcgtgggaataatgacgaacactcacagtgcatgccaatggcatgagcatgacatgtcgatgatgtagatgcatgatgacatgagcagatatgcttcgtgtgtaactgcatgccctaactgggaaagaagatcaaatggtagaagagatagcaagaagcacgccacagtaacgcgagggtggagtggaaagccatcgaaacggcatgaacgtttgacgtgttcgagctcagaaattcagttacggacatcatcgaacagaatccttgcttcgaggctcgcagagttgcagtgcagattcgcgtcggcggcgagagattcgcgccaatggaggagatgggtctcagtcggcaaagaaacggcacgtcaggaagtgggcccattaatgtgggccttactggtgggccataaatttagatccaaagtgttgtgggcctaattagcttggcggggaatttcgtgaaccataaacgggcctaggcctgaaaattcatttgggctttattggatcgcaactaccattccaaaatagggactctaatcggccatctacaaagccatctgctcaacatgaatttctgaatccaaactgatccatccaaaaacatttcagaactcttgaaagctgcagcaaactttgattagggccagctaaaataaccatgacatatgcagcattcatcctgtaagcacgcactgttgcaattcatgagcgatttggggttgcttaaagtgacgaacacgccaggattaactagttccaccaacctggggtccgatcaatcgaatctctcatcctcaactcgagcatgaagacaaacgctcaagatatcctcccatggcgatcgatagtgctcgatccacctagctatctagcaaatcctttgcgtcgatgcgaatacttcccttggcgactaatttggtggcgttcataccaagcgttccctaccccaaaacgtgagtgatcaaatcaattgcgttagccactgagcttagctctcgactttgcttcttctatcgatggcctttcttactgttcatccttgccgacacgttggtcacacgagaagcatctttctctttgatgatctgaaacttttctcgtgatctgtgactccctgcagatagacaggcatgtcatcagcgattgagatgctgtgaatccttggacacggtacgaattgtttgttcacacaggtttcttgagttcctgtttcaatatcactgtcactgagcttggctgtcatcaagagatcgacaagttttcatgtgtgagctgcagcctgcagaagtgcaagcattgcactgcagaaggctttgcattcgtgctcgtcttcacttgtttgtgtccgaggcgagagagatagcagcagcaggtgcgtgtgatgtggagtcagctttttttccgcaggagcatcaaaagaatacgacatatggtgaacgccatcattttttgtccaaaaacaccaggattttgcatcgatcgtgtgggggcaggatgtgctgctgctcatttggtcagaatgccggaggacaaatgcaggcaggacagatacagttgcccttgatttgggagttctaatcatctcattaactaccattgttaagatcactgacggcgtatttattatactagtacctgcattttttaatggaaccatatgcgagtgtcattaagaagttggagaatggatagcactagcagtagcagcagagcaagtcagggtttgtggacctgatgatagcatcttgctccagtggacacgattattgagatgtacatatgtacaactgagaatatgattagcgcacaagatcggcgatgcaaatgaaatgatgttttagcgaaattcgtttggcgttcagctgctgcaaagtgcaaactgcttttccatctgaaccatcaaaaaaaaattcagatattcagatagccaccgttgctattcaatctgctcacaacgttctaacaatgtttcaatatacaatcgacaataatcgaaaggatcacgtgaaatcggcaccgagagagcgtgtcgaccgaccgctcaaaatctcaaaatcccaaacacaaactagacggtgaatgaacgggaggagccaacggttttctccctcgcattcatggaagtcccatttattactcctacgctgtatcgacgctgaaaatgcttactactgctctactcccggtccctcggttaaaaaaaaaaaacttaacttgtacaccctctatttagatctgttccgtatttttacgacagagggagttctagatttttaaaacaaaaatctgtataaaccgtcagacatttactagtgcttggagcagtaacccaagctaagttgttcttcaaagctgacactggtgtagcaaaagccatggcacccttgtctcaaaaaaaaaagccatggcacctgggtgcagagctccttggcccacaggcactgacatgtgggtccccatggggtgaaaggctaccttgtcctctgctggttgtcttgtactacagtactattctggtgctacgagcaatatacgggcatgtaaggcagtaccaatgtactacgactactccgattagtacatgaaaatggcaaaaggtaattaagcatgacactctcgcttggatttgatcagatatggagtaatccctccgtcccacaatatatggaattatgagtttttggttataacgtttgaccactcgtcttattcaaattattttttaaaatataaaaaataaaaagttatgtttaaagtactgtaaataataaagtaagtcataaataaaataaataataatttcaatttttttttgaataaaataagtgatcaaacattgcaaacaaaaactcaaaatcccttatattatgggacggagggagtagtagacactgtgcatgcagcgtgcagccatgtgtgtgcatcgtttcgcatggcccagaaattgcaacggcaatgcggggttggatcgaaacagcatcgtttggtcaaattccaggtgaattatggcatcaggagcatctggattctggagtgtttgactgttgatgatgcatgtagcatgagtaataaccccggccgtaatgacgaggctccggcgtcttcttgtttaatggacaggggcaaggagatgcagacaaagcttacatacggatcagcggcaaacacggatcaaacgtggttggaagaatccaatccggaccgtccatttcaaatctgatgcgtgggagaggctctatccttttttttcaccctgaatggtggcagtggcaccaaagcagtagtgccacgccctaatctgtttagatcagtgataaaattaatcttggctgcgctgctagatgaacagagcaaagcagcagcaaagcaaaaaaggtcaagaggggggggcttccagattcggatcgtgcaaagaagcagatgcagttttaatccatctcatctcctccaacgttcagattccacctcatatgagctcgagctgagctgacgaggagtacacctacagtatccaaccttcactgctcggaccaaacccaagaccgttcctcggaaaccgcgcccaactccccacctctctttaaacccaaaacgcctacccatgtccatgtccgccgcgcgatcctagtggtgttcttcagaggcaatggtggccgggcgtgtcaaggcggccatggggttccagcgtagccctgcgacgcccaagacgtcgtcctcgcgcaaggcgccgcctccgccgccgccgctggtgcaggcggcggcgcaccatgcggcggcggggcagccggagacgccgcggcggaggtcgtccggctcgcccgcgtcggcctcggcgtcggcgtcggggtccaagacgggcgtcttcgcgcggtcgttcggggcgtacttcccgcgttcgtcggcgcaggtgcagccggcgcgcggcgcggcgccggaggtcggggagctggtgcggctcgtcgaggagctgcaggagagggagtcgcgcctccggaccgagctgctggagcacaagatactcaaggagaccgtcgccatcgtgccgttcctcgagaacgagctcgccgccaagagcagcgagctcgggcggtgcagggacgcgctgacccgtctcgagtccgagaacgcccgcctgcgcgccgcgctcgacgccgccgcggcgagctccagggacaacgagcagaggattctcgagatggagaggcagatgaccgagctgaggaagaggcggcagagggatgtcgcgaccggtcccgacgattgctcgtcgtcggcgtcgtcggacaactccgagagctccaacgcggcgaccaactcggccaagtcggctaaggtcgcaggatgttcgtccgttcgtcctcctccccctcctcccccgccgccgctgccgccgccaatgccggcaacattcaagtccaagtcctatttctccggctcgtcccgcgcttcgccggcgaactcttcgtccagttcatcatcctcgtccgccccatcgacgccgtcctgctcttcagacaccgcagcatcaagaagccgcctacctgagctctcgaagctccctccaatacccccgccaccgccgccgccgccgccaccg

SEQ ID NO: 9592 - DNA, 3237 bp, Oryza sativa
ggcaaggcggcttcggtgccgtgtacaggggatacctgagagagcagggcctcgccgtcgccattaagaggtttgctaaggattcctccaagcaagggaagaaagagtataggtcggagatcaaggtgataagccggttgcgccaccgcaatctggtgcagctcattggctggtgccatggccgcgacgagctcctactcatctatgaactcgtccccaaccgcagcctcgacattcacctccatggcaatggcaccttcctaacatggccgatgaggttagtacctgttctctttaacttcatctaaacttcctttgtgatgttaaattaattggcgtgttaaactcagctaacttggtcttaacttgtcacagggttaagattgttcttgggcttggatcagcactattctatctccatgaggagtgggaacagtgtgtcgtgcaccgtgacatcaagccgagcaatgtcatgctggatgagtaattcaatgccaagctaggcgacttcgggcttgcaaggttcatcgaccatgccgtggggatgcagacgatgaccgccgtctctgggacaccaggctatgttgatcctgaatgcgtgatcaccggtagagcaagcttagagtctgatgtttatagcttcggcattgtcttattggaagtggcatgcggaaggaggccaatgagcctacaagataaccagaagaatggcatcttccggttggtcgagtgggcctgggacctgtacggacaaggagatgttgtctcagcggctgatgagcggctcaacggtgattacgacgtgtcagagatggagcgtgtcatcgttgtggggctttggtgtgcgcatccagacccaagcgcatgaccatctatccgagcagccatggccatgctccagtctagtgggcaattaccggtgttacctgctaagatgcctgtgccaacatatgcgccgccagtggcctcagtggaggggctcttcacatcgtccactggaatgtcgtcctcaagtgcagcacaatcatcatcgacgaccagtggctacatcactcacacctcgagttcctctaacacatccacttcagctggttcaaaggactcgtcttcgttgctcaaacatcaatacttatgatgttcaattcatttgctttgttactaattttgacttgatgcttgaatgggatgtacaactcgtgagccattgattttccatttagagtagtctaattgccaatgtgagtaatgcatgtgcatttatgccatgatttaaattttactcccattttagtttttctagatagatttatcctgccattttctcttcaatgtctgactactataaagtgcataccttgcatgttttaagtgaatatcctagtccttagagggctgaattgtcgaagttggaagaactttaaaatgaaaaaaaaaaccaccaagagaagagaactcttacatacttcacatagtttgcatgttttcacttttcagtgaataacgcaaaggtgtaaacaacatgaactaaatataataagctaaattcaatagagatggaacatggcctctacagactatagacaatagtacaaagactgcttattttcagtagttcttatgcaattgtctcaaatcgtggatatttatgttggatacttcggtggtggaatcaagaacatccaagcaaaattgttaacactacaaaatagtaccagcatagtagttcactcactatgacctgtagattttcagctggttgttttgccctgtttttcagcttttcaaccaaaaggttgttctccccaaatcttaacgaaaattcgggcagcgctctttgtcagcctggcaaaacaaataataataaattagacattcatgcaagaaacatgtcatccaggattgacaactctgctacctcacggatcgatcaagtcaaatttggaaataaaagagttggttatgataggttcagcaatgggtttgctgctgcaaaattctcaacagaatctgatagaacaacccattggaccctactccttccagaagaaaggaaagatctggaaacattatatgatggcacagtagctagtgacccattctctttcacattatgtccttagccatgatcaaacgcgcttggtcaaaccaaccagtaccaggatgattgacagaagagtaacgagaacgaattttgacaaagagaaacagctccagtgatttacgcattcgaaattaaaaactacaatagttacagcaatttttcatctataaaagtccatgcatagcctcttttgaatgtccaagttagctattcaacattgatgcaggattgtgcttacctaaaattaagttgaagcccttacattcttttgttgaagggacatcagaaaacgttaagaggctaaactaataaatacgaagatacccaaccttagaggaaagttagtgttggacaccaaattgggcatttatcacatctaaattatctcacgaaaaaacaatttttttcacattggacaaaacaaaaaaacagcagtactattgtgaccaatcaaccacaagcatttttcacattaagttgaggttatgaggtaacggatgcaaaaccctcatctagtcacctattggaagaggaagctccggtagggacagtcggcggcgatgcactgtcgcagcctagcgtcctccgccgggcggtgcagcatcgtcagagaatccgctctcaccgccggcgtgaagtgcctgacaaggtcccgccattttggaattaggatagttcccttccagacctagctagcagcaacaacacctgcggaggcgggaggcgtggaggagctacaggatacttcgccaaccggaacttgctcatcaccggagatctcggtcggcgcgcggccgacgaccagagctatgcggcagcggcggcgacgcggtagaatacgcttcagttgcggaaagaagaaaaagcttaaaccgaggatggctatagttgggccgtgcaacgtccggataacattttattggggaataagtccaccggaggcgagactttttgagatcccttaaccacaaaaccagaaatgtgtatccctaaactcacacaaaccgtgcactcaaggtcctatggcagtatatatgggtggtttcgctgacgtggcatcctagtcagcaaaaaaaattaaaaaagtacgtggagcccacatgctagctacacatttttttttcttctcttttctt

SEQ ID NO: 9593 - DNA, 22417 bp, Oryza sativa
gtgcgcgcggtccacggcaaaccgtgcggctgcacgtgggcccgccgccatccatccacccggtgcaccgctcttaagccacgcgcacccgaaaccctagcgcccgcccccgcgtgcgccgtttccaccgtgcaccgcctcaccgacaagcgggcccgctcgggaccccgcgaggtgagcccggtccacccggctccccttcccccccctctctccccgcgcccctctcttgggccgcctccccgtagcccgcgccggcctaataagctcggccgaaccgcgcaaatcttctcgggccgcgccaagccgctcgggaaagtctgattcctatccctccttccttttcttatccaaagggattactaaatccttttccctttttcataaatcaattccttattccaaaaattccatgaatcatttcctttggtcccgcacatcagtgaccatcaataatattcttgagaatattattccataaaccatttctcgtgttctagaaaaatccaataaatcatttccttgtccagaaattccagttaagattccaaaattcatatctctcgatccgttcattcgattgacttcgttccacttccagtatttccgtaaaattgagatctatttaatggcactattatttagtctaaataggatctttcttttggtcttttgtttaggtttttgattgtttgcgtatagttgcggttaccggattttcgtcgatcgcgggttttctcgaagattcgtgaagctccgtgaagaccttgagctaggcaagtcaccctttgaccaattgctcctataattggaaaatcattattattttgtttgcaacttgcattgttagaatcacacacttaacttgcttggcctcggtttgcgcgctaaaccgacggacctacccagtagtcgcactaattcctgtaggctgtactaccctgactccttgtcactccacctttgtggtacctcggtatccgtgctctctgagcgcgtataccaaatatcccacatacaccgttgtttgtcgaaaacttgggaaatgggtttgtaaagccttgaaaacccaacatgtggtgtagatgtgtttaaaaataaaatgaattgtgaaaactcgcgatgcgggggttgtgcctatgtggaactgtcccgtattcacatattaggaccgattcctatgggaaactcatcgagcataatcaaagtgcaaccacaaggtggaatgagacaccatggctaagtaactagtcggttcagggaaacctcgcatgccaatagttgggaacgccggggcggggttggttggagccaaaccaggttcctggtaagcaaggaagagaagcttgctgaattaccgatcgaggtggttggagtttgatttgtgaaaactaaaatggcctatatttatgtgaggatttgatccttctatgtggcatgaggtaaccctgagttggcttggaaaaggctttgtcgcgaacctctaacaccggccagtgtctggagtaagttcgtgtcttgtgggtaaagtgtacccctctgcagaggttaactaactgttcgaatagccgtacccacggtcatgggcggatgtgaggtggttcccgttgcgtagatttgtttgcctgtgctttgtgaaaagttgttgtggtgtgggaatcgtaaccagaatcagcctatgtggtagatggatgacctgagtggtcagaaacgaatctgtgtgattcgggatgtctacgggcatcatagactaggcttcccgagtggaagcggattgctttgctgctgggcagctggactctgggagtccgcaaaaacgaataaggctctgggagccgcttaatcaagtgaaatggctctgggagccgagaagtaatgatctgacccgggaggtcggtacattaccaattgagctgttgaaaagcatctcttaagtcgatttgagacgcaagtctcttttcgacccaaacttaaagagaaataaatcacttagtgatttcaaaatgatttcaaacaaaagatttgcaaaacaaccttgcctctcttccaagcttgcattaaacacctaagttcacgtgacttgctgagtacgaaagtactcacccttgctctatataaatatatatatagttcctccgccctgaagagaagataaagtgaagtgaagaatagggtttcgtcctagttcccagccgtcgcctgtggtgttgggtgttcgttcgttggttccgctgctattgctgttgttggtgtttcctcgtcagcgtcgtcggttgcattctcgggctgttctgagctgcaacctaagttaaggtaaataagtcctctatttatgttaaggatttgcaatgattcaaatttgtcaccgtgggtaccagcgctatgtcctgggactggtactgagatcgcggtttcgtaggaagcggttcgcgccgtttttcctacgacacgctccagtcaggtgccgttctacggcggtaccagattggggtgtgacactgatggcggtagacggcgcggtaggagggtgcgttgtggttggccttatcgggttggttgtgcgctggtagcccgcgaggtccaaggatgtccacctcttatatttgttgtgcttgggcagttgcagcgtcgtaatagaatcggcgattgggagaaggagcggggagcctttgaggaccatcgctccttctcccgacggccactgcacgccgccccgtctgccgttgtgcctggaagggagatagaggagaaaagagaggataggggagagagacgaagagaggatagaggaggaagaagaatggccgggagagggaggagagagaagaggagggagtgagaatgacacgtaggacccacgtcggccacactatttttaattattatttttattgtcgtgggataaagactgagtcaaactagtcacgtaggcgccacgtcagctaaaaacatcgtccaaaccgccataagacctacattacaccggctttgacagttgagggacctgttgtatctgattttccggttgaaggatgaaaatcagattcgttgataaagttaaggaacctcaagtgaacttagtcctgcacaatataaactgattccggacaagcgcaaagaaccaaataagcccacaaatcgtaactaacactgggccatcagacccataacagttttgtatagaaaccgatcgcagagactcacccgatccaattgggcccattggaatttggatagaagccatcggtataggtggcaaaagtctaattagagtcccttaattgactgagtaaaaccagataaaataagaggaataagttcactttgggtccctctatttacgaaatcgtttaaatgaggtccctcggcggtatttagtccagttttgactgaggtggcgctccttttgactaggtctttgtccaaagtgttgttgacgtagcgtttatgtgacaattagattcgaaaaaataataaaacacgtgggacccacctgtcagtttcacacacaaataacaaaaaaaaattgtggacccacacgtcatgctcactacctcttctctctatccccctctctctctctctccctcttttctctctccagccggcgaagcagggagggcggctcttgccgacgccggagtccctgatgagcaggatcttgaagctgcactcgtgcccaccaccgccgctgctccccgcccccggtggcgcggcccacaacgccggccgttggtcgaaaattccccattccaaaaccccaatcgcgtcgaattgagtgaagccatgaacagtgtgggtgcagcgtccaggctaggtggcgagcctctgcagactgcaggccggcgcggcggtgcttgcccgctcctagtgccgcggtgccacctggcctgcacggctgtgcgcctgcgtgcagcagcccagctctaagccgagcaggcagcaacaccaacaagtcagcaagggcaaggcagcaaagcaactagcccgattcagcacaaatggatagaaaggggaaaggaaaggctttggcatcataaaaatgtaacatttgttgagtatttgacaaatgacaagtgaaaacattgcaatttgcaaaagtataatgaacaatttgtcattgattcacatgtctgtaattttctgtaattttgtttgtagatttgaagagctatttcactaggtagtccagtagttgccgagcagtatgctttcattccacagcgcggcggggggagaagtcgcacgacctcgacggcaccgtcgtcggcgggcccaacggcaacgacgtgttcaccgaccaccggggcgcgtacctacagacggaggcctgcacgtacaacacggcggccatggttggcgtcttctctaagctcatggaggtcgaagtcgagcgcgacgcctctgtccgctccgcttacgtcgccggcgacgcgcaggccgacctcaagaccctggtcgatggcctcgtcgccaacggcaacaccaacatcaaggtggacgccggcacgcacccgcagacggccacaggccacgggcggctcctctgctcccaacggtcggcgccccgcggccctccggccaccgccgcgctgcgacttctcccccgtcggccggccgctccgcccacaacgcgccgcttcacccctcgtctccgcccctctctgcctctgcccctctgctctgccgccgctccgccctgccgtcgcccactccggccgccgcccactccgctccgtcgttggagagagagatggatagagaggatagagagaggggagatagagagaagatggtggtgaggatgacgtgtgggcccacatgggcccacccatttttttattatttgcgtgtgaaactgatatgtgggtcccacgtgttttattattttttccgatctaattgccacataagcgtcacgtcaacgacatgttggacgaagacctggtcaaaaggaccttatttaaatggtttcgttaagttggggacccatcgtacctagttttgcgaacaggggatgaaaatcggactaggcgacaaataaatggatccaaagtgaacttattccaaaataagaagactccctcaactgctgatatgatatcggtttgtttttcctccctgtaacttttttttctggtgatttcatctgacatggcaccacgtagcttgacacgtggcagtggatcccataggttcatcatttttcctactcttttctctttctttctgccaaccttttcttactctgtacgcatatattacaattttacaagggggctcagcttaattatatacagtgtccaccttcattttcctacttggactctttatttgtctgaaataaaactccagcaactacatttcatttacaagtctaggagctcaagctaatatcgctgtgcgttgtcccatcctccatccgtatccatgactgaattgagaagggctgttcagatatctcaataacccttgctcctcttggccagttaccgtagccaccatagcctgtgtgtcgggcaaaacatagccagagtttctcgtgtgggcagcaccaatccaggccgtggttgtgaccaacgaaaattgcctgtaaaatgacaaccaatgatatatgttctctaacaaataaaaagtaagtgtcttctgaattttgacctgtgtatctaagttatctgaagggattcaggggataagaaattctgtatacatgtcaagaaatgttcagatgaaacaaaccttcactgaagccctcttgacaagggcatccatcataccccattcagcttcttgtggtgctacttcttccctgttgatagagccaacacagggttttcttatttcggacttagctttcggcgcaaccttggcatatgccgtacttggaatatgccaaaagattatctctggaatcctgtagaataattacacaacattaattttgagttgcagaagcttgaattttgagtatgtgcaaaattgatacaagtttctgaccttccatttggattaaggaactgagattgactatgaaaccactgaacctgagcactggatatcacttctggataggatccaccaccggagtcaaggaaatacatgagcagagctggatcatctcgcttctgtgatagcacctgcaagacgtagttggaaacagcaggccagaggtccttggggccatttgatgaatatgacaatccattacggataacctcacttgtcatcagttcaagtcgcggtgttcctcggaagctgcagtctgcacatcaagttaaaaacatggttttcttgaaaagttcaaatgaatgattacttttgtttgaaagcatacagtggttgccttctttcttttccttttcttttttctgcgctgaagttcagtgactgaactgaaacaaattcagaaatgaactatcttaagtttacctgaatctgacatgctcggtggtgggcaatgcagcggcggaacgcctgcaggagagaaccactcaggaggccactcgaacggcatgtcgtcgtggttcccgaacaccgtcgcccacgggatccccctgcctctggtcggagaaatcgctctgtcccagtacaggctcgcgttggggatccctagattgttcgcggtcacgaggtcgccgaggtacaccacgaagtctgcgaattccgggagatttcagcgaaaagaactcgcaattttacatttcaggcgaggggacgccgcacgcaccgggcttctcggcgtcgaggacggcggccatgacgcggtcggagccggcgtcctgccgtgggccccagtccgtccaggcgttctcgccgtaatgcaggtcggcgaagagcgccaccttgaaccctcctcccgacgcgaactgcagcggccggcggctgctgctgctggccgtggtgtcagggcgccggtgctccgccaccgccagagcaagcgcggcgcagagggcggcgagcagtgcgccggccgccgccaggcgacgccagcaccgcatcccggcgtacgtgctccgacggttcagtcaatcggagtcggacgcgtgacggatctccggcgacggcggtggcagaagcgtgccggagcagatgctggtggctgcaaatgatgggtagagctgcgattaacgtcagtacgtcactgctgcttgtgcattgattgatgggtcactgtccacaaaagagtaaagacgcggcgctttatttcgttgcgttacgctgattgttagcgtaaatataaataaagtggacacaagataatgggacagtcacgttacgccgaatcatgtcattcatccagaagcagagagagagagagagagagagtatatgcggcgaggagctcaggtagcaagcaagaatatgctctccgaagatggattttaataaaagatgagtaagttgtcgtggctagaaaatgcatctcgacttgtttaatactccctccatactcgtaaagagatcgtttagtacaatatttaagtcaaaccttaaaaatataggtcgaatctaatttatacccctcaaccacaaaacaggatatgacgactcctcaaactattaaaactagtgcaatttgactttctcagcggttttgctgacgtgacgctaatgtggcagtgttgacatggtgttcgtctcacgtggcgcttatgtgatattagaattaaaagaatatctgtgagatccatctgtcatttacacacgcaaaaatatattgtggggtacgaattagattcggcctattttaatgggaatcaaagtggactttttctgttacggaaatgctatataccagtataccgttggacgggatacccttcgtccacctttcccatccaaataggaacgaggctgagcacctaagccgtgaggaggaggtggccatcggcgcctaagccgtgagaaggtggccatcggcgactccggcgcaggctgggaataagacccgctcggggagaagaggacgtggccaccggagacgcggccgccggcaacatggtcgttggattgccgcctggtgctccatccgcgtggccggccggtgcgctctccgccggtgccccaactccatcaccggcgacgtggccatcggcgacgtggccatcggcgacgtggtcgccggatttgccgccgggagctccagcaccgttgcctgccaaccaccacgccgccgttaacgcccacccttggctccatctgcgtggccggccggtccgccctccgccggcgccccaactccgttgcgggccctctccggtcggcgccttcgtcgccggccgtcgatcccgctgtgagtccgggccttcatcctatccatctgctactttgggggagaaaagagacaagacgggggtgcaaagaacttgttaatttggtcatggctggctgtggagtgtggtagaatcatcttctacgtggtaagaattgcatgatacatgagttaagtatcaggacctgatacatcgcaagcatcacccaccacgtgataagaatcgcatgatacctcataggtatcatctgatacctcgcaagtatcatctgatatgtggtagaaacacaagtatcacacgatcctactaaagtatcatctgtgaaacccataggatcttgttactagatatgatacctatgtagtgtcatgcggtactgcataggtatcacacataatgatacttttgaggagtatcatgtgatcctcctaggatatcatttgtgcaaactaatgataccaaacatgatacagatgaggatcatgatacctctcaggtatcacatgatcctcccaaagtatcacctatgaaacctggtgaaaccgaacatgatactaaggaggatcatgatacctcccaggtttaacatgatcctactcaagtatcacttgatacctcgcaactattatcttctacgtggtaagaatcgtatgataccttatatgtatcacctgataattagctggtatcaggtgatacctaccaggtatcatgcgattctaccacgtatcaggtatcagacgattcctatcacgtatcaggcgatactcgtgaggtatcatgtgatacctatcaggtatcgtgtgatttctacgacgtatcggggtgatacttgtgaggtatcatattcatatgatacctactagataccaggagctgggtgtcgaggtgtcgaggcatcgtcgccggcggccgcgtcctcccccatccacgctccacactgaacccgaacctcgtcgccggcagccgcatcctcccccgtccacggtccacatcggagctcgtcgccagcgaccgtgtcctccgtcgggagctcgtcaccggcagacgcgtccgtcgtccacgcctcagccggcggccgcgtcctccacgccggaggtcgtccgcgccgtttgcgtccgcgccgccggcgttagccgcatctgtgctactcccacatctcgcttggcgccatggcctgcgctctcgcgtctgagggaggtggacatggagcgatcctgttgggacagtatcccaacgagataccggtatatagcagcctcctttctgttaacttacgagtctggctatgggagcccacaggctatttgtctctaatgctcaaagcgagagagtctcagccttgctacatgcaaaggatacgtgtgtaacaatgtaccaacactgtaacacatcgatgaagaggtttggtcagaaaaaaatggacaccaaaccgagtcctaattgcaatgagattcaggtgcaacgtaaggcagaaaccaagagctgctgcagccgggaacatatacgaagccgcaccccggcgtcgccgtcggcaggcgatactcccgaggatgcccgtcgtagtactcgaaggacacgaacggccgagcgaagtagaggtggttgcgcagcgcgtcacggccgcctcgcgtcgacacgcacaggctgcggccgccgatccccaccaggatggccacctcgccgagatcctccacggggagccacctcccctcctcgcgctcctcgtagcgggacacctcgtaccgccgggacccgcggaggtagccgtgtcgcgcatggtcttcgtcgtccatggcgccgacgctgctcaccatgagcaggtcgccgccgccgagcgactccacgagtgcggcccacgtgcacttctccggcctcggctccgtgacgcgcgtcgcgtgcaggccgctcgagctcgcgtccggcgcccaggcggtcaccgcggcctcgcggctcgccgtgtagaacgcgcccttgtggtagacgacgtcgacgtacttgtgctgcatccatttcgggaaccacagcgccgtccacgacttggcgccgggccggaggaacgacaggccgttcccgccgccgtggatcagcatcacggcgaaggtgccgacacggcggccgggaaccagctccgccttctggaacatggactcgcccatctggtcgaggtccctggccaccttcttgctgccggacgaggtgatgggaggcagcgggaacgccctgcggtgacggcctcgagcagggacaggccgcactcctcgtcgacggtgacgagccagccgtgggaggacccgatgatgcgggtcactggcgcggcgccgccgtcgctggggatgcggacgattcgttcgcgggtgaggcggagaggacagagctcgatgccattgctccactggtctagtctcacgctgtacgggcggctcggttgttcgagtgtgcggaggcgcgtggttttcagggcgcggcgccacggccggcagacggcggagcacacgacgttgtcgaggggtccggcgcggcgggcgatgtcgtcgagcgcttcaggtggcaggtcagagaagcagacgggcgccatggtgtttggaggtgcagatgtgtaacgacaattcagtgtttagccagcgattgtgatgacgtggtgttcggtgtttatcgttcattcatctgtgttaagatggtgattctacgagattatctctacaaccaacggccaaatatacgtatctgtgataagatggtgattctacgagataatctctacaaccaacggccaaatatacgtagacgttattacttcattttcccccaacgaagctgataaaggatcgatccaatattcccgtgctcgatcgtgccttcgtggcatgtacggaagtatcgtgcaatttggaacggaatactacaggcactttctgtatatttatatgaggtgtccatgaattttgagaggcgaatttgcacaaattcgaaacaaacctgacttgtatttgaagtgcaacttttttgaaagaaaaactttagtttatatccagctttgaagggctaacatattggaagcatctctgcaaaccaaatcagctccttgctattttcttttcagtaaaaggcaacgtacccattaacgacgagacacccgactaacttatagaaattgtatttcaacttgcatatatgtggagtgatatactatattttttttaaaaaaaacataaccatttttttaatatacagtaaacgagtggacatcaatcggttaattagaaaccatctatatatgtgcggacttacccataacaagtaatcctgcggtggtagaacaagccaatttttttatacgaatctagactatttaaatttgtgtaaacaataatttattttgagacagagagagtaaagtagacacgttagtcggtgattcaaaaatacacattaaacatagccgggtctaataccaatggaattcaggtgcaacataaggcgcaaaccaagagccgccgtaatgcggcacaatcaggtaagtacaacccggcgtcgccgtcggcaggcgatactcgtcagggtggaagcagtagtatttgcctgattcgtaggacggccatgcgaaaaagaggcggttgcgcaaatcgtcgtggaagcctcgcgtcgacacgcacaagctgcagctgcttcccaccaagatggcagcctcgccgagatcctccacggggagccacgacgacgtcccctcgcgctcgccgtcgtagcgcgacaccgcgtaccgccggcgcggtagccggtaccattggccatgcgcggcaaagccttcttccacgacgaagctgctcaccatgagcaggtcgtcgccgccgaccgactccacgagggcggcccacgtgcactcctgcgtcggctccgagacgcgccccgcgtgcaggccgctggagctcgcgtccggcgcccaggcggccacctcgccgtcgcggctggcagtgtagaacgcaccgcggtggaacacgatgtccgtgtacttgtgctgcatccgtttcggcacgcgcaccgccgtccacgatttggcatcgggccggaggaacgacaggccgaacccgccgccgtggatcagcatcacggcgaacgcgcccagccggcggccgggagccaacgtcgccttgtagaacatggactggtcgagctccttggccaccttcttgctgccggacgaagtgatgggaggcagcgggaacaccctgccggtgaaggcctcgagcagggacaggccgcactccttgtcgacggtgacgagccagccatgggaggacccgatgatgcgggttggtagcttgtcgccgccgtcaaccatggcgatggggacatagatggttgattcactgctgcagccgaggcgaacggccaggcagagactgatggtgccgttcctccacttgtctagtctcacgctgtacgggcggctaggtcgtttgagtaggcggaggcgcgtggttttcagggcgcggcgccatggccggcagacggcggagcagacgacgttgttgagggcgccagcgcggcgggcgatgtcgtcgagagcttcaggtggcagatcggagaagctgacatgcgccattgttggcgatggaaatgtaacaactatacagtgtttatccagcgatagtgaaggagcgatcctcggtgtttatggttcgttcctctgtttaagatgctgattctacgagattatctctataacaaacagccaaatatagacttacttgacttgcccccaacgaaactgattaaattaagatccatcttccattagcccaatcttccagtgttcgtgacatccatccattcagtctgtactgggaaacaaataacgttttgcagattgtatagaaggtgtccatgcattctgagcggcaaatttgcacaaagttgaaactaccagatttgtatttgaaatcaagaaaacaaaatattgatttgtctagtttcgaagatctaacgttttcttgagaaagtacacagaggtaccatattaagtaccttaaggtacaaaaaattctagcctaaaatttagatacctcaaaatattttctaaagtagtgtaaaatttctctttctgcaagtcaaaaccgttgtagacttctgctcttggacagggtcggccctggggcagcgcggaaggtctgggccctagggcagcgcggaaggtgtgactgtattgggcctccaaaatatgtatacaatgatatcactgtatcaggcctgataggtttagagaaaagatagaagaccgatcgacgatcgagtatatcgtgactgtttgattgtattttaaatttattagtgtgaaattcgttaatgacatgagttttaaaatattatcttgtttttttatgatgaatggggatcttcattttttgttttgcaccgggccaccaaaaagtcagggccggccctgctcttggatatagagtgtccctctcaacttttatctctctttaactatattggaaggctgttgctgcaattacacatgtaaatgagaagaaacaacttgtttggcaatttgagggaatagatttaggagtttagacgagagaattaatgatgatattaacatgaaaatttgattaagagtttagataggagaattgacagtgatattaaccgtgtcgattctaagatttgagtcgtgtataaataggttccaccacaagaattataaccagttgagatacgttcgcttcgtaataacatatgtgactataataagtcaaacaagttatgtatgcatcactttagctgaaactgctaacactactgtagaggaacattaagctaaggaaaacggggcctgattgcaacggaattcagttggaagccatatcccgccgacgccgtcggcagcgagtaggcggtagggtggccgagcgaagtagaggtggttgcgcaacgcgtcgcgggagcctcgcgtcgacacgctcaagctgcagctgctccccaccaagatggccgcctccccgaggtcctccacggcgagccacgccccctcgcgctcgtgcaaccgagacaccatgagcaggtcgccgccgccgatcgacaccacgagggagacctacgcgcactcctgcctcggctccgagacgcgtccggcgtccaggcgctcacctcggcgtcgcggctgaccgtgtagaacgcgccctggtggaacacgacgtcgacgaacttttgcttcatccatttcgggacgcgcaccgccgtccagcatttggcgcctggacggaggaacgacatgccgaacccgccgccgtggatcagcatcacggcgaaggtgcccagccggtggccgggaaccagctcggccttctggaacatggactcgcccatctggtcgaggtccttggccaccttcttgctaccggacgaagtgatgggaggcagcgggtacaacctgccggtgacggcctcgagcagggacaggccgccgtcctcgtcgacggtgacgagccagccgtgggaagaaccgacgatgcgggttactggcgcggcgccgtcgtggttggcgatgcggacggttcgttcgccgttgatgcagcggcggatgggatgaagctcgatgctgccgcaccacagctctaggttgacgctatacggccggttcggttgcttcagtagcccgaggcgcgtggttttcagggcgcgccgccatggcctgcagacggcggagcacacgacgttgttgagggcgccggcgcggcgggcgatgtcgtcgagggcttcaggtggcaggtcggagaagcagacgggcggcgccatggttgatagatttggttggcgttgcaaatgtgtacagtttggtttaccggctaattccactgtttaataaggaggtgattctacgagataatctctgccaccagcaaccaaatatggactttaacttgacttgcccccaacgaaaccgataagaggaatttttacagtactttgagaaagtactaaattttacgctacattcttaaggatgataaaattaaccaacatttaaacctcgatttggcccagcgacacaagaacgaaagtgaaaaccacaacactcgccgtcagagttaagaacatcatcagttgggcacttgcatatgaagtcaaatatttagtttctgtccagttttgaatatttaacgtttgaaatctcgatttggcccagcgacccaagaacgtgaaaaccacaacgcgataaaaatccttgaaaaatttctctgggtaactaaaatcccttgaaatttctgaaatttaagtacacggttttcaaatttgtcatcacttcacctgcgagaaacagcggagggcacaaaccaaacaggatggccgccggcggcgcgccgaaacaccgacatcctggacgccacccccgtcttgacatcgcacacgccgctctcgtaccgcgagcatcccttctcctcctcctcgaaatccgccgcgaacgacttgaccacgtagtacacgcagttgggcttcaggcacgggtactcccgcgtcgacacgcactcgccgtggttgatccccaccagcactgcggcgtcgccgacgtcgtcccgggagcgccactcgcccttgtcctcgtccacgtcgaacaccttgaaccgccgcgcccgcagcgcgttgctgtcgtcgaggatggccacggtgctcaccaccagtagccccccgccgccgtccgcctgcttggccaggtacctcgcgccctcgtagaacgccggctggtggaacgtgtcgctgtggaattccaccagccgcttgaactcccacctcatgaccggccccgtcacgagccgtggcttcagggcgcggccgtccggctcccacgcctccacggcgccgtcgccgcgggtgagcgtgtagaacgcgccgttgtgccagatgacgtccgcgtaccgcgtcaatgcctgggtgggcagcgacgtccagcggtcgtcgccggacctcgcgaatgccagcccggagccgccgctgtggcttaccatcacggcggcgtagctctccttccggtggctccccggggcgatggccgccttctggaagaactcatcgcgcatcgactggaccggcaccaatttgggaggcttccactcgatcttgcgatggccttggagatggtggtgataggcgtgattgtccaccgcgaagtattccgggacgccgtcgccgtcgccaccgacggccgtgacgaagtactcgcagtcgaacgacgtgacgggcggcaggggtacctgcgcgccgtcggtgaagggctcgaggagggaggcgcggcacgcctcgtccacgacgacgagccagccgtgggagcagccgatgatgcggtgggggcgcgcgccgccgctgccgaggtacgccgtcttgacgacgtcgccgtggcgggaggagaagtcgacggcgttggcgccggagcagagcgccacaaggtggagggagtggcggctgaggcgagggcccgccgcgctcgccgcgcgccgccacgacttgcagacggcggcaaacacggcgcggtcgtcgccatggacgcgctgggagatgtcctcgaggatcaccggcagaaggtcggaccagtcgacgagtgcggcgatgccgtccgccgccgccaccgccattatcgcgagttcaccgcgcgccgcgtaccttcacttcacatttaagataagatcgcggcgcgagaatcgaggatgaaatttgaggtcgttcgcttcgcagttaaaatcgcggcctcaacgtggatggaatttgaagacgcaacggatggatttttttggtaacggtcacaaagaaggcaagtcatctagggcctatttggttctctaccctaccaattaattggtagtaccaaaatctaggcaaattttggcactaccaatttcttggtagagcaaagttagctaatctatgtttggtttaataccaatataaagccaaaatttagtatgagagtgaagaagattttagaatgtagccaaattgagcgtgggcactaccaattgtttggcttcaatccaaactagcatgtttactattaaagttatcaaaattttggtagggtcacgttttggcttcaatccaaaacgacccctaatcttgtggaatttgatatattctgtacaacgtctcaaagccgttccatacgtgatacaggttgatgctaaaagttgccatgttttggttccgtatatcagaagctgaaaatttggactagcttgtcaaagccatagtaataatctggaagcaggggcggacgtgcccattaggcggcatggggcgacggccggcccagctatggcccgcgccgccccaccccggcccataccacagttttgctttctcgctaccgcatcgttgcgccaacgcttcgtcttcgcacaaggaccgcgactccgcacaccgtctcgcacttgctcgctaccgccgtcccgcactgccacaccggccaccggcgcacgcgacgatgacgcctagctgccgcccggcgccgagcgacggccgatgactggcccgatgccgctcgcagccggcggccagcagctctctcctcctcgtctcctcctcgcctctcgagcctcctcctgctcggcgccaacgcaacgccgtcgctgtcagcccgaccatcgtcgcctcacgtctgctccggccgacccgctccttggcctggccggcactccgcagcacgggcacaacagcaactagcaggctgcaagctagcgcctagccgcctggcgctagcgagtcagcaacctcagtggtaagccggtaggggcagtagtagcagttggaccattttaatcaaatcatcctcttccttggaccattttattgtagtcaagtaacaaagcaaatttgattgttcttcttgcaaatgatctgttgctgtctagattagttaatcatctgtttaggataatggaaatagttggtactcctagttaacactgttctactgcatgttatttactgtaaaaatggaaggcatgcgcagttacttgcaatcttgcatattaattatttacttgtcctactgcatcttttggtgtatgattaattatatatgacgcaaatattatttctttgtcataaaatggttttgttcgcctcgagtatatctttatgcgattacggtataaatatggtatttgttgcatttaggtgtctttataaagacaacattttcactccatcttatttttaatcttgcgtccgccactgtctggaagtaagcccattgatctgaataaaaagaaataaaaacaacataagtataaattaggaatagtacaaatcgcaggcacacgatgaaaaatacacaatactgacacaataacaaacgtatacacccctctatctccaggctcgtgctatacatgttgacctctcctcgcgttcacaaccaattactgtacagatacgcatacagaagtagtcagcacgtagcacggccgcatacatatgtttcgaccaaccgatggtatgttcagacccgacgggaattctctgcattaccgctgatataggatgagccactattatataggatcaaactactggctgccgctcgtaattgctactgtaccaacagcactgcagaggatccgtgtccgtgtcaaatacgggcatggaagctaatggggtagaccctatcggtgctggggtagaagaggccccaattctgctccacgccggcctccttgaggttctcgttgaacatggcgaacacgtacgtctccgtcttcttcccgggatgccgcggcgtgccattccggacgtgcctcaccaggttctggttgaatgtcatggcgttctccaccgacgcgcccacgccgcccgccgtcggccacccggtctcagacaccaccaccctcacgttctctcccccgagcttcgccaccgccgtgtacagcgcgtccaccgtcgcgtcgaactggttctggtacccgtactccccgtcctgcaccaccgcgccgctcgccgtgaacagcgcgaagctgatgtccatgccccccgggttgtatgagtagatgaagtatgggtacaggttggccagcagcggcgcgtgcgtccgttccaggaatgggatcacgtagctcatgaacggcttcgcctcgtcggtgaactcgccggcggacggcgggatgtggacgccgatggtggcctgggagatcgacgtcgtcaccttgatgtgtcccagcccggccgccgcgagcgcggcgtggacgttctccatggccgggacgaggagctgcgtgtcggcgccggcgacctcgttgcccacgacgacgaaccggaacaggaccgtcgggtaggcctggatgttctcgcggatccaggcggccgcggcggcggtcccgccgtgcgccagggcggggaggtcgtagttgggcgcgccgacgacgacgcggatgcccgtgccgccgagcgccgcgagcgcggcgctgtccggcgcgtagaggcgcacgacggtgaagccgttctcgcggagcatctcggtgaccttgctcgccggcggcaggttgtcgccgctcatgccccagcatactccaaccgctgccgttcctgtctcagattccatttcaacctttgtcaaattaaagcttaagcttctgatttgattttttttgcagtatacgtaggttaatcgctaccgcattttatagtaacccgaactttaatttgtaggcacgcaagcaagaaattaacgtaacgtaggtacgtatgtagcttgcaaagacgcaatgacaaacaaaatcgagaaggcaatcatatatacaccgtacattagcatgcgtggaaggatccctcttgaactttattgctggaattgccgttgtgttgccaacaattaaaatggcactccctccagtcgtcagggatgatcaaacttttaaaaattatagcagtcaatttatattagagtaagtttattaaaacctaacaaatctatatatttgataatgtttttcaagtcaaatcaatttgtactgtttttttaactaagtatttgagaaattgttgacggttgaaattttaatatttgagttcatgtttcgtagaagatgagatgagatggttgaggagcacagacagtgagatcagaccggaaggaccggcaaggagtcaatccaaacctcgttcgacaaattgacttcagcgacatctcggaagaataatttagactcatggaaactgacgtttaactgaaaacgaagatgtagtagtacaactgcactagcacagattcctaatttccgtcgttttttttcccaatcgtaagtgctctctgatggtactcgcaactaacttatgttcgttaaaaacatgcacctaatcgagttagttgacggcaattctgccaaagtgctttacatacattcagagtttcagactcagatacttagtccgtcgagcaccagttaaataaacaaatcaggtggtggagcgtgcaatttgccgaaatttgttagctaccaaagcagagcatgcagttcttgactaattaaagtttcatgcatactagtagcattattatttgtccatatcttacatgtacagacgaactaactaacctctgttctttagaaaggaaaagaaaaaaaaacaataaccaaacaatctggttcacaaaatcacaacctagcaaatttgcccatgcaaacaaagtagctgtcaggtagaaagcgaaggaccacgtacgggaaatggaattgaaaacgtctgttccaacgtctgcagcacgactgttggacagtccaattcgttcgcatgcatgcaggcatgcaaccgtgtccatttcgatagctaacaggattacaggactgcaccagcctgcccgtgatcacggccggcctcgccggtcgcgcttgtttgttaatcaagtgcagaaaagccaaacgatgcaaagaaacttccttttcggcttatggactaatggattgtcaccggcagtcatggtacactttctaagcctctaaacgatgtactccaaaaattttcttcaccagcctttgttagaaacaatttttaaatcaacttttaaattttctaatatttaattactctcaaataactgttacgaactcagtttgtgctatcatccatcaaagggatcgggctgagttctttctccaattttcttaactcatctcccttatttttcacgcgcacgttttttaaattgctaaacggtacgttttttataaaaattttctatatgaaagttgctttaaaaaatcatattaatcgatttttcaaaaaaatgctaatatttaattaatcatgtactaaactgctccattttacgtacgtggaacgaacacagcctagtccatagattttgggcaaatgagttactgacaagctggtacgtgcgtactttcacctctcctgaaggaatcgtaatctagcgtgcagtagtgctggtaaactatcacacatcatgcatcttaatgacgcccctaaaaccaattaattttctaacagaatctagctttgtggtaccatactagtttcttaatacagtagtatgcgtaatcgtgcacgaatttcacaggaacggtgagaattttcccgtgtttcatcaaaccaaacgtttgcattgtatatttccatgcatagcgttcatgctgaagaaagagatgcgtccttgaatctacgctcgattgcttacatgttttgttttcttaccgtgttaccgtttcactaaatgagtatctcgcgtaacgcttgtcatgtagtactaatgtgcaagatagtaactccactacttgaaatcaacaaactcactcgtacgttcggcaatggcttgcacaccaatttcaactttttcacggcacaactcttcacataggacaataaacttttcgcattgcaagctaatacaaaaaacacaagaactaaacagaagcagagtatgctagaagaaaagcaggggaacaaaatcagtgagagagttctgtacctgctaggatggaggcaaagactgcaagtagcaacgccatgtcgagcatggaagcagctgaagacgccattctcaagctcgactcaacctgtgacatctgacctgttgttgcttcttgcagagcctaacggccacgagcagaagcgctactactcccggcttatat

SEQ ID NO: 9594 - DNA, 1621 bp, Oryza sativa
ccggtggcggtgcgcccttgggttccagcgacgagctgaagtaccatgaacgcagctgatgcagctcgacggatgtggacgtcggggcggagaagccgacggcgacctgctccggcaacacgcttttgaggtcaaccttgtagctaaggttgtaatccggccggtgacgggggccactaagcccatagccgaggtgcagcctcatggccaggatgctggagacgttgtcgtactcgacgacggcggtcatgttcccgacgagggtgaagctgggcaaggtcaaggtcgtcttggacacgacggagttgacgtcgacgccgaggtggtcgtaggtggcgtcggggtcgtgcacgatggtgtcgttgaaggtgtcgaactccacggcgacgaaccggtcgtcgccggcggccacctggtcgcggtctggttggtgaggccgaggttgtaggggtaggagccggggagcctcgacgggaagccggcgaggaagaaggccatgccggcgcccttgttgtcgatgccgccgtcctgtttgggcgggttgatgacgaaggagaagccggtggtgaagctggcaacctcgccggtggcggcgtcccagagagggaccggaagggcgtacgacaccctgccacggctgtcttcgatgctgccgtgcctgttggcgctgatgtcgacccacccgccgccgtcgccgctgaaggagaagtcggcgctgaaggcggcgtcgccttccagcctgatgttcgtctgctcgtccgggccgaagttggtgtggttgaaggtcaaggccaaggcgactggagccggcgagtagagatcgtcgcagaagacggagaagaagaagatgaggccgacaatattgtacctcgtggtggtcgtcgacgatgtgatctgcaaaacgccggccatcgatggccgccgtgttgtgttccctccccgttgattgatcgagtcaatgcgtacactgtttgcagtggcagtagtgtggagacatgatgatgaattttagaagaaaggtaagggtggcccatcaggaaagcacatggatacttccttttccttcttcgttccacacgtgcgacagcctgtgaataactaacaactggacgaacgagtatgcgaaactgtataagggaacatggttaacgattcggttgcgcaggagaaaaaaaaaagaaaaaggagaaaagaattccatgtcatcgtccatgtggcgtgtcacataggcaagaccacggtcaaacgcggctttgaaccgagatgatacagtaaaccaagtttagagatctcgatgtgcacttagcaagttcgtaaacctgagtgaaacctcctaactagtttaagaactgctggtgtattttattttttttatggtgcgcccaaacttctcaaaattgtgactgaaaattaaccattgcctccatgaacattggtttgattaattttctagacttcgaggaatataatgagcctatgctgatgttgattttaagcacgtgcactggtttcgttctaacgacacaaagttataaaaatcctttgaataattgatagtataaattattgttgtcctctacctttaaaaaattatactaccgtataaagttaggcaccgata

SEQ ID NO: 9595 - DNA, 13628 bp, Oryza sativa
ggtgttggcgacggcgtttctcctttaagttcagctaattccttctgtagacggtacaccttgctctccaacttgcaaatcttgcctcgattccagttttccctgtcatgagctgctttgtctcgctccacacttactgcatccatagcactaagcatatgcaccgcatgcatcagagtggcactttcttcatcatcaggacaggtataggttccatagtcttgaccatgaggtttgtgaggatgatactggaaagctgatgaatccaactcttcttcaaaacgttgacgcaactctccaatggccaccaaagctgcttcttgacaagcatggctgtacgatcttcctccagcttcgaacttaatggacggaaggtcttcacgatcactagccaacgtcacacgaacacgacacttctcctcgttggggtcatgggaaatctggcgatactcgggagcaacttcatagcctacctcaaaagccatcaacctcagctccctgacgaatcctaacacctcgatcaaatttctcggtgaatggggcggcatctaaagaaacatagaagagaagaattaaagcattctttaagttagctgcaccatctagacttaactgatttttgaccaaaaaggtagaaaataatagaaaagacacatacaaagctattttataaatatatttttagaatttaactttttggacagggacaaataaattttttttgacaaataacaaaaataaaactaaaatacttatgatctattataagcacggtacagtgtcaccataagaaagatgagtagtactagtgctatcatgattgtatcgataccataataaatgtacagtgccgactaatcaataagatttggtgaagtgaaaaaaaaacattttgagaagaataactttttgcttttaaaagaaaagaaattgaattaaataaattttgtgcataaccttgcatgtgctgccaacttaattaatttataagagaatagagaagagcagttctatttttttcaaaatattttgaaggctacttaaggtttaccatttggcttatcctaaggtcaaggtggctctaataccaacttgtcacgcccggaatttctatccaaaattccaaacgcttacatgtgtgttaaaccctcgtccaggaattaaccgaggcacacaatgacaaattaataatagagtactatttaatattcgcaaataaaaagattacagaggtagatagttcctctcaaaaaaaaacattctacgcagcggaaaaataaaactataacaaactacggaacagctatggctactccactccacaggcatcttaaccaagaacaagcctaatcctccagatcatcactttcactgagatactcctcttctgatgaatgaatattgcaagaatgagcatatgacatactcaacaagtcacacagcaaatatgcatgtgcacaggataacaaaggatggcataatatagctcatttgcagaaaacagcatttaataaatatttaagagaatagtaaaacagttgaataattaatcaatattaaataacaccatacaacacacccatgttgcataggcccaaccacatttgaacaaccaaccccagttgaacaaattaaatctccaaaccaggaattacccattccaaaccaggaatcaaattaattatcacattattaacattgatgagtagtgtgagactaatcacgaaaaacattgctcaactcacccataaccgcgggtacggctattcgaatagtttaaactctgatcagaggtgtaccactgtacccacaagacacaaccccacatcatgtcaccatgtgcctcaataccaccacggtacctcggaaaggagtcgtgacaatacccctcgcacaacataacccattacagcgcacctttcctggatcataatcacccccttataaacaaggcatggactccccagcgacccccatggacttctcgccacttctcagtctggcgcactataatgaatcacgctatacaaaagataaagccgttgcccacgctagcttgtggttggcacgataaatgtttcacaacagtagctcgcgaaccggtccttaaatgtcatgagcacaaccatcaaaaccatatgctcacaacccaccttaaccaggttttaattaccaattaattaacatcacacgattaaccatcgtgaaccaccattgaatataaccatcattaataataataataataatataatataatttatatttaacccctttagttagctaatgtttctaagcatggctaagcaaacttacatatagcatttagctgaaccaatccaatatataaggttcacgctaatcaaattataacccataggaaaataaagtcatcttcggccattatttaattgggaaaggttcaccacccgatgtcattcaaaaacaatgcatagttgaaataaaataatagctttaaacgggttcaacatgctcaaagggttgtttgggatctatgtgacttgccttgggcttccgcaaacgcttcggaaccttcctcaaaggaaacgctctcctccggaacgtcggaaactaaagcaattaaacaaaaatcaacaaaacagtacaaaaacaagcataaacagtacatgtggatatttttaacatgtagatcttgattttagaaaaatttagcaacttgaaccacctgaaacggatctacggttatttagttatgattttccgaagttttaatctattagaaaatcgggaaaaagataaactgatgacatcagcatgacgtcatcaatggccggccggctcggatggcgacctcgccggagctagggcggtcggccggggatttggaggacatgtacacgtagaggatgacgagacgaacccaacggtactcaccctcgagcctaacgacgaacgacgacggccggcgacgagaaggacggcggcggcggctcggtcgggcggcggtgaaggggctccggtggccggcgacaaagaagaatgggcggccgggcttcctcacctccgggcacacctaacggcggcgacggcaagcggcggcgacggcggagacggcgcggcggcgtggccgaagacggccggcggcggcggcgagctaggcgcgcgcggcggcggcgctacggagcacgggagaggacgggagttggggcaaacgaaagagggcgacgagctgatcctatatatagccttggattgaagagatcggactcctcccgtgagaaatcgactcgggaaatcaaaaactcggttttggagataaactcgaaaacgagtttgattcggataaaatacccaacgatttgctccgattcttggggggaaaggtagaggagaacgagaggatcaaaaccccccaaaaaaacgaaagaaacggggtcggattagagcggatttgagaggagaagggggctcggtcgggctcggcatggcagccggccggaggttgaagatgaccccgacaggtggggtccacctgtcggcggctggggaggggagggcggctcggcggctgctgggccggcttgggccggcttgcccgcgggagagaggagagatgttgggccaaaaacggcccaacggtttaaaggaggggttttagaacttttcaataaaaataatttgtgaactattgtttcatttgttaaaaatacttcccttgctcaaataattcccagaaaattctagaaaatagaggagcaagtatagtatttaataaaattttatctagctcatttttatgttgaaaattttcctataaaattagggtttagcttgtaggcttttaatttaatttctaaaaatgatttaaacaatgcattttaaatttaggcgatttttagggcgtgacagtatacagacggaagacgtgacatagtttccaacccatcctagccatagacaaaagtaccgacccaatcccacctacggccggaacccccgggacaggtaggcaggactgagcccctagcagcaggacaccggccctgtgccatgacatctcgactaccgggccgcagctcgtgtagccttcatttgtcctagagatgtccatcgacccccgacttcttccatctccatccgtgtacttttgtttataaccagactgagccacaaactaagccttacccactagacatgtggaagtacggtagtgctttgcaacagaggcccgaagactggtccttatatggccgaggtgctactatcaaaaccatgcaccccgagcccagcctaaaaccattttggggattttgaatagagggggaggtgtgaatccaattccacaataatccaacaattccatagtgtccaggtgatatgaatattcccaaagtctagagttgtaaaaccacctaatgttacctagttaaatagcgaagcatctacctaaaatcatactagtggtaccatgagtagagtgtccactagttggggttttgtttaatctagggtgaacaaggtaataataacaataacaataataaggtcataacaaaggtaaataggcatggctagataaaacagtgataacgcgggaattttaaataaagcgataatgcaataatttaaagcaacataattttataaactgggattcaatatgttcaaagatcatgtgacttgccttgctcgctttcccaaacgtcggcttcaacctccacgaagagcggatcttccgaagctgcagcgtctacacgaccaacggaaaagaaaaggcttttactctaataaactccatataacaagcagaaacaaagcaaaaaaatgggttcttgacttcttaaggaaaaattagagacttgaacggtccaattccgagttcaaatggccaagttatggccatttgaagtttatatgctctttaaatgaatatttgcgaatttcttcatttaaattttaatttaaaaatggatttattgcgtcagccgaggggaggggcgcgcggaccgggtccacgggagtggggcccacgcggcagcctcaaggtccacggtggaccgggcgcacccgggctcacaccggccggcgccgtgggtcccacgcgtcaaccgcacccgagggcgccggcggctgacagccaggccccacgcgacacccgctcggtgcgcccgaagacggccacgccggcgcagcggcgggagacggcgcgcccgcgcccctatggtcgccggcggcggccataggcacggcggagcagcggccgagagaggggaagggaagggggaaacgaatcggcggtccacggctcaccccgggtcgacggcgacgacgggaacggcgaccggagcggaggaaggcggcggcgcggctcgggtggacggggtcggcggtgctccggcggtcggcgagcgaaacggaggggtggacgaggtcggcgaggatgcggcgaagccgaaggaggcggcgccgaggcgggaaatggtccggagcgacgacggcggcggaccggagttcggcggcgacggcggagagagagagcgacggcgcgagctcgattccggcggggagagagggcggcgggtggcggaaacggtggagggaggcacggggaaggtttatatagggttgggagggggagagagctgccggacgagggggaaacgggcgcagaagatccggcctccattgatggcgccggcgaggttaggggagaggtttccaaacgaatccgagggagagagggagggaaaaatggggggaaagagggagggaatcacggggaatatttcccccctcttgattgcacgcggggcggacgggggcggcgggattcacggcggcggcggcggcgctagggcgcgggcggggcggcgggagcggcgggaggaaggggatgacgggtgggccccacccgtcagcgagggtggcaggcgggcccgcccgtcagcggcgcgcgcgcggggagaggccggatgggccgcggggagaggagagggagggggagggagctgggccggatcggcccaagagggagcgggggagggaaagggaactttttagggtttttcttttttgtaaaaccatttcaactttgtttatttcttaataattattatttgtgctctgaaaatttcactaaaatttatttacgcattttaggcttttaggaaatatacaaaaatcctccaagccttatttgacttttaactttgcacattttaattgttggaggctttcacatggattttaattattctaggcataatttagaggatgtattttagagtcgttttgggacgcgacacaatgtacccaagttagtgttttcattcttaaaacctgcttaacaactaaaatgtggaatggttggcctgggttggcttgggacgagctgggacccagggtcgggttgccagttcggtctgaatcatcgtaggccttgggttaaggcaggttcgtgtgggttcacggccttggcaaataataatgtatagttctagaatcgtgtttacaaaatagctttgagcaactaagtgtcttttaatgctgtttactgcaaccctaaccctttatgttataactcccttgtactcccttgcatctattctgcacttgtgggtgtgtcttgttgagtacggtggttgtactcagtcttgctcaatttttcccaaacccagaagaggagcccctggaagatgaaggctttggtgtctagctcgtgcctgccgtcaagcgcctgtggtcgtcgccctagtcttccactgtttcccgtttgtctttgtgtgtgctgggcctccgctgcccatgtaataatttaactatttacgcttccgcttgttaaactctgaattgtatcaactcttggtgtaccttgcctcctgggacaaggaataatacacgcacgtaaggaacgcccgttgggttaattccggtcgtgacaaaatggtactgtttacacgaatgattcctgttataaaaagggggtccacactccgggcgctcgtctccttcctcttcctcggcccgaggccgaaacgatcatgtttcgcgccgtcggccatcgtcacagcgccctcccctgcagtggtagtgcatcctctccgttctccttcctcgctccatctcctccccttagactcgggtagtagcatgagtagaccccccgtagctagctggcgccgccccaagccttgtcgccgctcgctatgtgcacgccgacgtcgccgcccgagctcggtagcgcctctcgtcgccggcctcgctcggcgtagctccgcccaatccgacgctagaaacggactccggtggccgcgtagatgctctggtccggaggaatcgaactcccgtcgcgccgtcaccgtttcccccttttctcgccgccggatgccgccgccgcaatccgccgccatcgagcatcccccggcgaatccgagccgttggctcgtctcccctcatcccgtgcaacctcccggtgcactcgcccttgcttgcatcgctgtagatcgccccgccgctcgccgccgccatccgccgtccgttccggccgacgtcgtcgtcttcctcacgccggcccacgtggctgccacgaaggcgccacgtcggcgccacctcggccgcgaccgggtcaagctgaccccggtccgccgctcccctctgccctgctcacgcgcgcggtccaccgtgagccgtcaggctgcgcgtaggcccgccgcatccgcacccacagcgagccgtgcgcgtgcaccgcgtccctcccgcaaaccctagcgcgcgccgcgtgctcgctccgtacggtgaactgtgtcaccgacaagcgggtcccactcgggaccacgcgaggtgagcccggtccaccggctccctctctcctccccacccacgcgccctactgggccgagtcctcttgggccggccggcccattagctcggccgagccgcgcttcttctctcgggccgcgccctagccgcccgagggaagtctactcctcctccctctttcttttcttttcaaaagggtttaaataaatcctttttcctttagataaaaaatccaataatcttagaaattcaatatcttctcaatcgtacatccgattgactccgttcaacttccaaaattcctcaaatctcgagatctatctaatggcacgcttagaggtcaataatagggctttgttttctctgtttgttgagttgtcccgtttcgcatgtagtttcggagcccgaagacccgcagtgcgaggatttcgaggatcgagctcaagatctcgagcaaggcaagtcacctttgatcatcttgccctataatttaaatctaagtatttcttttccgcaaatattgcatgaatagtttaacacaagtaattcggccgcggcttgtgagatagcctgccggccccaatcctaattgctgcaattaccctccttgaattattgaacacttaaaacctcctttgtcaactgttgtgcttcgatgcacgggccttcgggcacgggcatcggaacacctcccctcaaatttaaaatatccaacgatgggtaaaacttggggttttacaaaagacttggaaaacccgacacctgggttggtgcttgcgaactaaatgaatttccaaaaccgcagaccgggggacgtactgggagtacggtttctagttcttgcacttaaggaccgtttcccttggaatttcatccgaacataagacaagtgcgaccacatgggtgaaatgggacgcccctggctgagtaattagctaatcgggggagccatgatgccaagagacatgtggattcaacggggtggtgccgaggagaacccccgggcttcctgacacagtatggtctgggacctaacctgatatcagtctgggacccctctcgttggcatatggtgaacctgtgtcggctttcgaaatgccttgtcatgaaagcctcaaggtctccagacgtggccgtcttgcacaggctgggtgatccgggttagtaatgtcgtgtgggtaaagtgtaccccctctacagaggttattaaactgttcgaacagccgtgcccacggtcatgggcggatgttaggtgattcctagcgtagttttgtttgactactgctttgtgaaattgttgttgtggaatgggttcgatgtttggaaaatccgcggctgatgggatcagccaggcccaggtggccgtttgaaagctgttggccgggtgtcaaccttgaatcaattcaaagactgatacattgcacatactccgaccggacgagacgcactgtctcatccgtgtcgtttgagaagcactcacttagttgtttcaaaaaggagtttaaataaaatcaattgcaaaaacaacagccttccctttgaagcctgcattaaacacttaattcccatggcttgctgagtactcttgtactcacccttgctctatataaatattcccccccccagttgctgaagaagatgaagtggatcccgctggcgaggagttcttccaggagcaagtcggctacgatgagttttagggtttcggtccagttcccaagtcgcgcctgtgatgattggtccaagtcttggcttccgctttcccttttgtaatgcagttgtgagctcgggatctgtccgcagcccaacatgactgtagtcctactctgtaataaagagacctctgttgctgtgatattctgtcttcctgtgataccagcactgtttcctgggactggtatcgattaacaggttaatttggagcgtcacgggctagttccgttcggggctagttcggggcgtgataatatgttagggtgtgacagttagttatggaactgctgtgagaaagtgagctacccatggaatcataagcacgataaatcttgaattgcttggtgatttaatttattagactattatccttttagaccttttgtttgtagctaattggaggtatgtatgaattacacacttctaaaaatacgatttctccagaaactttctatgttagtattgattagataacctttttataagctacttgtaattttatatctttaatatttaactaatccatgtatatattaatttatcggctaaccagctagctgtttcgaaccggtaggtgacaacaggtatcctgccctttcatcgtttttttgcatcggtaggtaacagctggttttatgtattactcgactttgtataaataggagagcatgcatgtttcatcaatcagttatcttgtagctagctacctgatcgaactcgggaaaattatttaagatggcagcacagggtgttacctccgtgctagcggtcgtattggtcatcggagccttcgtgtccatccctacaggtatatatatgcaaaatttgatcaatcatcagtttaattacattaattgaacactagaaaagtatgaagaaatttgatcggtctcttgatttgcatttctcgcacgtatgcacggtgcatgaatataattgatcaacacgtacgtacactagtgcaatccatcggcgtgtgctacggcgtgaaagggaacaacctcccgccgcggagcgaggtggtgcagctgtacaagtccaagggcatcaacgggatgcgcatctactaccccgacaaggaggcgctcaacgccctgcgcaactccggcatcgccctcatcctcgacgtcggcggcttcgacacggtgtcctatctcgccgccagctcctccaacgcggccgcgtgggtccgtgacaacgtcaggccctactacccggccgtcaacatcaggtacatcgccgtcggcaacgaggtggaaggcggcgccacgaatagcatcctcccggccatccgcaacgtcaactccgccctggcctcgtcgggcctcggcgccatcaaggcgtccaccgcggtgaagttcgacgtcatctccaactcctacccaccctccgccggcgtcttcagggacgcctacatgaaggacatcgcgcgctacctggcgagcaccggcgcgccgctgctcgctaacgtgtacccgtacttcgcctacagggggaacccgcgcgacatcagcctcaactacgccacgttccggccgggcaccacggtgagggaccccaacaacgggctcacctacaccaacctgttcgacgccatggtcgacgccgtgtacgccgcgctggagaaggccggcgcggggaacgtgaaggtggtggtgtcggagagcgggtggccgtcggcgggagggttcggggcgagcgtggacaacgcgagggcgtacaaccaggggctgatcgaccacgtcgggcgtggcacgcccaagaggccggggccactggaggcgtacatattcgccatgttcaacgagaaccagaagaacggggatcccaccgagaaaaactttgggctctcctaccctaacaagtcgcccgtgtatcccatccgcttctagtacgtttaattaagctaaaaaagctagctgcacacatagcagtgttctttttaattcccgaataagacacacagggcagtggtaactactcgtctactccaatgaagtactgcgcgacagtactatatatacgtgtgcatgcacacttttcaatgtatactactttaaaaaggctaccaataatgtcctaagttgatattctctttttcgggttgataatacttgtcgtttattttggataagggcacagtctttaaaaattaactttgacaattatgttctgttataatatgtataaaagtgttaacaaatatatgattttattaaattacttttcaagactaatctatccatgtagttacaatatttgaaagataaatattttaaaaagattcataatcaaagattctaaagattgatcttacccttatctaaaacgataaatattatcagcccggaacgagtatataatatataataatgaataaagtgaaggaaatgtctttcctcgttactacctactaggatgtgcattcgatctccacagtcacatgaacttggggtgtacgtgttcggccttcggcgcgaacgattgggaggggccaaccggccgaggacccgacaaacgattggtctggtagcccaaggcggcctagacccgagcaaaaatgtgcaacacgccgcttatgtgcatgggccatttggcgacattacgcaaagaaagaagttcaattagactcccccaactatagttcgaatctgattcttaccgttcaaccataaaaccattataatagctcctccaagtactttaaaaccgcgcagaataactccctcagcagtattgatcagtattgatggtggttttcgctggcgtgactgagtctccgacacgtggcattgaaaacaaaaataaaaaggaaaaaatatattaaacccacatgtaagtgaggtaccattacccctattacccttctttttttatctctactggcgctccttctcaagatgagcggcgggccgagcttgggacgactgttggaagaaagcgattgcggggaggcggcaggaagaaggcgcctaggacggtggaatcgagacggtggggagagagaacttggctttggtaggggaagaagaggaccatgcacaccggtgacggagctccactacattgcatgtgacctcaatcacgctggccagatatgcggtgcagtcgagcttgccgagagggatcttgttggatctgtatccccgacagtccagccaaaactgagcttctccacatcacgacacatcatgctgcttcttctcccctcaccgacggtcaccatgtcatgctgctcctcacctatcggcccatggcccaaggtagtagcagtgggaagccgaaggagcaccaggacagggaccacatcgttgaaagcgccattcccttgtggaagtcactctggcgcagagttgcaagaaaaggcagaggtcaatgatggaggtggcaaggtcatgctcgatggggttcgtcggacgctgcctctcttcctctgcgtctgtctctgtctcttcactaagaaccaaggagctcagaggcagaggtcagtgacggagatggtgaggtcgagctcgatgaggttcatcgactgttgcctctcttcctccgttgcgtaagtctgtctcttcgctaggagctagggagctcggagcacttgagctcaccgatggctcagagaggtcaagctggccatcagtcgatacctcctcgtcgatgcatagaggaggagggagagggcaactagctagctaggggaggaagggggaaaaggaaggagagtgggaggaggaagaagggagggagagaagaagatagcatgtgggatccacgttgtatttgacacatgggtccatagattcttttgaaaaattttttgaaatggttagtgacatgtgagttccattcagtttatttttatttatatttttgttgattgtgattccatgtaagcactacgtaggatgaagaccatgtcaatgtgccgagtaggtgccacatcaatgaaagccaccgttcaatactgtcgaggaagttgttttccactgttttatatttggatgagctgttataccagttttacggttaagggtattgtcagggttatggataccacatacctaatagtagttgactaaatctcggcaggatacaccacataccatgtcttatacgga

SEQ ID NO: 9596 - DNA, 1082 bp, Oryza sativa
cccgtggccagccgtaccgagcccggccgggggacaccgatcactcgatacggaccctcccacattggtgagagtttgctcaatccagcacgcgtttggacgcggcgtaggacgaggtcgtcgacgcaaagtgatcgggcccggacgtggcgctgatggtagcgccgcaggctctgctggtagcgcgcagctcggagggccgcgcgccgccttcgctcttccaagtagtcgaggtcatctctacgaagctgatcttgatcagcctcgcagtacatggtggcccgaggagacctcagggtgagctcagatgggagaaccgcttctgcgccgtagacgaggaagaaaggcgtttccccggtcgctcggcttggtgtggttcggttcgcccagagcaccgctggcaactcctcgatccatgaatcgccgtgcttcttgagaatattgaaggtcttggttttaaggcctttgaggatttctgcattggcgcgctccacttggccattgcttctggggtgggcaggtgaggcgaagcagagcttgatgcccatgtcttcgcagtagtcgcgaagagctcactagtgaattgggtgccattatccgtaataatacggttaggcactccaaaacgggccgtgatgcccttaataaatttaagagcagagtgcttatcgatcttgacaaccggataagcctcgggccacttagtgaacttgtcgatcgcaacatacagatactcaaacccgcccggggcccgtttgaacggtcccaggatatcaagcccccagacagcaaatggccatgacagtggtatgatctgcagggccggggccggctgatgaatttgcttggcgtggaactgacacgctctgcatcgccggaccagatcgactgcgtcattgagagctgtcggccaataaaatccttgacgaaaggccttgccaaccagggtgcgcgaggcagaatgggctccgcactcgccctcatggatgtcagcaagaagctcaacgccttgttcctgaggaatgcacttcaggaggattccattagccgcgcgccgatagagggtcccttctaccagcaca

SEQ ID NO: 9597 - DNA, 3018 bp, Oryza sativa
caacggctgcgtcgccctgtccatggccgagatctgctcggcgtacccgacctccggtggcctctactactggagcgccaagctggccggcaaggaatgggcgtccctggcttcttgggtcactggctggtacgtgagacatgtatgagctagtctgcatcaatttcccctgtctttatgcactggaactaatccaaaatggttaggtgcaattgttttcttgatatccttgaaaaaaaattgttgtcttgagatggtgccttcttgaagattatgtttgatcattactattttgaatatttgttgctgtggattatgcatgtatgctgttgttcaacttaatttgcgagcctgaatttgttattgtgttgtgtgttcgacaggttcaatatcgttggacaggtatactaccattgtctggtggatctagatactgtttttagctccagcttataacttcatttttcgagaaaaaaatttgcattgttgccctgtccttgtcttcaactgttgtggcagtgggcagctattgcgagcgtagacttctcgctggcgcagctgctacaggtgatcatcttgcttagcacgggaggagccaatggcggcggctacatggcttcaaagtatgtcgtgttggtgatttgcgccgtcatcctaatccttcatggcgtcatcaacagcctccctatccagtggctatctctgtttggccaaatcggggccatctggaatgctgcaggtgcatggtacacatggaggcaataatcaccagtccttatgaattgtggttcttggcatctgaagtctgaatattgaaccctgaacgaaatttatctgtctgaacaatcaacaatgataggtgtctttgttctggtgatcctgatcccggcagtagcaaaggacaggccaagtgttgagttcgtgtttacccatctcaacacggacaacggcatggggatccatagcaaggcttacatcctagccgtgggattgctgatgagccagtactccgtgctcggctacgatacatccgctcacatggtaaacgagtcctctactcctgtcaggctgcagatatctgaatgagcataactgaatatggatagaacacagtgtcacagtgacgagctgatgatgcgtgtatgcaggttgaggagacaaagaatgcagatcggagcgggccaattgggatcatcacgtcggttgtttgcgcgacggtgttcgggtggatctacctgttggctctgacgactgccgtgacggacatcccgtacctgctcagccccggcaacgacgccggcggctacgccatcgcgcaagctctgtacaccgccttccaccggaggttcggcagcggcgctggcgggatcgcctgcctgggagctgtcgccgtcgccatcttcctctgcggcatcgcgtgcgtcaccagcaactcaaggtgacgggctcacatcgcgtcgatcgatctgatgattccacagctagctgttcatcgaatcatcgtgtcgagttggtgatttacatgtcgggtttctgtaggatggcgtatgctttctccagggatggcgcgatgccgttgtcgcgcgtgtggtacagggtgaacaagcacgaggtgcctctcaacgtcgtctggctcgccgtcgccgtggccttcttcatggctctcacggtgagttgcatttgcattcgcattgctgctccggtgattcacggtgagtgcgcgtgatgacgacgccttctctgccttttgccggtgcagtcgctggggagccaggtggcgttccaggcgatgggttcgatcgcgacgctggggatgtacatcgcgtacgcgctgcccgtgttcttccgcgtgacgacggctcggagatcgttcgtgccagggccgttccacctcgggcgatacggggtcgtcgtcggctgggcgggtgtggtgtgggtggccaccgtcacggtgctcttctcgctgccggtggcgtacccggtggccaacaaggagacattcaactacactccggtggccgtcggcggcgtgttattgctcagtgttggtgcgtgggtgctacgtgcccgcttctggttccaagggcccatcacgaatgttgacacgcattgttgacaagtatggtatcgtgttgttagtcagcgagtcagtggaaatatggaaccacacttttatattgtgtaatctatacgtgcaattgtagtcgttcagcagttatccaccattccggttttctttttttatcctttttattttgaaaaaaatgttttttttaaaaaaaacttttttgaacggttgaagagcgcagcaacgtgcgatgcgaggggcctgtctagggaaatttcagtagctgtagcttctgctataatcttcagctgccagaaactccatcaaacaatttagattttcacatatattttgaaaagttgtagttgtagaatctagaaaataaactcgaaatcagaaactgggtttgccagcttctctagattatcactaactgcttataagaagcttaggactctatcgtttctcttattgacggaataagcgaaatgacatatttgcaaacagaaaataatttgtaaataaaacttttatataagtgttcttagcaatataaacaaagtctgaaaaataaactttgatgaaaaaccccaaaatctatctattatattattaagatagctcgaaaagaaggcactacgttcgctgtggaggctagaaattcccatattaatcgaagaaaaagaaaaggagagtccaagtaaaaatacaatctaaaaaataactgaaattcggaattaaaaataagcaatattaaaagaggtgtccatataagaacccaatacgagattaataaaaccattgattacaattctaaattttaacggtctagatttgtaggagaaaagataagtccatagatctgtattgtgtacgttacatactaggagtctttgtcctttctgtttctttagcggtgtacacagtacacgtataatctaattcaatta

SEQ ID NO: 9598 - DNA, 1098 bp, Oryza sativa
gtaatcgggtagaccggcgtcttgtcaggattgaagagcccaaaatgcctctcggtctcatccccgggcttctggttctcgttgaacatggcgaacacgtacgtctccagtggcccgggccgcttcggcgtcccgttcttgacgttgtcgatcacgccctggttgtggttcatcgcgttctctgccgtcgccgcgaaccctcccgccgacggccacccggtctccgacacggcgatgcggacgttgggcgtgccggccttctccagcgcggcgtacacggcgtccaccatggcgttgaagaggttggtgtaggtgaggccgctgtcgctgtccctcaccgtggtgcccggctggaacgtggcgtagttgaggctgatgtcgcgcgggttctccctgtaggagacgtaggggtacacgttgacgagcagcggcgacatggtgttggcgaggaactgcgcgatgggagccatgaactgctgcacgtcggggcggaacacgccgtgcgacggagggaacgagtcggtgatcgcgtccatcctcaccgccgtcgacaccttgatgctgttcgagaggccggcggacacgagcgcgtcgtacacgttctgcatggccgggaggatggtccccatgtcgccggggccgagctcgttgccgacggcgatgtaccggatgatgacgttcggccagtaggcctggacgttgtcacgcacccagtcggcggcggcggaggggttgttggcgaggttggccaccgcgccgatgccgccgacgtcgatgatgacggcgatgccgctgccgcggagcgcgtcgagggccttctgatccgggctgtagatgcgcatagcaccgatgccattggacttgtacagctgcacgacctcgctctgcgacgggaggttgtcgccgttcatgccatagcaaacaccgtggacacctgcaaaaacataggagtgcatgttgataccaaatcagacgatttaattgatgtgtaaggaaataaaatagcaagagagagagaaagagagagagagatcgaattgcatatgagagggttagttaattgattagcaatagatcagctcagcatgaaagagaaaa

SEQ ID NO: 9599 - DNA, 4791 bp, Oryza sativa
agatcagctcagcatgaaagagaaaaggaagggaaaaataagttctgaatatacctcccatttgatcaaatagctatgataactcgagctctgatctgcttgatcagtatctggagatggaattatgaatggcgcctcgatgctcgcgctcgctagctcgtgatcgtagctaggaaagaatgtccccccttatatactgcaagatggcgtgacttcttcctcttgtcaatgagacacttcaatcggttaaccagtaatcacgagatccggccgacggcggagatcacgaggtttgcctcgcgttgggattcgacttcggttatacttttgctttggaattgtgttcctttgctttattcctcctctagcatctgcccatacattccgtgtgatgaacactgcgaatcaaatgggacgtttaagatgttgttgttgtactgatagcgtgattgaattcatggcctctttctgccaagccgcatatggagttttttttggtgtttcagtttcaagtcgcggttggtgaatccgaaatcacgtgattaaaacagtaattatcgagcacggaaggaatggaatttttttaaaaaaaatgcagaacggagtaatttcttacagatcatcctgtttctgcttgatgcgatagctaatcgctgtcggtgctctattactgctccagctcaagctcgaacagcattccagcttgtcggccaaattggacatatctttcggcccaattggtttaatccccatctcttttagccgggccgcaagttatcccctcctcgtcacgctatctataggcccattattatctatctgtgttatgttttagaacaagctggaaatgctggttgagctcgagcagtagtagatagggatgaaaacagtccggaaagtttccgaattccggacgtgtttttggaaacgggaagtgtcggtcagaattttttcgaaacatttggaaacggaaacgaattccgaattctgaatttttttctcggaaacagaaacaaacatgataaggctgctattcgttggaaaccgtaatccgacggaaattttcaagaaatgaattcaaatttttttttcttagaatcgaaaagggagtatttctcatatacaactgattagtttcattcttctctactctttaatgtttaggtttatactagtattgatgtgcttaattaaatagaaatatttttagttccagtaatttagatttgtttgcatgattactttttaaatttttattagaccatgtcatactacttataattatagttatagatgaatatagttctttttctccaagaaagtaaagggtacaactagttattattattattattggtaaaaaaaaataaatatcggtttgttattttagaaaaaaatattgagctacatctctttcttaatttgaaaagttcaatttaagggctttttatattccgataagtatccgttaccgtattcgttccaaatcgtattcgttccgttttcgtatttgataaatatcctttgccgtattcccgttttcatcctagtagtagtagagcaccgacaccgattaggaaaacgtggaattgatctgagtgaaattactccgttctgcaatttttcttctaaaagattccatttcctccgcgtgcgaaataactacgaccgaatcatttttgtattaatcgagttgatatctgtttctgcgaggccgctgcccgctggaatctggagattgaagcagagaaagtgagaggaaaccaaaccgcgacttgaaacacctaacagactccatatgcggcttgtcagaaagagacaatgaattcatcaggctaccagtacaacaacatctcaaatgtcccatttgattcgcagtgttccatcacacggaatgtatagtatgagcagatgctggaggaggaagaaagcaaaggaacacaattccaaagcaaaagtataaccggagtcgaatacaaaagcgaggcaaacctcgtgatctcacgtgcgtccgaatcgaactctggtcgcctccaccgtcgtccggatcacgcagcctggccggccatccgcggcggcgggcttgcgccgccgtgctgctttggctggaagatcttggtggcagagggcagaggacccagaagtcgtcctcctcgccgtcgtcggtgtgcggcggtagcaccggggatcggtgatctcgtactcggccatcatccacccggtaacgaagggaattagtagcagcaagcgggagtagcttgagtggccataattaatccgagctggtggagcagtattctgcgttcatgatctgcatttgtgtcctctcttcaggaactgaaaagctggaaatgtttgtgtctatctgtttataggtgccatctgtttggcacaagatggtaccgatatatagtcacagcaggctgctgtcatcaaccgataaaaagatcctgaatttttttaaaaaaataaaataaaattggaattttttattcatgtagcattgtcacaaaaaaaaagggccatacagagtacatgcattaacgttcaaccaacattatttaatcatggattattcgtctctggaaatccttatttgcactggcatggtcagccgctagttcggaggaaacgtaatcgggtagaccggcgtcttgtcagggtagaagagcccaaaatgcctctcggtctcatccccgggcttctggttctcgttgaacatggcgaacacgtacgtctccagctgcccgggccgcttcggcgtcccgttcttgacgttgtcgatcacgccctggttgtgattcctcgcgttctccacgttcgccgcgaaccctcccgccgacggccacccgctctccgacacgacgacgcggacgccgggctcgccggccttctccagcgcggcgtacacggcgtccaccatggcgctgaagaggttggtgtaggtgaggccgctgtcgttgtccctcaccgtggtgcccggctggaacgtggcgtagttgagcgggatgtcgcgcgggttgtccctgtaggcaaagtaggggtacacgttggcgagcagcggcgacatggtgttggcgaggaactgcgcgatgggcacaatgaactgctgaaggtcggggcggaacacgccgtgcgacggagggaacgagttggtgatcacgtccatcttcaccgccgtcgacaccttgatgctgttcgagaggccggcggacacgagcgcgttgtacaagttctgcatggccgggaggatggtccccatgtcgccggggccgagctcgttgccgacggcgatgtaccggatgaagacgctcggccagtaggcctggacgttgttccggacccagtcggcggcggcggaggggttgttggcgaggttggccaccgcgccgctgtcgccgacgtcgacgatgacggcgacgccgctgccgcggagcgcggcgagggcctgctggtccgggctgtagatgcgcatagcaccgataccattggacttgtacagctgcacgacctcgctctgcgacgggaggttgtcgccgttcatgccgtagcaaacaccgtggacacctgcaaaaacataggagtgcatgtttatgccaaatcagacgatttaattgatgtgtaggaaaataaaatatatatatagagagagagatatcgaatctggatttttcacattttgatacttttgaaaaacttatttcacaaatagacccctaaaaaaacttatcctagaaatggtcttttttggggcgccagagtggctggcgccgtcatccaacgggatggcgccagcctctctggcgctgtcctcctgccaccgtggcgtacgcgaaccgacgtggctccattcctgtttctctgtatggagttgcaacggtgttatttttattttattttttcggatgtttttcacactcaggatcacgatacaaccaaccacaaaaaaaatttaaactcgaactaccacttagctaagtctgaaaatatctagcataccacttagtctactttacaccttcactaaaattagaccataactcatttagtaaaaccctttgatcagcatgttaaacataatgcactctaccactatatgaaattacttaatctaattcaaaatataaccacatgaaatgacatatataagttaaacagtatatagagatgcaattttttatttttattttatttttttgatattttttcacacttatgagaacataggaaccaaccgtataaaaaataaactcaaacggacaaaatatgtgacatgtagaattttccaaaattctaccgaaacggacaaaatatgccatctattaaaataggcgtaactttctcatacggactcggaatcaggcaaataatatatgcacggacatctacagaaaaagttacatccgattctcccccgctttgccgggttcggcgatattaaaacctccaaattccgcttgcaagattgtgttttcgaggagagaagtttttcggtggagctttggaaaattccacatgccacatatttcgtccgtttgagtttattttttacgtggttggttcttgtgagttcctaagtgtgaaaaaaatatcaaaaaaataaaataaaaataaaaaagttgcacatctctctcctctgcactagttcggagagaggagaggagaggaaaaattctacatgtcacatattacgtccatttgagttcaatttttttatggttggttcttgtgtgtccctaagcgtgaaaaaaattcaaacaaataaaacaaaaataaaaaatttccgggggg

SEQ ID NO: 9600 - DNA, 5404 bp, Oryza sativa
catcctcttgccgccgctttggctgcaagcgccgagcgccagctcgcgccttaaccgtccaatgtcggttcccctctcccaaaccgacattgccgtccatttaagcccaagccctccccctccaaactccctcattttcgcctccgcgccattgctgccctctgtttcgccgtcgccgatcgtcgttgcgcgtgtcggaggagccggcacgagcaaggacgcggaagaggactccggccgcgccctcttcttcctcttccccggcccgaggccggagagattactcccgcgccgccggcctctcgtcacagcgcccctcctcttctcggtgatgtctctctccgttcttcctcctcgctccatctcctccccctagctttcggtagtagcttgagtagcctccccgtagttagccggcgccgccccgaccgttgccgtcgctcgccgtgtgttcgccgccgtcaccgctcgagctccgtagcacccgctcgtcgccggcctcgctcggcgtagttccgtccaatccgacgctagcgtcgagttcccgacgccgcgtagatgctctcaccgccgggaatcgacctctcgtgacctcgtcgccgtttccctcttctcccgccgccggttgccgccgccgcaatccgccgccgtcgagcaacctccggcgaatccgagccgttggctcgtctccccttgtcacgtgcaaccgcccggtgtgcacgcttttgcccgtatcaccgtggttcgctccgccgctcgccgccgtcgcccgccgtccattcgcggccgggtcgtcgtctacctcccgccggcccgcgtggcagccacgtaggcgccacgtcggcgccagctcagcctagaccggatcgagccgaccccggtcagtccctccccgtgcgcgcgttccaccgcgagccgtgaggctgcgcgtgggcccgccgcacctgcgtccaccgcggaccgcgcgcatgcaccgcgtcccttccccgcccgcgcgcgtgcgtcgcgtgctccctccgcacggtgagccgaaccgctgacaagcgggtcccacccgggaccgcgcgtggtgagcccggtccacggcccctctctctcctccctcccgcgcgcgcgcgagtttgggccgccttgggccggccggcccatttagctcggccagaccgctccatttctcttgggccgcgccctagccgtcctagaaaagtctatattccctccctcccttcttttctttttcttttcccaaaaggatttaaataaatcctttttcctttagaccaaaaatccaataatcttagaaattcaatatcttcccaaccgtaattccgtttgactccgttcaacttctaaaatttctcaaatctcgagatctatctagtggcacgcttagaggtctttaatagggctttatttttgccgtttgttgagttgtcccgtttcgcgtgtagtttcggagcccgaagacccgcagtgcgaggatttcgaggatcaagctccagatctcgagcaaggcaagccacctttgaacatcttgagcctatatttgaaatttaattatattgcttgcgaaatattatgcattgataggatcacacttaatctgttgtcccgtctgcaaggcagattggcagacctacctaatttgttgcatttgatccttcctttgttaattgttataccatgtccccttgtaaccacccagttgcacctcgatattcgtgcactctgtgcgagtatcgacggtcgccttcaaacttaaaatctgagaaacaacttgggtaaaactggagttttacaaaagacttggaaaacccgacacctgggtcggtgcttgtgaactaaatgaatttccaaaaccgcggaccggggaacgtaccgggtgtacggtttcccgctctcgcacttaaggaccgtttccttggaatttcatccgaacataggacaagtacgaccacatgggtggaatgggacacccctggctgagtaactagcttatcaggggagccttgatgccgagagacatgtggattcgccggggtggtgtcggggaggacccccgggcttcctggcacagtatggtctgggacctaacctgttgttggtctgggacccctctcgtcggcatatggtaaacctgtgtcggctttcgaaatgccttgtcatgaaagcttggaggtctcccgacgtggctgatccccataagctaggtgatccgggttagtaatgtcgtgtgggtaaagtgtaccacctctgcagaggttaacaaactgttcgaacagccgtgcccacggtcatgggcggatgtgaggtgattcctagcgtagttttgtttgactactgccttgtgaaatttgctgttgtggaaaggggatcgatgtttggaaaatctgcagctgatgggatcagctaggcccgggtggccgtttgaaggttgttggcccgggtggccgtttaaaagttgttggcccgggtggccgtttgaaagttgttggccgggtgccaaccttgaatcaattcaaaagactgatacattgcacatactccgaccggacgagacgcactgtctcatccgtgtcgtttgagaagcactcacttagttgatttcagaaaagagttcaaacaaaatcaattacgaaaacaacagcctttccttgaagcctgcattaaacacttatttcccgtggcttgctgagtactcccgtactcacccttgctctatataaataatcccccccagttgctgaagaagatgaagtggatcctgctgacgaggagttcttccaggagcaagccggctacgatgagttttagggtttcggcctagttcccaagtcgcgcctgtgatgattggtccaagtcctggcttccgctttccttttgtaatgcagttgtgagttcaggatctgtccgcagcccaacatgactgtacttctactctataataaagagacctctgttgctgtgatactctgtctccctgtgataccagcactgtttcctgggactggtatcgattaacaggttaatttggagcgtgacgggctagttccggtcgggactagttcggggcgtgacactggtggtattgcatgggttgacatcctggcctagggcttaataggattaatagaatactcatatcaacaagttgcaacttcttttccggaagccaatctccaaataactccagagttaagcgtgcttggcctggagcaatttgggatgggtgagatatgtgttggtctgtgagggcagtctatgacctatgaaagctatcagatgtaagcgggcctggcctgggggaaggcgggacgttacaaattggtatcagagccgactctcgcggtttcacgggcgcgtgtgttgcagttgcgcaggcatggtgcgcatggctggtgtagaccgggagtggttacacagcatggcacatgtgctggcactggacacatggacgtggccaagagaggacgttcctggcctagggttgatcgacgggggcgtcgatctctcttaagggggtgagggtgtaacatcctggcctagggcttaataggattaatagaatactcatatcaacaagttggaacttcttttccggaagccaatctccaaataactggcctggagcaatttgggatgggtgaccgatcgggaaattcttcccgggtgcacacgagtgaggacaaagtgtgcagaaaagatatgtgaccgatcgggaaattcttcccgggtgcacacgagtgaggactgcatgaaaaagataagagtgaattacgctttgggccacattttattacctaagtttcactttggaccacccttaaacatatattttcactttggaccggataaatttgccattgttgcatttggaccaccacgaacgatttttttcagtacaattaacgatcttaaacacatcagctttagtatacggccaaactcctatatgtatggttcatatgtttgttgaaagggaagttagtcatgacgagaaaaattgtttacggtagtccaaactgcaacaatggtaaatttatccggtccaaattaaaaaaataggtttaagggtggtccaaattgaaacttgggtaataaaaggtggaccaaagtgtaatttactcaaaagataactataggcaagcatgtgaaaacacactgttctctttgatccacaatcaatatgcattcatataaataacgaaatctcgtagtcataagcatgttgcaaacattgacaataccgtttgatattctcttcttggtttggtcacgtaactgaaaaaaggtttgctcttgacagttatggatttcaaatgcaatatggattgattggttggttggtaggtgcaactctgggatatgcctcggagatctaagctttttaggtacaaaaaattcagaactttgataattccctgttgtgtgattccttatttattttcttgtaacattgataattgtgcatgtgccaatatctttagttttttcaaacgtgaaagaaagtatggtctgtttatttactgtcaggaaaaaaaacaattatttgtgaagtagaaagttaatttggactttttctgcagttgaagatagcatgcatataacgttaaggattaatttgattctaatttatttatcaggaagtttcttggaccttagttagtaactctcattatatacatatttgtgttattacatctatgccctacgggctgcagctattattggaggctggtgcattttcctaactgccatttacattgtcaaaactttcttttgtgcaaactctctcttttcaacatcgtcaacaggaagagccaggaggataattttttcgaggcagcgacataaatcagttcgttctttggtcacctggtaccgatggttcattttaaacactccatgacgcaacctgtctcctgttatgcgaaaaatggaatcacaatcagactacagtgcagcatgcccctcctgatgatttttatattcgatgataggcgagacatatttttttctgcatttttaattgcaagttgctaccacatgtttgttttatataatttctttatcacagataaaaaaagttttatgtggccaattacgagaatgctaattgagcgcctttggtgacaatattactacattgaatgcacaccaacgaattgtaaatcagatctgaagcactttttgccattttggatctaaacactagtagcaaaacttgacaatttggcatttagcatttgctagtccatagtagtaaattgtgccaaaaagtgctttgggaccactcactctctctttctctctctcactttagtgctagaatagcaaaagtttaggatgcatctaaacaccaactagtacttttacaatatcaaaactttgccaccaaaacttt

SEQ ID NO: 9601 - DNA, 2991 bp, Oryza sativa
ccgccgcacccgcatcccccgcgagccgcgcgcgtgcgccgcccaaaccctagcgccgcatcgcgtgctccctccgcacggtgaaccgtgccaccgacaagcgggtcccacccgggaccacgcaaggtggacccggcccaccggctccctctctcctctccgcccgcgcgcgcgctttgggccgccttcttgggccggccggaccatttagctcggccgagccgccccttcctctcgggccgcgccctagccgcccgaggaaagtctgatttccctccctccttcttttcttttctttttctttttcaaaaaggatttaaataaatcatttttcctttagaccaaaaatctaataatcttagaaattcaatatcttccaaccgtaaatccgtttgactccgttcaacttccaaaatttctcaaatctcgagatctatctaatggcacgcttagaggtcattaatagggctttattttcgccgtttgttgagttgtcccgttttgcgtgtagtttcggagcccgaagacccgcagtgcgaggatttcgaggatcaagctcaagatctcgagcgaggcaagccacccttgaacatcttgagcctatatttgaacttaattatgttgcttgaaaaaatattatgcattgataggatcacacttaatctgcttgtcccgtctgcaaggcagattggcggacctacctatttgttgcatttgatccttcctctgttaattgttataccatgtttccttgtaaccacctagtcgcgcctcgaaaatcgtgcactctgcacgagtatcgacggtcgccttcaaacttaaaatctgagtaacttcttgggtaaaacttgggttttacaaaagacttggaaaacccgacacctgggtcggtgcttgtgaactaaatgaatttccaaaaccgcggaccggggaacgtaccgggtgtacggtttcccgctcttgcacttaaggaccgtttccttggaatttcatccgaacataggacaagtacgaccacatgggtggaatgggacacccctggctgagtaactagcttatcaggggagccttgatgccgagagacatgtggattcgccggggtggtgtcggggaggacccccgggcttcctggcacagtatggtctgggacctaacctgttgttggtctgggacccctctcgtcggcatatggtaaacctgtgtcggctttcgaaatgccttgtcatgaaagcttggaggtctcccgacgtggctgatccccataagctaggtgatccgggttagtaatgtcgtgtgggtaaagtgtaccccctctgcagaggttaacaaactgttcgaacagccgtgcccacggtcatgggcggatgtgaggtgattcctagcgtagttttgtttgacaactgcttgtgaaattactgttgtgaaaaggggttcgatgtttgaaaaatcagcagctgacgggatcagctaggcccgggtggccgtttgaaaagttgttggcccgggtggccgtttgaaaagctgttggccgggtgccaaccttgttttaagatctaaagattgatacattgcacatactccgaccggacgggacgcactgtctcaaccgtgtcgtttgagaagcactcacctagatgtttttagaaaagagttcaaataaaatcaattacgaaaacaacagcctttccttgaaacctgcattaaacacttatttcccctggcttgctgagtactcccgtactcacccttgctctatataaatattccccccagttgctgatgaagatgaagcggatcctgctgataaggagttcttacaggagcaagccggttacgatgagttttagggtttcggcctagttcccaagtcgcgcctgtgtgtttggtccaagtctcggcttccgtttcccttttgtaatgcagttgtgagctagggatctgtccgcagcccaacatgactgtactcctactctataataaagagacctctgttactgtgatattctgtcttcctgtgataccagcactgtttcctgggactggtatcgattaacaggttaatttggagcgtcacgggctagttccggtcgggactagtccggggcgtgacaggcatattaccgaatatatgcatatggtactattggctggtttggtggaattccaattctgagccttttttatccacagctcatgttctctgtttttattaagacggatgttctctgtgattagaatatttggagaattatgatcaaacatggactatactatatcctgactagatgtgaattatatttgtataaatcaggatttgttatgtgaactagcacattgccaatgccaggtcaaacagtaagtttttttttcttcactaaatatgagcgcatggatctgaaatatattaattcatcggtcaacatggagcaaaaaaaaacaagcatagcacaactgatctaaaaacaatgtctgacgaattccagtccattaattgcagaaacaaatgtgcaaattctttagttgctataacaaagggaattccagtccattagtgccgcaagccagagcagcttgagtggccaaaatcgagctggtgaagcagtcttctctgttcatgatctgtgtcctctgttctggaactggtaagccgaaaatgtttgcgtccatcagtacgtttatgtgccatttgtttggcacaagatggtaccaatatatagtcacagcaggctgctgtcattagcagataaagagatcctgaatatttttattttacaaacacgcaaaatgattgcacgtcggtatattagaaaaaaaagtatttgtttacctaacacaatcagcccagtccaacttataccaagggaagggagaaaagacaaaacaagaaaaaaaaacaaggaaaaaagggaagaggcctgaaattttctttttaagaaaaaaatttggaacttttattcatgtagcattgtcaaaaaaaagggccatacagag

SEQ ID NO: 9602 - DNA, 2668 bp, Oryza sativa
ccccctagccacctcagcatcgccccgccacgtcggcggtgggacggcgccaaagaggctggcgccatcctgttgaacgatggcgccagccactctggcgccccaaaaaggactatttttaggataagtttttctagagatctacttgcgaaataagtttttcaaaaggaccaaaatgtgaaaaatccaggagatcgaattgcatatgagaggcagagagggttagttaattaattgattagcaatagatcagctcagcatgaaagagaaaaggaagggaaaaataagttctgaatatacctcccatttgatcaaatagctatgataactcgagctctgatctgcttgatcagtatctggagatggaattatgaatggcgcctcgatgctcgcgctcgctagctcgtgatcgtagctaggaaagaatgtccccccttatatactgcaagatggcgtgacttcttcctcttgtcaatgagacacttcaatcggttaaccagtaatcacgagatccggccgacggcggagatcacgaggtttgcctcgcgttgggattcgacttcggttatacttttgctttggaattgtgttcctttgctttattcctcctctagcatctgcccatacattccgtgtgatgaacactgcgaatcaaatgggacgtttaagatgttgttgttgtactgatagcgtgattgaattcatggcctctttctgccaagccgcatatggagttttttttggtgtttcagtttcaagtcgcggttggtgaatccgaaatcacgtgattaaaacagtaattatcgagcacggaaggaatggaatttttttaaaaaaaatgcagaacggagtaatttcttacagatcatcctgtttctgcttgatgcgatagctaatcgctgtcggtgctctattactgctccagctcaagctcgaacagcattccagcttgtcggccaaattggacatatctttcggcccaattggtttaatccccatctcttttagccgggccgcaagttatcccctcctcgtcacgctatctataggcccattattatctatctgtgttatgttttagaacaagctggaaatgctggttgagctcgagcagtagtagatagggatgaaaacagtccggaaagtttccgaattcccgacgtgtttttggaaacgggaagtgtcggtcagaattttttcgaaaaatttggaaacggaaacgaattccgaattccgaattttttttctcggaaacggaaacaaacatgataaggctgctattcgttggaaaccgtaatccgacggaaattttcaagaaatgaattcaaaaacagaaatgaattcgttggaaaccgtaatccggctgtgggagaacttcacggcgctgcaggaggaccccgcgctctcgccttgctacgccgaccagctgcgcctcgtgtacgaccccgtcgccggcgactaccgcaacgtgcccggcgtcgacacccgcgtcgtctccttcggctccacccgcggcttccgctccgacgatcctgctcgaaagtaagcgatatcatgtcgaatttatcgtactccactccacaaggagatgaacatgcaatgcatatagggacgtgtgcatggagaggctcgtggaggcgctggaagaggagggatacgcggagggagagaacctgttcggcgcgccgtacgacttcaggtacgcgccggccgctcccggcttgccgtccggggtgttctccgacttcacgtcgaggttaaggcgcctcgtggagcgcgcgagcgagaggaacggaggcaagccggtcatcctcgtgacgcacagcctcggcggcctcttcgccatggtgttcctcgaccggaccccgctgccgtggagaaggaggtacatcaagcacttcgtcatgctctgcctcggcgtcggcggctcgccgctgaacatgtggcccctcgccgcctcctccatcccgtcgtcgtcgtcgttggtgggcagcgtgctgacgtacgggaacaggagcttcgcgagcatgttctccctcctgccgtcgccggcggtgtacggcgacacgccactggtgatcacgcgagccaagaactactccgccgacgacatgccggagtttctctcggcggctggtttctccgacgacgaggtggcgctctaccgggcgagggcgctgccggtgaccctggatttccgggcgccgctcgtgccgctgacgtccatcaacggcgtcggtgtgccgacggtagataagctggtgttctgggacggcaacttcagcgcgaagcctcaggtggtgaacggcgacggcgatgggcagatcaacttggacaccgtgttggcattagaaaggttgatcggtgatgacccggatcagggttacttcaagtcaattttgatccccaacacgacgcacaagggtgtcatctccgatgaattagcgctcaagcgtgtggtcagcgaaattcttggagcaaattcaattaactaaggggaaactgttttaatccctcgaggggatatcccctcgttctttgcatgtcacttaaatggttataaaaaaatttgaaaaaaattaggaatgtgtattaacatgtgatataacactccacaaacatgcaagttcaaattcaacttctacatctcgtaacgaaaaaacaaatt

SEQ ID NO: 9603 - DNA, 4694 bp, Oryza sativa
cgccgttgctcccgcgttccgccttcgtctcctccgcatcgttctcctccttttcgtccgtcgcctcgttctcctccacctcgtcgtcgttctccgacccggccgtcccgtcggatgtcgtcgaggcgttgccgatgtcgagggactcgttcaaggcgctcgccgtgctgagggaccaccagggctcggtgtcgtccctctcgctctgcggggagttcttgctcagcgcgtccaccggcgcagacatcgtcgcgtggcagcagccggatctccgccgcttcgcgaggttcgggcatggggaggggtccgtcaaggcgctcgccgccgcggggggcagggtgttctccgcgcaccaggacggccgcgtccgcgtctgcgggtgtcgcggcggtcggagaacgcgttcaagctcgtcgccgcgctgcccaccaccagggactacctgggcaagatcttccgccacgccagctacgtgcagacacgccgcaaccaccgccgcctctggatcgagcacgccgacagcatctcctgcctcgccgtgcacgacggcgtcgtctactcgggctcctgggacaagacgctcaaggtctggcgcatctccgacctcaagtgcctcgagtcgatccacgcccacgacgacgccatcaatgccgtcgccgccgacagcggcaccatctactccgcctccgccgacggccacgtcaaggcgtgggggaaaggcaaggcggcgcacttcctccagggcatcctcatctcccgggacggcgtgtcgtggaacgccctcgtggcgagcgccgacgccggggctcgccgcgtgtacgccgccgggtcggacgggcacgtcgtcgggtgggacagggtaggcggcaggggcagccgctggagcctctcctgcgacgtgaaggcgcacgacatggccgtgctctgcctgtgcgtcgccggcgaccttgtcttcacgggctccgccgacaagaccatcgggctgtggcgctggcagacgagcggcgacggcgacggcgccgccgccgccgccctcgccagggtgggcgtgatcagaggccatgagggccccgtgaaatgcatccaggcgagctggtgcagggtcagcaatggctgcatggtgtacagtggagggctcgacaagagcatccgagtttggtgggtgcccaatggctggaaggccaacgagcagaagcagcagcaagaaaatgacacgaaagatcacaagaactgcgtgttcttgaggtgaatcgtgtcaggtcaggtcaaaatgtgttcttgatttgtgttgtgtttgtagatcgtagtttggattgtttggtagcacactgccttggttgggttgatgatctactctgatggatatattggaggatatgaattaaggagtcatgaaggtattagttttagatttgggtgtaaatggctgtatacttttatacctaattcatacacattttgattaaatggaaatatcagtaataatggttatcataatctcatattgttagaaatgtgtttgattctcagtatcacggtgtgtctctgattactgattagtgtcaatacgcatctatccaaacgtaaaagctcaaaattcaagcatagcaggtcctttacactgatcctgcacatcgctcactgttttctttccgaggtacctcaacattatccttgattatctaaaaagcgttaaattccttgaattgtacttaaaaatgaaaattttaatgtcctaaaaaagtatggagatgtatagatggtcaaatgggccgcccgaagtggcacggcccaagcacggtcaggcctgagccgacacggctgggctcagcccacagaatatgaagattccggactgaagaactcatcgcacttacgatgggctccattcgatggcgagataaatactggtggtccggagaaagaactcacgaggaacacacacacccctacccgtctctgttcatctccacatcttgtcttctcgctgttgacttcgagcggagactagactagctactactcggaatggggaaggagatgaatctgatccgagaagacgagtacggcggcggcggcgtcgggttcgagccgacggaggacgagctgatgctccacttcctccgtccgcagctgcgcgggttcgcgccgcgcgtggcgggcgccgtggtggaggccgacccctgcggcgcggcgccgtgggagctcctggcgcggcacgggaggcggaaggaggggttcttcttctcggcgcgcgcgcggaggaagccctcggtgcggcggaccgtggcgggctgcggcggcggcggtggcggcggtggcgcgtggatgcacagctccaccaagaacggcaagtccgtgaccgacctcggcgtggtggtgcggtggtgcaggatcaactactgcttctacgtgcgcggcgagatgggccagcagcggagcaccgggtggatgatgcccgagtacgagatcaccgacccgcggtgctaccgccgcgccgacgacggcgaggaggacgacttctgggttctctgccatgtcaggaagagctcgaggccccaagccgccaagatctctccagccaagccagcacggcggcgcaagcccgccgccgccgccgccgcggatgtccgggctgcgtgatccggccgacggcggagatcacgaggtttgcctcgcgttgggattcgacttcggttatacttttgctttggaattgtgttcctttgctttattcctcctctagcatctgcccatacattccgtgtgatgaacactgcgaatcaaatgggacgtttaagatgttgttgttgtactgatagcgtgattgaattcatggcctctttctgccaagccgcatatggagttttttttggtgtttcagtttcaagtcgcggttggtgaatccgaaatcacgtgattaaaacagtaattatcgagcacggaaggaatggaatttttttaaaaaaaatgcagaacggagtaatttcttacagatcatcctgtttctgcttgatgcgatagctaatcgctgtcggtgctctattactgctccagctcaagctcgaacagcattccagcttgtcggccaaattggacatatctttcggcccaattggtttaatccccatctcttttagccgggccgcaagttatcccctcctcgtcacgctatctataggcccattattatctatctgtgttatgttttagaacaagctggaaatgctggttgagctcgagcagtagtagatagggatgaaaacagtccggaaagtttccgaattcccgacgtgtttttggaaacgggaagtgtcggtcagaattttttcgaaaaatttggaaacggaaacgaattccgaattccgaattttttttctcggaaacggaaacaaacatgataaggctgctattcgttggaaaccgtaatccgacggaaattttcaagaaatgaattcaaaaacagaaatgaattcgttggaaaccgtaatccggctgtgggagaacttcacggcgctgcaggaggaccccgcgctctcgccttgctacgccgaccagctgcgcctcgtgtacgaccccgtcgccggcgactaccgcaacgtgcccggcgtcgacacccgcgtcgtctccttcggctccacccgcggcttccgctccgacgatcctgctcgaaagtaagcgatatcatgtcgaatttatcgtactccactccacaaggagatgaacatgcaatgcatatagggacgtgtgcatggagaggctcgtggaggcgctggaagaggagggatacgcggagggagagaacctgttcggcgcgccgtacgacttcaggtacgcgccggccgctcccggcttgccgtccggggtgttctccgacttcacgtcgaggttaaggcgcctcgtggagcgcgcgagcgagaggaacggaggcaagccggtcatcctcgtgacgcacagcctcggcggcctcttcgccatggtgttcctcgaccggaccccgctgccgtggagaagcaggtacatcaagcacttcgtcatgctctgcctcggcgtcggcggctcgccgctgaacatgtggcccctcgccgcctcctccatcccgtcgtcgtcgtcgttggtgggcagcgtgctgacgtacgggaacaggagcttcgcgagcatgttctccctcctgccgtcgccggcggtgtacggcgacacgccactggtgatcacgcgagccaagaactactccgccgacgacatgccggagtttctctcggcggctggtttctccgacgacgaggtggcgctctaccgggcgagggcgctgccggtgaccctggatttccgggcgccgctcgtgccgctgacgtccatcaacggcgtcggtgtgccgacggtagataagctggtgttctgggacggcaacttcagcgcgaagcctcaggtggtgaacggcgacggcgatgggcagatcaacttggacaccgtgttggcattagaaaggttgatcggtgatgacccggatcagggttacttcaagtcaattttgatccccaacacgacgcacaagggtgtcatctccgatgaattagcgctcaagcgtgtggtcagcgaaattcttggagcaaattcaattaactaaggggaaactgttttaatccctcgaggggatatcccctcgttctttgcatgtcacttaaatggttata

SEQ ID NO: 9604 - DNA, 9095 bp, Oryza sativa
gcagaaggccaggattggtctcaccgcaagaagagagctctatttgtccctcgctatcaattggcgccaaaggttcgtgtggtggagaaagaagttgccccagctcaagcggatcctccggtcatcatcataagtgatgaagaagaagaatccaagcgcacccgttccaagattgagtgggtagcaactcaagatgatgaagacgagccgaacgagcctacaatcgacctccgatgcttggaagaactagagtgacttgttaagtcgttgtcttagatcgttgtgttagtttgcttgctttaagtttgcttgtgtgtgtctcgcatgtgatttacatcagtggtgggatgtaagtgcatgcgtttgtttgcttttgagtgttaggaagttggtgagtttagtggtgtgagagtcttcagtttgtaataatgaaactcagttaagatcaataaaagttaaagtaattctctatcctaagtagttccccggtttctcttcttgtgccctgttcctgccagatggtgaatactcgcagcaacgggaatggtcccaacaaccccaataacaataacaatggagagaacccaactctggcccaagttcttcctcaacagacacagcttatgaacatgatgatgcagcaattccagaatcagcagaaccaaggaaataaccatgtacctccccagaataagttagcagaatttcttcgtgtgaggccacctgttttctttagtaccactaatcctattgaagctggtgattggctgcatgccatagagaagaagttggatttacttcagtgcactgatccggagaaggtatcttttgcatcacatcagttgcatggctctgcctctgaatggtgggatcacttccgcctgaataggactactgctgaacctatcacttggcttgaattcaccgctgctttccggaagacgcatataccatcaggagtagtgtctctcaagaagaaggagttcaggtcgcttactcagggatctcgctctgttacggagtatctgcacgagttcaatcgtcttgctcgttatgctccggaagatgtgcgcaatgatgaagagcgccaggagaagtttttgggaggacttaatgatgagctttcttacccactcatggttggagattattctgatttccagaaattagtggataaggctatacgtcaggaggacaagtacaattgcatggaacagaggaaacgtcggattgctcacttcaagggcacaacaggggagtaatcaaaagccgcgtcttactttaggaccccagtctatgccacagggaggttcttcgtctgttgttcgtccgccgcgtcagttcttcaacaacaatgctggcaataacatccgcaatcaaactccacgtcctgttgcagctccaacacagcaacagcctgccaagagggagcaaggcagcaagcccgtggtgtgtttcaactgtggagacccaggacattatgctgacaagtgtccgaagccccgtcgcgtgtaggttgtccctgcccagagtaactctgctgtaccagcatcaaaggcccgtgtcaatcatgttgctgctgcagaagctcaagattctccagatgtgattttgggtacgttccctgttaactcagttcctgcaacagtacttttcgattcaggtgctacacattcattcttatctatgagttttgcgggaaatcatgggatggaagtagaagatcttagacatcctttgatggttagtaccccaagtaatcaagcactctctttgcaacgtagcccctcggtcagaatagaaattaaaggagtaccatttctggccaatcttatcttgttagaatccaaagaccttgatgtcatcctagggatggactggttagccagacatagaggtgtgatagactgtgccaacagaaaagtaactctcaccagcaatgatggtcgagttgtgactgttcatgcattgtcttctgagtctttaaggtcaagactgaaccagataactttggaagagattcctatagtccgggagtatcccgatgtgttcccagatgatttacctggtatgccgcccaaaagggatatagagttcagaatagatctggtaccaggaacaactccaatccataagagaccttatcgaatggcagccaatgagttggcagaagtcaagaggcaagtggacgatttgcttcagaaaggatacatcagaccgagttcatcaccatggggagctccggttatttttgtggaaaagaaagaccatacccagagaatgtgtgtggactatcgtgcgttaaacgatgtgactatcaagaataagtatccgctgcccagaattgatgatttgtttgatcagcttaaaggtgctaccgttttctccaagatagatcttcgatcagggtatcaccagttgagaatcaaagaggaagatatacctaagacagcttttaccactaggtatggattgttcgaatgtacggttatgtcttttggacttaccaatgcccctgctttcttcatgaacttgatgaataaggtgtttatggaatacctagacaagttcgtagtggtctttatagatgacattcttatctactctcgaaccaaagaagagcatgaagaacatcttcgccttgcattggagaagctacgagagcatcaactgtatgctaagtttagcaagtgtgaattttggttgtctgaagtgaagttccttggtcacgtcatctcagcaggaggagttgccgttgatcctagtaatgtggaacccgtaaccaactggaaacaaccgaagacagtttcagagattcgcagttttctaggcctcgcaggatattaccagaggtttatagagaatttttccaagattgctaagcccatgacacgattgcttcagaaagatgtgaagtacaagtggtcggaagaatgtgagcagagttttcaagagttgaaaaatcgcttaatatcagctcctattttgattttacctgatccaaagaaaggtttccaagtgtattgcgatgcatccaaacttgggttaggttgtgttttgatgcaagatgggaaggtggttgcctatgcatctcgtcagttacgtccgcatgagaagaactaccctactcatgatcttgagttagctgcagtagttcatgcgttgaagatttggcgtcattatcttttcggtactcgtacggagatgtacaccgatcacaagagtttaaagtatatttttactcagccggatctgaacatgagacaacggagatggttggaattaattaaggattatgacatgggaattcattatcacccgggaaaggctaatgttgtagcagacgctcttagcaggaaaggctattgcaatgctaccgaaggacgacagttgccattggaattatgcaaggaatttgaaagattaaatttgggaattgtcagtagaggtttcgttgcagctttagaagcgaagcccactctaattgatcaagtcagagaagcccaaattaatgatccggatattcaagaaatcaagaagaatatgagaagaggaaaagctatcggtttcttggaggatgagcaaggaactgtatggttgggtgaaagaatttgtgttcccgacaacaaagacttaaaagatgcaattctgaaagaagctcatgatactttatactccattcaccctggtagtactaaaatgtaccaggatctcaaggaaagattttggtgggcaagtatgaagcgtgaaatcgcagaatatgtagcagtatgtgatgtttgtcagcgagtcaaggcagaacatcagaaacctgccggtttgctacagcctttgaagattcctgaatggaagtgggaagaaatcggtatggattttatcactggtttacccagaacgtcatcaggccattactctatttgggtaatagtcgacagacttaccaaagtggctcatttcattccggtaaagacaacttattctggaagtcgattggcggaattgtatatggcaaggattgtgtgtttgcatggcgtccctaagaagatagtgtctgatcgaggcagtcagtttacttcaaatttttggaagaaacttcaggaagagatgggttctaagctgaattttagtactgcttatcatccgcagacagacggacaaaccgaaagggtgaatcagattttggaagacatgttgagagcttgtgctttagacttcggtggaagttgggataagaatctaccctatgtagaattttcgtacaacaacagttatcaagctagtcttcagatggctccttacgaagcactgtatggtcggaagtgtcgcactccgcttctgtgggagcaaacgggagaacgtcaggttttcgagacggatatcctaagggaagcagaagaaaaggtgaaaatcattcaggaaagattgcgagtggctcagtctcgtcataagagttatgccgacaatcgccgtagagatttgagttttgaagaaggagattatgtgtatcttcgtgtcacgccttttcgaggagttcatcgttttcacaccaaaggaaaattggcaccgcgttttgtgggaccctataagattgtcagtagaagaggagaggttgcttatcagttggagttacctcaatctttggcaggagtccataatgtgttccatgtttcgcaattgaaaaagtgtttaagggtacctaccgaagaagctaatcttgaacagatagaagtccaagaggatctgacctatgttgagaaaccaatccgtatcttggaaataaatgagagaagaaccagaaatcgagttatccgtttttgcaaagtccaatggagtaatcactcggaagaagaatcaacttgggaacgagaagatgaattgaagtcagctcatccacatctgttcgccagttcttccgaatctcgaggacgagattctgtttaaggggggtaggtttgtcacaccctgaaaattcaaaatatataaattgttgtttaattggaatttttagaaataattttaaaaagtcttgaaaagaagatctaatttttaattaataaatttcaacataaaatgggcccagataaaatttccttaaatactttgcttaattctataattcctagatttttctgggatttatttgagctaagaaagtatttttaataaatggaattgcatttaagaaataatttaaattgaaaaaaggttttaaaaagtcttcttttggctttgggccgaaagtcggcccaaaacctctcttctctctcctcggcccagccggcccagtccgccgcagccgcgcgcgccctcgctgtcgctgacaggtggggcccacctgtcagtcgtcgtctaccttcggccgccgccaccgaaaccctagtttcgcgccgccgccgtttccttccaaatccggccgcccctttccttctccggccgaatcaatagaggggaaacaatctccgggatctcctctaccttttctcctttggaatcttcggctaaatcggtttggaatgagttggattcgagttcgtctcggattcgttcttcccgatctttccttcctcgtcgccggtcgccgtgggccttcgccgccgcctccgagcccctttaaaaggacccccggtgtttcctctacccgtcgccaccttcgccttcgcctctcgtcgtcggaatcgctctagcgccgtgtgccctagcttcgccgtcgccgccgccgctccagccgtgctccgccgccgttccagacgtcgccgtcgctcgggaagaccgttgtcgtggtcgccaagtcgtcgccgtcctcgtccgccccttcgccgtcgccggagatcgtcggagcttcgtcgccgtcgacaacccgaaggtttccgccgtttcctcctcgtcgccgtcgtcgttcgttgtttttccgccgccgttttggtcaccggtgtgttcgccgcgtcgtcctctacgtgctggtgccctccgtttgcgtcctcgcgccgccgttcgccggcgagcgtgcgccgcccgagccgtccgctccgccgagccgccgccgctgtcggtgacgtcattgccgacgtcatcggggtcgtccgccgtgagccggtcgtggaccgttcgatctcggccgtccgttttggattggatcgatctcggccgtccgttcgcgtgaaccgccgcccatgcgcccggtccaccgaaaccctagccgctgacgcaataatccctcttttccttttcaaaaataattcattattgcgtcataattcaattttaaccgatttaagtgttttaatccgatttaatcttcaaaaattcataactaattcatcttagctccgatttagttggttcaagtctctaaatttttctaaaattgagatctacacattaaaaatatccacatgtactgttcatgcttgtttatgtgctgttttggtgattttgctcttttctgcttagattccatcgttttcggagagtccgttttcgccggagaagagcttgaagagttccaaggccagcaaggcaagtcacacagatcccaaacaaccctttgagcatgttgatcatatttaaagctattgtttcttttcaactattgcatttattttcgaatgtcattaggtggaattaacctattgtttgttatagcccttttgttcttgattactttattccttgataccttgggttataatttgactagttgagctttatttatattggttcaactaaatattagatataattgcttagccctgcttagaaaccttagcacatttatgggataacttatgattcactattatttcatgatggcttattgatagttcacgatggtcaatcgtgattagttaattaattaatgtgccaactaaaacctgataatggtgggttgtgagcacatggttttgatggtcgtgctcatgacaattaaggaccggttcacgagtttcggttgtgaaacattaatcgtgccaaccacaagccagcatgggcaacggctttatcttttgtatagcatggttcgttgcggggcaccagactgagaagtggcggagataagcccacgggggtcgctggggagtccatgccttgtttataagggggtgattatgatccaggaaggtgcgctgcagtggattgtgttatgcgaggggtattgtcacaactcctttccgaggtaccgtggtggtattgaggcacatggtgacatgatgtggggttgtgtcttgtgggtacagtggtacacctctgatcagagtaaaactattcgaatagccgtgcccgcggttatgggcgggtctaacaatgtctttcgtgattagtctcacccttctcaccatagtaaatgatgctataattggtaataatttgattagctcctggtttggaatggtacattcctggtttggagatagaactgtgcagccgggatggttgttcagaatggttgggcctatacaacagggtatgttgtatagcgttggattaatattgtttaattacttaactgttttattaaattctcaaatgtttgctaaatgctgcttttgcaaatgaaaccctattatgccatcctttgttatcctgtgcacttgcatatttgctgcgtggcttgctgagtatgtcatatactcaccttgcaatcattcatcagaggaagagttctacaatgaggctgatggtgtggaggattaggtgtagccttggtcaagctgcctgtggagtggagccgtctgcgccgtttattttattttccgctgcttagatctctattgattgagaggaactatctacctctgtaatgacattttattcgcttattaattagagtaataattgtactctattatcaatttgttattgtgtgcctcggctgattcctggacgagggttcacacacatgtaagcgtttggaattttggatagaaattccgggcgtgacaagttggtatcagagccccttgaccctaggttatgccaaatggttacccatagaagccctctaaaaatattggaaaaagtagaactgttctcctccctttctcttttaattaaaccaaaataatggcacatgcatttcagcaaaatttcataatctcttttaatggttctcattcaaaatttattccagtgttattattactgtacatctattactgtactaatggctcatttaccagcaaaagttttacaatgttgttttatttaatcttgctgcaataaaataaatttagcatgttgattttataactttccttttatttcttttgaaacctgttattcaaaagcacaaaatttgtaaccttgttttcaactatttcaaattatcttgcaagtttggtttaccttatttacttaccttttactttgattttcaaattttattcaagttaatccaaaaacttgtgctgttaattggatagatgtcttaactctctcctttcacttgtctttagatgccgcgctacaagcctgagtacctgtttggtgttgagggttttgtccaggagttgcgtacgatgtcctttgccattggatttgggactgcccctttttatgcccagattcctcatgatcgtcatgaagagaagtgccgagtcaaagtcaccttaaacagcaatagtgaagatgtcccctcagtgatgttcgaagctggaggaagaaactacatccatgcatgtcaggaagtggcaaggatcgccataggagagctccgtgatcgctacagtgatcagttggccgatactgagtatcgctaccatcctcgtcaaccccagggaagtgaccgtggcagttaccttgagactgaaggaattgagaatgatgctaccacaaggcatttggttgagatgttgtgggctatggatgaaagtcgtgcggagactgtgttagcggctcaagatcgtgaagaccggaatcgtggtaagatttgcaagttagaggacaaggtggatcgtttggagaaggaactcgccgcattgaagggagaagcaccgccgcagaaggccaggattcgtctcaccgcaaggaagagagctctatttgtccctcgctatcattggcgccaaaggttcgtgtggtggagaaagaagttgccc

SEQ ID NO: 9605 - DNA, 13203 bp, Oryza sativa
gccacacaccgccgcaccccaccatcgccgcgccgacccggcgagaagggagggacggcgccggtggcgggggagtcggccggctggggggagggggagagacgccggtggggagagggagggggagaggcggcgtcggggcgggggaggaagaggcggccggctcggctcggctggggggagggttagggttagggtttcatcaattttaatctgatctgagccgtccatcaaaactaacggctgagatcgatcgagggtttgggccgcacgtgggcccgcggtccactaaatgaaaggagtatgggggtattaagtagactttggtctcttgcgggctgaagaagaaaatgggctgaaaaaggcccatagagaaaaaaggatttttatttagatttttatttcaataaatgctgaaatgatatttgtattatcaaaattagcaattaagctaggtaaattccaagaaaatttcaatgagtgtaattaatatagaaaatttaataaaagttaaatccaaccacaacattttatttcttacacttactttacttataaattaatttaattgtatacctacctacttaaaaaatacctaaatatttcagaaaatttatatttcatttaattagaatttaatatgttttaattcaactttatctgttttttctattcgttgcaacgcaatatcacttttgctataatttaaaagagtgtaattaatattgcagaaaattttatatttcattaaattacaattcattttcttcatataaatagttcaaatcaaatttcagtcaccatatcattacccggtgcaacgcacgggtattttgctagtattatacaatatttatagaacttttgcaaaataaagagcgattaaaatttaataggctgtgtcaagtaaaaaaaacaatcaaatactaaaagatatgttacgtactcccttataagaacatctgttagccaatcaaatcaaggtatatatacatatttaattaaaatttaaaaattgataaggacgcaaaggatatttcttgccactacaaatttgcatgagaattgctagaaataaagttttcagggttggagtagaattttttttttgttagttctactttcgtgagaaatgccccgtcattgtaaggtctaaaacattatttgaaattgggtataggtattaataaactaggtgagtttttagataatggataaaatccagtgtttacttcaatagaagctatagccattattacatagttcttagttgaaaaccaaatataaactaggtgagtaagtggaaaaattaaataagaaatattaaccaaatataaactaggtgggtaagtggaaaaattaaataagaaatattatgattggttgagacaagggactggatactcaattgctatattctgatataaactttgaatgcttatattttgaacgaggaaaagatgttcttttatcataaattcgatttggtcttttttatatatatataaaaaacgagtacggtcgttatttaaaaatgtccattttgtaaagcttatttttaaagaccatggcttatttagctgaatataaagctcgataattaatatttttaaaataagtacattttaaataatgtagacttacataaaaaaacagtccattttataaagcttatttttaaagaccatggcttatttagctgaagataaagcttgataattaatatttttaaaataagtacattttaaataatgtagacttactaaaaaacactttttaatagctatgccataaatagattaaaatatgatgatttttaattgaataaatctacatgttaaatgaacaatttaatgaagttggcctaatcctaccaaaatcttttgaaatttctacgttcatgcataagaacatgctaaatggggcgcgccatttggcgcgagattttctagtatagtactaatatttatctgttcgacgcctccaaataattcgttctcgtgtagtcgtcagctacgtaccgaaagctttgcgctttgcatgcagcaccatcaccatctagttctactaataaccagtaagtccatacttctcgatacaactatggattaaaatataaacatgtaaatttaaatgcaaactacaaaataaatataaacacggatgtttaaattcaaactataaggtataagaaagaatacattcttaatttgtagattgagagattgagttttaaattgaacgttatgaaaggatggaatataggtttacttaaaagccgtgggatcggtggaagactaccagcacatcagcaatttttgcaaaaaaaaccctacacttttggttaattacgcaccggtccccgctaatatccgccgtccgatctcgaggtagggtcgatctggccgtccacgttcctcactgtgctggcccttccgcacccgtgggatcgtcggatctctaacggacggtgtggatttcgcaagcctgaacaaaccctaagtcaaggtaaataatatccaaaaatagaaaaaataaaagagagttcaagtaggaatacaaatttgaaacaactgaaattgaaaataaaaaataaaaatattaaaagaacacaatacgatattaattaaaatttgaaaaaaaaaataaattccaaaattagaaaaagaaaaataagatttcaattaggaatataattgtatcgctgtgggggcaagaaattcccacattaatcggagaaaaagaaaaaagagtccaagtagaaatacaatttaaaaatagctgaaattcaaaattaaaaataagcaatattgaaagaagagtccatataagaacacaatacgagattaataaaattttaaataaaaataaaataaaattagaaactagaaaaaaaagagtccaagtagaaatacaatttaaaaataactgaaattcagaattaaaaataaggaatattgaaagaagagtccatataagaacccaatacgagattaattaaaattcagaataaaaataaaataaaatcctaaattagaattaaaataaaagaatatttcgtatagaaatacaatttaaaaataactaaagttcgaaatttaaaataagcaatattgaaagaagagtccatacaagaaaccagtacgatattaattaaaattcaaaataaaaaacaaataaaatccagaattagaaaaaaaataaaaaagagatttcaagtaggaatagaatattgaaacaatccaaatatctactattataaaaattgaagatgtttccacagtcggtcatctgtgtttgagtcggttataaaaaattgaagatgtttccgcggttcgtcatccgtgtttgagtcggtttttttttggtattaatctatatctcttatctatctcttctctactattataaaaatttgttaacgaccatgtttttatcggtattttggtaagtcatccgtgtatgagttggtttttaagtttgtttgcttttgaaaatacatatccgtatttgagtcggtttttaagatcgttcgcttttggtaataccgaaagaatcatgcaagaaatctgtttaaaaaactcgcatgctaacttgagacgatcggactcctaactacagctcatgattttctaaaaaaaatatatatccaagcgaaatcccacagtgtattttatcttaactaaaccattgaaattagaaataaaaaagaaaaaatattaagagaatagtctatatagaacacaatacgagattaattaaaattcaaaataaaaaataaaataaattcaaaagatagaaaaagaaaaaaataagagctcaacttgaataaaatttataaataacttaaatttgtaagaaaaaaataaagacaattgaattaagaggcaatctagaacacatgatgagattaactaaagttcgaaataacaaataaaataattttcaaaaataggaaaaaaattataagaattgaagtttgaatataatttatgaataaaaattatcggaatgaaaaatatgcaatttttttttaaaaaaagtccatctagaaaacaacgatgacaaatagcattaaaaaggggagaagcaataggcatgtaaaggagtagagtgttggtggttgatgggatatcaacaaaaactataaacaaaaccccaaatagaatcacaatgatgattaagaggagtgacgataggtatgccgttaagcagcatggtcacgacggttggcgggacttatggataattaaaaaaaccacaatgataatcatattttatgtttaaaatgtcaatggcaataagaaggggaagcagcgggtttgctgtagaggagtatattggtgaagccactaacgattggcgagacttatagaaagtaaaaaggaacacaaataataattatatttgatttttaaaatcccgatgacaataaattgaggtggcaacagatggccgtagagtagtaaattggcgatgtttgacgatacttctaaaaattatgtaaacgaaacccaataagataaggtactctaaaaactataaggcctaacttttaaagttctcaagaggatgaatagaagtagtgatagatcaagtaagcaaataaaaatgtgacaaaggagtaaagggtagcgactggcgttgcttttaaaaactataaaattattagaatagcatgaataataattttaaataaaattatgtgtaaaaatagataattttaaattgatgatagccgtgtagttgtgcgggtcatccaactagttttaataattaagggagttttatatcagattttatggttaagggactcaaataaaactacatagttcatagcctaaagtggactttttaaaaaaatgaaaaagaaaagaaagaagttcatttgggccttctcggcatggccaggcgcttaattacagcccgcaacatgtcaggcactcaggccgggcctcgagcccttgatcatatccttttcttccttgtccaccatccccagttccccatcacaaatatcttcccataaagaaaccctaggtgctcattccaccgccatcgcctccggcgaactctccaccgccccctttcctacatcccaccactattttataagccagcccttcatctcatctggagatctggttctactcatccaggaaagccccaatctttatcatagcaaggaggtcatgtcggaatcggccctcggtaatagttacatcaaccaatttttgttatttcagtacttctttcccattcttcttcttcttcttcaactcggagtcttctacggtgtatatctcttccatctccaaaattatttgcgaatcgccctcagatctggagctgttcctcatgtcgaaatgtcaaatctataattctgatctcttctgaaacattcagagcctaattaccgatttgatttcttttcggcgtatctagtacagcaggaggtattgttttgttgaacagaaacatcaatcttattttttgatttgttcgatttccataagttttacacatcactcgttcaactagtatgtgaaaaacttctttttaccgttcatttcacatatactagataaatatctgtgatttgcgatggattaaaataaattaaacgcgtgctaatattgcttggaacaaattaattgcgaggttttggggacagtttcgtgcttgtagattatgtagaaggactattttgtaatattaaaacacgaaggagtagttggtaaaagaaataatctatacaacagagttggtgtggtggccgattcactgccaccaccactgccttctttaagaatgaagtataggtttctatactattacacacaatattattatatccagctgtgggggtggaaattcaatgaattcatcaatttcagtgatgcatgtgccgtttgattcaaaatatatgttgttgcagggtatggttcctaccagtcaaactattttaactttgaccatcagtatataaagtactgcacatattgacagtatattcatcacggaaaatactcataatatttaatcatctttacttgaaatatcatgtttccatagatattgctagcctaagtgccactttgtagatcgtgtccatgtcctaaatatcatttattttgtcttcacagtcttaaggatcattgtttaccaattgtatattatattatattactagcagtacaaagttatgatattcttttgaatgtaactagagattaatcctccttgttacagacaaacatatagtggtgaaaattcccgatcattttctgccagatgctttcataggagaaagtgttggtaaaggtaaagaagatggagcaaccgtagataacatggacccgtcccgcccttttctagttatcaagaagtctgatttggataaggctgatgaggtatggtagcccatctgcactcttcctctaggtttctgtcttccattggtacctggctgctgacattctctcttccagtgggttaaaataaaatatgcttggatggccaagtccttaacaaatgatataatcatcccagaccctacccctcaggttgctctctagtcttcatgtacagaattcagttgctagatcatcctgttacgtttgtccttttttaatcctgcagcattttagtttacgtaagttgtctcttccattttctcaaaaaaaaagggtgccctttgctgaaatgaaatgttttgtcatgaaggtgcacggcaatgagactttatgttttgctttattacattgaaagctgatttcttttcatctcttctgattgtgaacggaccaatttaggtggtgcgggatgccttctttgatatatctccccgcttggactccgtcttgagaaaggacagtgtccggtgcttcttccgtttgttcgcggaatgtactgcggccatggcatttaagtgtaacatcacctcagaaaccttatcctgcattgtcaggcataatgccttgcgatgtgcgaaaactgtattggagggcaaggcacctcagctcagttgtatgcatgccaatccaaactgcattaacccatatggaatttttccactccatgaagctgctgaacggttctctgttgacatgatcaagttgctgttctgccatggtgcttcagccaatttacacacagtcaatgatgctggcattcccggactactcccgctccatgttgcagttggaaatacttgcttgcataaatatctggaggacaatctatctcctgtgcagtatcatgaggattatatctacaagctcattcatctgctgtgtctacctgagatggtttgtttcacttaacgctctttccaaagtatcatcttttcagcatgacaacaaaatgtgttcctgtttgtcatcttttaaaaattttcacatgtgctgaggcattttcttatttcaaatttagaggcaagaagtcagcagttcaaaattccattactccctccttttctagtcattgtagttttgtcctaagtgagctatctgtatctgaccgtctatttctggtcatatagtttaacacattaagatttatgtttttatattcaccatgagaaatactttcataatatataatttgcatgttgttaaaacacacgaatttatagaaattgatggtcaaggatataaatatttgactttggataaagctagtaatttgtaacagaggaaatagctaaatgctccctccgtcctataatatagcaatctaggaccggatgtgcatgtccagattcgttgtactatgaaatgtctcgtccggtcctaggttgttatattatgggacggagggagtagtaggttttattccgcttgatcctagttcatccttgctacaattagtggaaacgagatgtaataggaagtaatttttcactgcttgcttgcatacaaatgctcaaagtcatttagatttcattcctttgccttctttttattgtgcagaaggtttttttggatacagttagactgcttgctgaaaaaacagataatctagctgatgagctctggaattacatgaagaatgacaagcttgtagaatccgcagttttactcctggcagcccgaaaacatatccgtgagggcaaacctgatgggttcgacattatcgcgcaacgtatatatgaggactatgattccctagtgtgtgataaaggtgatactgcagaggggcagaagctgctggaggaaagaagagcacttttgaaatgtaaatgtctgattgtcactataatttcgcaagctggtgaggttttggataactacattcaagcacattcagaggtactattgtttttttaatggtgtaaaatcacagcaccatatgatctcttactcactgtatattttttcatattggtattaatattttaataggtaattccatggctccatgccctgatcctaacaagaatgctagtgatttgttgatttccgtggccactttccgttacttgtactatagggtagcatatccagcataaagtgaacggtcagtccagttttatctatcttcaacattgtgttaaaaccatcacaagagtaagctgtctaatgaagcttatgagttatgacgtaagagcctccgctgctttgagaagctggagccctctattgttagggatgtgaccttagcatgttgcaggagcttctgtaccttgggttattttgagtagtcatggctatccttgaaacatattaaattagattactatcctctggttgatttgagataggtttgaattagggcatgtatacaacagcaactaatagcaggctcttagcattggtaacaaggtaaagtttgctgacatggatgagaggggaaaggagggtgaaacatcgttgttaagcttaacaacggcttaacatcgactcttagcgtttataaaaggaaactttgttgcatgaggatagataaaagaaaagaaaagaaagataacaaaaaaactgttttggtgcattaatgtcagaaccttttgtcgtcttatctattgtaagagatagtatctgaatagagcctgtagcagactctagctggtgattggtactattatttggggcatgccatttgtcaagtaatccctgtgaaatttcctccctcgcccaactctagtaccatatcccctacaatttgtcctgttatagcattactcaccagttcataacaactactagcttcttaggggagccaggttctgaaggctcacccttccaaaagaacaactttagggtattcctgtcagatgctgatatgcattctaatatctgagttgtggagatgatttaggaaacaaatctcaaatagtaataaaattttcatgcatttgtatcaaccttttgtgttagtgatttatagcgtggaaatattattgcatttcaattcaactttgtattggatattatgtgagttgttttttgcttttgcttcaagtaaccaaaactgatttaacattatttacagaaatgtatacgaaatctttgtataaaaatgtcaatttatatcaattttattagagatgcaacaagcctctttaatcgtagttgtaaccacagcgcaggcatatacagagtaactgtgtacactttttgatatattttagtgatgttggccattgcaacttttgcatgtttcatgaatacttgtgtgctattatctccttgtgaattttcttgatgcacagcacataacggcaaaaaacgaaatactttgcgtattaattattggttcatggcggcaagtggcaaccaataggttttgttattgtcttaagctgactacatttccctgaggatattttgatattgttgacacaaacaagttggaaaagttaaaaaaaatatattggtattagtggtgattttccctagtgcaggctcatattttgcatattttggtagtatatatgtcgcatgattaggtccacaacaatgaaactgacctgatgaagttcatgttagcgagaaccactatcatgttgtccaccatgaaatatgatttagtgtgttatttgtccagtttataaatttggggtaaaaaacaactagtttcttagttcagggcatatgcttcaagaaagcactatgagcctaggcccaaacacattacattaaaaaatattgaaaaaaattacactaaaacagcaacagaacaccacccaaggtagttcatctgcctaatgcaccatgtataatgcccagttcaaagttcagggtgaaaaatggactacaaggaaatttcaaatgccaaaaaatagacttttacctttttataatttatagtcaattacagttaccaagttgaaatttgaatgactaatgttcatgccttgtaccttttgaaccatctagtcgtattatttggttcctaatcctgaatatagttaaggcaaacgaagagaaatagttacgtaattttgaatatgtttgtatatgtactttattttaccaagtaaacttgtattcgatgtgattgcaaactgttctaccttctttcagttcatctgttataattaatttttctctaaaccattcttttttgtcatttctttgccaccaatgatatcattgtactacatgatcatattatcaatatatgcactttattttaccaagtaagcttgtattcgatgtgattgcaaactgttctaccttctttcagttcatctgttataattaaattttatctaaaccattcttttttgtcatttctttgccaccaatgatatcattgtactacatgaccatattatcaatatatgctatttttatgtttcattttctgacatttttcactatctgatataatggttctaatgtcattcaggtgcccaatgtggaggtccttgcgcgtgtttcatatattcttaaggaattcgggttttgccctaacgaagaatacattgacaccatgatcctgtactgctctttttgtattcaatataatattttttttctatgcaaatgtttgttgtttattaattatttcttaaacttgttattgaagctgtccatataacaagatttcttacagcgacatagttcacaaaggtgtgtgtttattatttaagtaactgtttctgaatttctcagaaagagcctttattaaattttttatggtcatatagatgtaaccaaggctgttgcacaaatgtctacttctctgcctgctgcagaaaaaaaggtaattgtattccgatgttaccaatgatgatttcttatattcaccttgttaattattgtgcaacaatgcgtggggagtatgatgtaccaaagcatgcagggagcagcagcagctaatgatcagttacttaggttccaagttaggtttgctattagttgccatcttactggctggtgcatataagccagagtgcctgccagatcattatcttgtagttgggattctagaaaagtagaaactctatgtctggtctcttctctatcctggtaaaaggttgctcggcagtttttacagcagtgcgtcattctagattatagtactgtcaacaatctgaaaataattgattttctccaatgagatagaatgttttgctttaagtattgtgtttagatttgatctgcctccctttctgtgtgtgtgtggtcttgcgatagatttttggtgtgcaatggtttgttttgatatttgatcatgacctagttaagatgttagaatgaacgaactcagtatgattagtcctattgtagttggatggtaataaatcaagctgatagatgtctgttatgcttctggttgttatgtttctgccgtgcagctgcttactggttcagctgcttttgcttaagcaattcagtttgttgacatcacttgaatataaccagaaaacaatttattctgttgctcaagtaaaacacctctcccaggatatatgaaaatattgtgaatcaagtgctctttggttgatcaagctggaatttaacaatttttttttgggtttcacaaagcttaatcttcatttaattatgggacaggctgcgagaaaaaaggcacttaaaggatgggatccaacattcataaagagaaattttttcccctactggagatcagtattaggggcccagctgtctgtatccaatggagcagcagatgagaagtcaatgcttcatcgtccacagttccgtaattcagtagtgagtaacgagtcttcgagtctgaaccataatattagtttcttgggaagaattcagcaactgagtggtactcatgaatcgagaaggtacagtactgctgcattcagaatgctcacgaaggtgctaaagacatgagcaaaaaggtatgtcgtgagttttgtttcagtctacagttactgaacatgtggaaatcattgctgtgacgcctatattattaattgagcaatatatcgtaatgtcaagttgttagggtacctcaatagaatttcacttgtttaaatttacagtaatattttcttgtttttcttcgtgcaggtgcctagtggcatgttgctgttgataaccataggtctgcaaagtattatgctgcgcacgtcttttgcggacaccttaagaaggttgcgaatatacatgtgaccaccaaaaccttgttcaaagtgatgctaagtactttaaattatgatgaaatgcaacatgccgtgtgttgtattcggcttgaaccctcgacccgcgagatgtggacatgcgtgccagcatgttgtacttgtaccaggttcaacgttagcttgaacactgaacaagttaaatgtgttgcaaaatgccatttttctttatcagcaatctcttctacctatatcagggtcatgattctagaatgttattgggccacgtggcagcctgaaaaattagctaaacatcaccaaaatttttgccacgtgtcaatcagatataagctcttgtgatgtcccttgcacatcagaatctctagaaaacccattactttacctatctctttgcactaatgcagttgataagtatcgaccaataaaataataaagagagttaataagtgcttcacttttgccaaccgatagccggaatcagcttttttgtgatgttttgatggatgcaaaagatatagttatatttaacatgtaaaatctataactaatataaatattcgtgtttttccggtcgtcacatctaattttcgtccatacacaatccgattcggttagca

SEQ ID NO: 9606 - DNA, 2840 bp, Oryza sativa
agaacgtgtgagcaaggaaggtgatgaagcttcggcgtcatacaactgcaggtacatccaccatccgccttcaagacacattcctgcacggcttgcttgcgatagataccacgcctgctcctatcaacacacattatttcataccgatgcacttgtgtgccttgagcaacaactctatgtctccggcctttttgattttatcttccatgtactttgtcactacgttgccaaacactatgttgttatcggccatggacggaccaattttcttgtatcgatccctaaagtaggcttgcgtgccgtgaaggatgaattcaacaatagcaaccaatggaagtgcccgaactcctcgcattacccagttgtacacctctgccaaattggttgtcattatgccataccgagatccatcggtgtcgaacaatagagcccacttctccttaggctcattctcaatccactgagagaaatttctgatggccgaccctgacctccttctcattgttggtgggtcatcatgtaatgcaccaagaggtatgggaggctcgtcaccttcaacttgtggtctgcgagattgctcatctgtttgcttcgttgtcaactcatccaacttgtcccacaactcattaaatttcttctcttggttctgtgcacagagcctcttaaagagctccataagatgcttgttcttgaattgcttgtagaaatttgcacccatgtgacgcatgcaccaccgactccgaacatcaggccacttagctggaagtcccttctcatcccaaccgttctgcaagtagtcaatagcccgcaacatacccgcatgacgatcatgtataaggcaaacgttgggcctcatacgcaccactgcaatgtgcactctctctaggaaccagtaccagctttcagtgttctcactctctacaaatgcaaaagccataggtagaacctggttgttcccatcacacccaattgctgtcaatatctgacctcggtatttacctgtcataaaagttccatctatgcatagaacaggtcgacaatgcacaaaagcattgatgcaagcacccaatgagaaaaaggctctttgcagcacactctttgttctatcttcaaccgatgtaaatgtatgtaggtcatagtaagtattattattcctctgggcaatggtggctaacaaacgaggcaaattatcataagaagcttcaaatgtgccatacctcatctcaatgatcttttgtttggctctccaggcctttgcatagcttatggtgtacttgaatttgttctcgatgtgcctaataattgattttggttcaaagccaatgttaccaacaacactgctgtacatctcacttgccacaaaagctgaagtgatgtttcggtgatacttctccaccccttgtaagtagcacttgtgctcggtcacaatgctaactttccaataatcattccatttagccttatatgcatggacacgccacggacaatcttccttcatgcacctcacttcatacacataatttgttgacttgaccaccctaaactctctctgcaatgaaactgcccaatgcttcaccgcctccttcatctcatccttatgagcataccttgcaccctcaattacctcgtactccttatactcccagggtacatgatcaccctctgatataacaagaccagagaagtcctcatttgcccaatcagtggccattacatcaccttcctcatcggatgatgcgtcgtcctccgcttgctcattatccgaatcttccctctccatttcatcaacaattataccgactctctccccctcatccgccatgcccatggcctgctcctcccttggttgattttcctcattttgcatcgatggtccaacaacatcccctgcattgctaggaccctccacatcttcggtttgcattgaaacatttgtatctttctcttgtaccgacacaaatataacgaggggccatgaccgttcaaaagccatttccacataccgtctccaagcagcagtgctgtccatcggcattagttcccaaaaataaccttctattgcacgactcactacaacagatactgacattgtgtatacttcttggtctattctaaatcctctcaacaaccaactataaattgactgaaatgttctctccgcaggcctatcgatgcccttagatgtcattacaaaatctgacagatcaacaccatctggaccaaatctaatatttccttcaccgtgaactatctgaaatgtgaccttacttgacattgtgcctgatgaaaacaataactgcgttaacctcgcatttctgtactacgccctaagttacattctctacaatattgttctctaaatttctaaaagtaggttacattctccagatcaaactaaactacatcttacaattaacactactgtctatgtctcaattcatactattatattctatgctctggatctacacatatgtgctgtgtgctacagatctgctaaaatatatggaactaaaactaaaacgcaacatatgtactcaaacgtaatatattagtacaaatgcaaaagatgtatgggagcatacctgtgatgaagtgagcgaaccagcagggcttcgccgctccccttctgctgccctcccctctctctctttcgttttttttggatttttagtgaatataatgaaatttcataggggaggggctgggctttataggggggaggcaaaaatcgccctcccccagggcggcaagggggccgcctgcaaaattccatgccccctcgccgcccatttgcaggcggccccccggacgctgcggaggcggcctcgcggagggcg

SEQ ID NO: 9607 - DNA, 7562 bp, Oryza sativa
cttgcatgtttgtggagtgttatatcacatattaatacatcttcttaaatttttttaatttttttcataatcatttgaatgacatgcaaacaacgaggggatatcccctcgagggatatcaaaattctcttccttaactaagccacttcttgaatctttgatagcagacatgtattatccaaatccaaaactgagtgttccttttgcttctagttgcagctttcattttattctgaaataataaataagtaatcttgcatgtcatgatgtcaatgaacttcatcttgaattaatttctagagtcaaaactcgaaacgaaatctacatgatctgaaactatctgttaggaattttgcgtgtctatcagccgtgtttatcatcaataagaacaagtataatagcaggctacaagctagctatcactgcacataaaacatgatggatggagtattagcgatattgacttttttgctgcacatgattggcattgtagcgcccgttccgtcgtggcgcctagcgggaaaactatctcttaaaaaccctatttgcgaaatttgtttcttttcttgtcgtctagtgtccgtgccatctcagatctcaaatccccgatctatcgtcgaattcaatcccgaatccaaatccttccaaatcaatccctccgcaaaagtctatttcgcctcccccgggtttgatgggccgaatctctctcggcccatctccctccctctctctctttctctctctctccgctctggccgcgcgccgcgcgcgcgtgcgcgtgagccgcgccgagcgtccccccctccctcgctctctctctccccgcctccatccctggcgagctcctcgcccgcggaatcggcccccgcgcgccgttgttcgcgcgcgcgcgcccgcgtggtcgccgcccgtgccgcgcctgcgccgtctgcgccgcccggccccgctgccctgccacgcagccgctcggccccgcaagccagcacgcgtgcccgagccgtgccgctcaaatcgccacgccgcccgttgcttcccgcgcgcgcgtgccgtggtggccgaccgcctggtcgccgccgccgtcagcgcctgccgcgcctgcccgcgcctgccgcccgtgtcgtcgctccgctccaaatcgccccgccgtcatcgccgtcgtcatcgactcggccccgcctctccccgcgcgtgcttccaaggaaagaaggcagggctcctcctcatcgccttctctccctcctccttttcccaaagaagcaaggaggcaagccccctttccctcttcctttcttctttttcctcccatcgccggcgtcacctcctgtcgtcgttttggccgctagccgggcgccagcccaccggcttgaccgtccaaagtcggttcccctctcccaaaccgacattgtcgcccctttaaacccaagctcctccctcctccaatcttcctcgttttcgtctctcgccgccacgccactgtcgcccctgttcgccgtcgccgatcgtcgttgcgcgtgtcggaggagccggcacgagcgaggacgtggaaggggactccgggcgcgccctccccttcctcttcctcggcccgaggccgaaacgatcacgtttcgcgccgtcggctctcgtcactgcgcccgcccgcacggtagtgcatccctccattctccctcctcgttccatctcctccctttagactcgggtagtagcacgagtagcctccccgtagctagctggcgccgccccgacctttgccgtcgctcgccgtgtgctcgccgctgtcgccgcccgaactcggaaacgcctctcgtcgccagcctccctcgatgcgtttcctcctaatccggcgcaagggacggattcccgtagccgcgtagatgctctcgccgccgggaatcggcccctcgtgacctcgtcaccgttttccccttttctctccgccggtggccgccgccacaatccgccgccgtcgagctccctccggcgaatccgagccgttggctcgtctcccctcatctcgtgcaaccacccggtgtgctcgctttcgcctgtatcgccgtgattcgctccgccgctcgccgccgccgcccgccgtccattcgcggccggcgtcttcgtcttcctccagccggcccgcgaggcagccacgtaggtgccacgtcggtgccacctcggcacaaccgagtcggctgacccggtcagccactccctccgttccaccctccccgtgcgcgcggtccatcgcgagccgtgaggctgcgcgtgggcccgccgcacccgcatcccccgcgagccgcgcgcgtgcgccgcccaaaccctagcgccgcatcgcgtgctccctccgcacggtgaaccgtgccaccgacaagcgggtcccacccgggaccacgcaaggtggacccggcccaccggctccctctctcctctccgcccgcgcgcgcgctttgggccgccttcttgggccggccggaccatttagctcggccgagccgccccttcctctcgggccgcgccctagccgcccgaggaaagtctgatttccctccctccttcttttcttttctttttctttttcaaaaaggatttaaataaatcatttttcctttagaccaaaaatctaataatcttagaaattcaatatcttccaaccgtaaatccgtttgactccgttcaacttccaaaatttctcaaatctcgagatctatctaatggcacgcttagaggtcattaatagggctttattttcgccgtttgttgagttgtcccgttttgcgtgtagtttcggagcccgaagacccgcagtgcgaggatttcgaggatcaagctcaagatctcgagcgaggcaagccacccttgaacatcttgagcctatatttgaacttaattatgttgcttgaaaaaatattatgcattgataggatcacacttaatctgcttgtcccgtctgcaaggcagattggcggacctacctatttgttgcatttgatccttcctctgttaattgttataccatgtttccttgtaaccacctagtcgcgcctcgaaaatcgtgcactctgcacgagtatcgacggtcgccttcaaacttaaaatctgagtaacttcttgggtaaaacttgggttttacaaaagacttggaaaacccgacacctgggtcggtgcttgtgaactaaatgaatttccaaaaccgcggaccggggaacgtaccgggtgtacggtttcccgctcttgcacttaaggaccgtttccttggaatttcatccgaacataggacaagtacgaccacatgggtggaatgggacacccctggctgagtaactagcttatcaggggagccttgatgccgagagacatgtggattcgccggggtggtgtcggggaggacccccgggcttcctggcacagtatggtctgggacctaacctgttgttggtctgggacccctctcgtcggcatatggtaaacctgtgtcggctttcgaaatgccttgtcatgaaagcttggaggtctcccgacgtggctgatccccataagctaggtgatccgggttagtaatgtcgtgtgggtaaagtgtaccacctctgcagaggttaacaaactgttcgaacagccgtgcccacggtcatgggcggatgtgaggtgattcctagcgtagttttgtttgactactgccttgtgaaatttgctgttgtggaaaggggatcgatgtttggaaaatctgcagctgatgggatcagctaggcccgggtggccgtttgaaggttgttggcccgggtggccgtttaaaagttgttggcccgggtggccgtttgaaagttgttggccgggtgccaaccttgaatcaattcaaaagactgatacattgcacatactccgaccggacgagacgcactgtctcatccgtgtcgtttgagaagcactcacttagttgatttcagaaaagagttcaaataaaatcaattgcaaaaacaacagcctttccttgaagcctacattaaacacttatttcccgtggcttgctgagtactcccgtactcacccttgctctatataaataatcccccccagttgctgaagaagatgaagcggatcccgctgacgaggagttcttccaggagcaagccggctacgatgagttttagggttttggcctaattcccaagtcgcgcctgtgatgtttggtccaagtcttggcttccgcttcccttttgtaatgcagttgtgagctcgggatctgtccgcagcccaacatgactgtactcctactctataataaagagacctctgttactgtgatattctgtcttcctgtgataccagcactgtttcctgggactggtatcgattaacaggttaatttggagcgtcacgggctagttccggtcgggactagtccggggcgtgacaggcatattaccgaatatatgcatatggtactattggctggtttggtggaattccaattctgagccttttttatccacagctcatgttctctgtttttattaagacggatgttctctgtgattagaatatttggagaattatgatcaaacatggactatactatatcctgactagatgtgaattatatttgtataaatcaggatttgttatgtgaactagcacattgccaatgccaggtcaaacagtaagtttttttttcttcactaaatatgagcgcatggatctgaaatatattaattcatcggtcaacatggagcaaaaaaaaacaagcatagcacaactgatctaaaaacaatgtctgacgaattccagtccattaattgcagaaacaaatgtgcaaattctttagttgctataacaaagggaattccagtccattagtgccgcaagccagagcagcttgagtggccaaaatcgagctggtgaagcagtcttctctgttcatgatctgtgtcctctgttctggaactggtaagccgaaaatgtttgcgtccatcagtacgtttatgtgccatttgtttggcacaagatggtaccaatatatagtcacagcaggctgctgtcattagcagataaagagatcctgaatatttttattttacaaacacgcaaaatgattgcacgtcggtatattagaaaaaaaagtatttgtttacctaacacaatcagcccagtccaacttataccaagggaagggagaaaagacaaaacaagaaaaaaaaacaaggaaaaaagggaagaggcctgaaattttctttttaagaaaaaaatttggaacttttattcatgtagcattgtcaaaaaaaagggccatacagagtacatgcattaacgttcaaccaacattatttaaccatggattattcgtctctggaaatccttatttgcaccggcatggcatgctcagctgctagttcggaggaaacgtaatcgggtagaccggcgtcttgtcagggtagaagagcccaaaatgcctctcggtctcatccccgggcttctggttctcgttgaacatggcgaacacgtacgtctccagctgcccgggccgcttcggcgtcccgttcttgacgttgtcgatcacgccctggttgtgattcctcgcgttctccacgttcgccgcgaaccctcccgccgacggccacccgctctccgacacgacgacgcggacgccgggcgcgccggccttctccagcgcggcgtacacggcgtccaccatggcgttgaagaggttggtgtaggtgaggccgctgtcgttgtccctcaccgtggtgcccggctggaacgtggcgtagttgagcgggatgtcccgcgggttgtccctgtaggcgaagtaggggtacacgttggcgagcagcggcgacatggtgttggcgaggaactgcgcgatgggcaccatgaactgctgcaggtccgggcggaacacgccgtgcgacggaggggacgaggcggtgatcacgtccatcctcaccgccgtcgacaccttgatgctgttcgagaggccggcggacacgagcgcgtcgtacacgttctgcatggccgggaggatggtccccatgtcgccggggccgagctcgttgccgacggcgatgtaccggatgatgacgttcggccagtaggcctggacgttgtcacgcacccagtcggcggcggcggaggggttgttggcgaggttggccaccgcgctgctgccgccgacgtcgatgatgacggcgacgccgctgccgcgaagcgcgtcgagggcctgctggtccgggctgtagatgcgcatagcaccgataccattggacttgtacagctgcacgacctcgctctgcgacgggaggttgtcgccgttcatgccgtagcaaacaccgtggacacctgcaaaaacataggagtgcatgtttatgccaaatcagacgatttaattgatgtgtaggaaaataaaatatatatatagagagagagatatcgaatctggatttttcacattttgatacttttgaaaaacttatttcacaaatagacccctaaaaaaacttatcctagaaatggtcttttttggggcgccagagtggctggcgccgtcatccaacgggatggcgccagcctctctggcgctgtcctcctgccaccgtggcgtacgcgaaccgacgtggctccattcctgtttctctgtatggagttgcaacggtgttatttttattttattttttcggatgttttttcacactcaggatcacgatacaaccaaccacaaaaaaaatttaaactcgaactaccacttagctaagtctgaaaatatctagcataccacttagtctactttacaccttcactaaaattagaccataactcatttagtaaaaccctttgatcagcatgttaaacataatgcactctaccactatatgaaattacttaatctaattcaaaatataaccacatgaaatgacatatataagttaaacagtatatagagatgcaatttttttatttttattttatttttttgatattttttcacacttatgagaacataggaaccaaccgtataaaaaataaactcaaacggacaaaatatgtgacatgtagaattttccaaaattctaccgaaacggacaaaatatgccatctattaaaataggcgtaactttctcatacggactcggaatcaggcaaataatatatgcacggacatctacagaaaaagttacatccgattctcccccgctttgccgggttcggcgatattaaaacctccaaattccgcttgcaagattgtgttttcgaggagagaagtttttcggtggagctttggaaaattccacatgccacatatttcgtccgtttgagtttattttttacgtggttggttcttgtgagttcctaagtgtgaaaaaaatatcaaaaaaataaaataaaaataaaaaagttgcacatctctctcctctgcactagttcggagagaggagaggagaggaaaaattctacatgtcacatattacgtccatttgagttcaatttttttatggttggttcttgtgtgtccctaagcgtgaaaaaaatatcaaacaaataaaacaaaaataaaaaatttccggggggggggggggggg

SEQ ID NO: 9608 - DNA, 16738 bp, Oryza sativa
agagggcaaggggcggcagcttaatggcgacgcgacggcagcgcacagggctcggagcggcgatgcgacgggtggcggtgcggggctcggggcggcgcggggctcggcgtgcggtggcaggcggtgatggcgacacgcgcgcggcgacgggacgggcggcggcgcgcggcgatgggacggcgacgcggcggcgcgcggcgatgggacggcgacgcggcggcgacgggcgacgcgacgggttggagacggtgcggcgacggcgacggtgcgcggcgggataggacgcgaggaggcgtggcagcggcgcgcgcagggcgatggcgacggcgaacggcgcggcagggcgatggcgatggcgactagacggcgcgcggtggcgcggggcgcaaggcagcagcaggctagggtgctggctagagagggggtagttaggggacaacatcgaacacctagaggcctatgaacagtactagccgatttctttggattttattagatgttttccaatttagagaatggactattgccacctattttgtcacaacgtatttcacacaaaatctgagttattcaaatgtaaatttgtattcacacttaatattgcccacattttatttttattatatatttttctaccttttcctattttcctacttttagggcttttggttgaattataaattgagaaaaattgcaaaataaatttgtatttactcctaagcatttgagtgaccatattatgtgttcaaatgtgaattttcccaaagtttaatattgtccaatatttatcctagatttttataatttcccatatttggggatttcggtatttatttattttgatgcatattggtttatctttttaaattggttttaccacaacatggatttctataatttaatatttgtgattcaatacaaattatataatatcgaattaattattgcaagtaaaactattttatagatagagttccttctaattaaatggtcatcatttcatgtgcatttatattatcgcacccacctacattattcaaatattttaatatttgataaaatagattaatgataacttttattttattttactatcttgtgcataaatatttgtagggctaaacataaataatatactctcgtaaattatatctattgcttgaatgcagctcttttctttactttctttgtgatcatttacggtttggcaagcaatagcgatcataacaaccagcatgacgcaaaagttttaaaaagttcgaaatttttagtgatttttattgttgggaattttcaggatgttacactcttcctagactatacctctctttctcctcaatttgtatccctaaacacttgtattcttcagtggattgcaatatatcggtggcatttgtgtgagagatttggtgtgattgtgacagtatccaggtaacataggttcatatagacacacacgttttagtttctctgtagcttcgtagtaaaggctagtagtagctagcagaagtgcagaaaacaaatgtaatttgatcaatttcactctcatccagctgagaaccaaacgtctccgacaaattaaggagacagttaaagtcaaaaggagggaggaaattagggcaaaagttgatgctagtgaatctgacatccacaaagagaaatgattggtttttggatccatctacagtgatctgatcccgttgccatcaaacgcatcagatcagccatcacctgtttgcaatttgctctggtgcctctttgaggtgaacgttttgtttctctccttctataaataaagtatcctgttattaatacgactgaatcatatgactcacatccgactctaccacatccaccaatcaccatgcttagcttctttatcatgcggagttgttaaggaaggatgcgagcaggaggcgtggtggtctagggcttcgagagagatacataaatgggtctcaaggagcccgcaatcacattctgccccaatatatatgggccgccctgaggtcccaatatagttctggcccaacgaaaaggaccgtcgtggaggaggccccataaactttcctatccagcacatacttttcggcccattgtatgggcctcatggagtccgcatcaacgttctgggccaacttaaatgggccgcaggtaagccgcggcgatcccttcatggccagtaggcctaatgtgaaactaagcgggcccaattttgagggtttttctttttggaaaaagtacaccgaaggttggggactgctaattcacgcatacacgccgttacagtaactcgcgcgcactctcacatgttaggctgcagcccgctcctatcacactaatcatggtgattagcgttaattactgtgattagagttaattacacgctacagtaaattagagaaaactaattcgtgcgcgacgtagagcggttaggtcttttttttttgcgcggtttctttttttttcttttcgggtttttttttgaagacgcgtaactaatccgattagtgtaagattcgtagatttgtctttttttcaaagatttttttaactaacagattaaaaagagatctatatgtgaaattaaaatttgaaaactttcaacccatatttgagtactttcaactcgaaatttatttttttttaagtcaaactttgaaaactttcaacttttcatctcaaatctgaaaaactttcaactcagatttaaaactttcaacccagaattgaaaaatttcaacccaaaatttgaaaactttcaagtcaagatttgaaatctttcatgtcaaaggaataaaagaagaagaaataaaaataaggatacgaggatgacctagactcggataaattagcaaccgttccccggcaacggcgccagaaatgcttgttggtatttcttacgtccacagataaatctgcaagcgcacagaatagcactgtagcacttcaccttcgggtgatcctaaaaggatatcgaactcagggaacgtgtgtaatctacctaaggctaagacaatccaagaacaacaactataggtaggctaggcaggctagagaggactttctatgtgttttagttatctaagctaagcaaaggtaattttctatctgttgcttcgggcaccgacccttgctggtctgccagcgtggttccgactatagctctatgatttatccgaacgtggaggattactaggacgggattcagggctgtcaccacctgccgcctacctctgacaaatccatgggatacacaacaaacaaaggtaatctctaacctagacaccacgtctaagttattaattactactctaatacttgcgcgggaactttcttctttatccagagtcctagtactagagcacttagtatgaatactaaacaatgaacccgcaaagatgaaaatatatcttactcagacaaaattaattaaataacataagaaaggaaaacaaatgcttactttatagaagaagttctccgaacccggattcctcctacgaagctacactcgtcgaggtagaagtttgatggagcgtggggctcctcaccgggagaccgcgcaggcccccctttgctggttcggccgggggccctgggtgagattctaagctcctggtctgtggaaagttcgcgagagtggaaacacacaagacacgggcgatgtatacaggttcgggccgctgagaagcgtaataccctactcctgtgttttggtggatctgtgtatgaagaagctacaaagtgcgagccagcccccgatcgttctgggatcgttttctcccccaaaatctcccccttctaagtgggcaaggtcctccttttatacctcaaggggataccacatgcaccatctctctcttttttgtggggacttatcctatcttttcataaacagacggagacttgtatggttgccgtccgaatgaccttctgatgggacggcccatacctacctccacttccgccggaagcaggcgcgacgtgggaacatggctgtctgctgacgacatgaccagtgtcagaccggtcacaaatcggtcattcttgtccaccacgcgtcagtttatcaatctgcatgttcgcccctcttcatacaatgtcttgcttgtaatggttaggatgaagcctggtatatatctgaccgggaccaacgtgccatctccaggagctaacacgccggctccggctagggacgagtgcttggaggctctcatcctgacgggatggggcgaggcgtgcgtcagaccgcctgtcgccacctaacccacgatctgatcggtctgtgactggtcacagaccggataaacgagtgcgctgcactgcgttacatgcggcgtgacgcgctcgtccaaaccgcaataaatgtggttaggtgagccccgctatgctcacctaccccatatacgcggcgcaaaacccacaaggggtcggggcgcctcggccctcggggccgagacgggagcggtccgacccctcggggagacaaagagaagggcggccgtatcaccctcgggcccgacccccccccccccgagggggttaggccacgtgggtgatcgtgtctgcctcaagtctctaagtcatgatactcccggtcccatgtcaccgacaaagtcggatgagcgccaaacttccgggcactcctccagagcttcccctcactctctaccttattctaatgtacaaaagatacaatagagcctcttgtaattcagctcaaagttgtgtgttggaaatgagagtgagctcctccttttataggcaggtatgacggttacagcctatgcgaaatgaccaaactaccctggaaccgccattaggatgtgatcagggccgtccatgcaaaatttgacgatcaacggccagcaaaacggttcgtccgaactggaggttcgaccgaacccgggacggctccgttcggcccttttttcgtcatggacactatttttgaggccctcggcccattggcatgatacttgggcccatttggagttgtttaattgacttatgggacctccaattcgtgtaaatgtgtcctgaaagcgcgggggtgcagtttgtcgcttgacggatgtgttttcttctcaaaatacctgcatacacatatttcacaaatactagtgaaaatgattagtaataatacctaccactaagttggataccatatttaattttattatatgcaggtattgacggttagatattaagatttaaggactgtcaacacatatgtgtccttttacaagctctacaaaccttgtcataaacttagtctcgcagttgggctaggccaccaggtcgacagcaacctagaaatgatttgcacattaatttaagttatagaaatgattaactaaataattttaaatcccaaaaaaaaaatctcatggcctaactcgtcatcgcacgacaatgatatattaagttataaaacacgcctatgcgaaaaatcggaatatacttgcgacacaaaaaagtttagcttaatttgttaaaacatgatacattattttcgttgggcccactatcaaaaggtaaaaaattgttgtggtgaaacatttgtgttgaattgacttagtatggtgttattctttgaggaagaaaagcattgtttcaatcttgcacttggaaactatatttttcaaacctgaaacatcgatattatgttcgtgaaacaacattactaggatttgatcgaaacaacacactcgtgcaacatgtcaaggaagttattgaaacatatgtcgcacgctagaaaaacatgtataatatcgtcattgaggctactggttgcagcaattcagaagcaacatgccttgggattggagaaatagactcatttgcaatcgctcagcgtggccgcacgtattctctttgtctctctcggagcggtaggaatagaaatagatgtatgtgtatcatggtgccgtggtggttgcgttttccgctggcgcatgatcacacgacgtgcgtcggatgcgtgtgggcggaggcaataactacatctatatgttaacattacacgcactctacttacttggatacggaatcatagattaatgagtggtaaaagccaaagcacagccggatatatttaatcaaataaagataacaattgtttctggtaacattggtaagaacaacatatcacatcaaccacatagagttataaacaccaaataatgaagcaaccgaagatgaaaagggaacaacaggacaaatgtgatacaaggacggtccccaggtgagaaccatttatggggattgtcactcgatcatggaagaaggatcagatgtgcagctgctacgcgatcatgcacccgcgggagcaccaatagtgccacctttcgcaaagtattccttggcttccttagacatgacgatgcaggtgtctacacacttcttgctgatggcaggatcctccttaaattccttactacaaccctcatcgcacaaggcgttgaatctttccacggggggatccgtggctcccttataggccctaaaaatctgcttggtcgagatgacgcagaagtctgggcaatgcttgttgtagatggggtctttttgttgctcctctctacacgcatcggcgcaccaaccttgtaataaatccggcggtccggtggctgctactgccgcaaccaccaccacaagggtggaaaggagcagagccaccgaaatggtcttgttttgggccattagcaccgtttatgctgagcagaattggtgtggagctaagatgactttccttaccctaatgctcatgttatatactacgtacgtgatagtacaagagctatatatatatggggccgagagagcttcatggaccaccaatgagactaaatataggcatttatatcatcttcggttgctagagcggagactcattccttccttatgaccagagagtgatgaggttatcttgccatggatgcatgcgtttaaaaattttaaataaaatggctgtcgttcgttgtatgcgttgatcacttgctttttttagatgatggatttgaaaaatatagtttcttatttgtcacatcctgattttttcaggatttataaattatttaataaattattattagaatttatattaaatgttctttaatttacaagtgaagttaaatgtgggaaataaaatttcctaaatttaaagcatggatggatttaatttttattaaattctccatggttaattacactctctgaaattttctcggatttttcagagctcaatttctaaatgatacaaagaacagttcagtaattatttgatcaataatgatctaattataattgttaagagcttttcttgtttaaaaatccttaaattataaattgttgtttaaaaggaattattagaaatgatcttaaaagcctaaaagagaagatctaattttaattaataaattccaatataaaatggggccagataaaatttcattaaatacttctcttgattctatagttcctagatttttctgggatttatttgagccaagaaagtatttttaataaatggaattgcatttcatgaataatttaaattgaaaaaggtttttaaaagtctcttttggctttgggccgaaagtcggcccaaaaacctctctctttctctctcctccccggcccaagtcgacccagtccgccgcgcccctccctcctctctctcagccgctgacaggcgggacccacttgtcggggtcgtcgttctcctcgcgccggccgccgctcgaaaccctagccgagccgcttcgccgccgccgctttccaatccggtcgatcctttctcgatccggtgaaatctttagaggggaaataatcttctcgatctcctcttccttttctcttttggaatcatcgcctaattcggtttggaaactcgtggattcgaggtcgaatcggattcgtttctctctctcgaaccctaacctttccttctcgccgccggttgccgtgggccttcgccgccgcctccttgcccctataaaaggacccccgagctctcctctacccgccgccaccctcgccttcgcctctcgtcgcctgtagcgtcctagcgccgtgagacctcgcgccgccgttgtcgccgccgctccagccgtgcgccgccgtcgctccagtcgtcgccgtcgctcggggaggtcaccgtcgtggtcgccgttgcgtcgccatccccgtccaccgcttcgccgccgccgaagaccgccggagcaccgccgtcaccgttgacccgaagaccgccgccgcttcttcctcatcgccggcgccgtccgttgctcttccgccgccgttttggtcaccggtgagttcgcctcgtcgcccgcatcgttttggtgccctccgttcgcgtcctcgcaccgtcgttcgccggcgagcatgcgccgcccgagccgtcgccggtggtgacgtcaccgctgacgtcatcgggaccgtccgccgtggcccggtcgtggatcggttgatctcggccgttcgttttggataggatcgatctcggccgtccgttcccgtgaaccgctgctgtgcacccggtccaccgtgaactcgagcccgctgacgcaataatcctcttttccttttcaaaaataattcattattgcgtcataattcaattaaaatctatataagtgctttaatccgatttaatctttgaaaattcataactaattctttgtaactcagtttaatgtggttcaagttgcaaaagttgtgtaaaataaagatctacataataaaattatccataaatagaattaaatttatttaattctttttaaatgggctttaattagatttaatcttgtaaaattcataataaattcatatgaagtcagaatgaggccgttcaagtctcataattcatctaaaattatgatctacatgtttgtttactttatatgtattgtttatttggtttttattagtctttttcttcgttttgcgtgttagcttgtcgtttccgtcgttgcgaaggttcgccagtgcgccggaagtattcaagaggattaattgaagaccgattattgcaaggcaagtcacacagatcctaaacacaatcctttgagcatgttgatcctatatttaaattctctatttatttcaaccgtgtatttattttcgaatgtcattgggtggtgtgaatctattcctttgttatggccaatttgcattgattactttattctttgatatcttgggttattataatttgactagttaagctttatatattggttcagctagatattaggtatgattgcttagccatgcttagaaacattagcacactattgggataacttatgactcattattatttaatgatggcttaatgatagttcacgatggtcaatcgtgattggttaattaattacttgccaactaaaacttgataatggtgggttgtgagcacatggttttgagagtcgtgctcatggcaattaaggaccggttcgcgagctactgttgtgaaacattaaccgtgccaaccacaagccagcgtaggcaacggctttaccttttgtataacatgattcattgcgaagcaccagactgagaagtggcggagataagcccacgggggtcgctggggagtccatgccttgttttataagggggtgattatgatccaggaatggtgcactgtggtgagttgtgttgtgcagagggtattgtcacagcctctattcgggtactttccagtatcgcgacgcatggtagacatgatgttgaggctgtgtcttatgggtacagtggtacacctctggccagagtaaaactattcgaatagccgtgcccgcggttatgggcgggttgagcaatgtttttcgtgattagtctcacacctctcacaataattatggatgttatacctggtaataatttgcttagctcctggtttggagttagatctgtacagccgggtatggttgttcaggatggttgggcctgtgcagcatgggtgtgttgttcaatgttgattaaaatttctgattaattactccactgttttacttctcctaaatgttttgctaaatgctgattttgcaaatgagcctatattatgccatcctttggtatccttgtgcacttgcatatttgctgtgtggcttgttgagtatgtcatatgctcattcttgcaataatcaatcaacctcagttgaagaaaaaggatccagaaggagaagacgtttggcttataccccagttgagctgcctgtgggagtggagctgaagccatcgctagaccgttaattccgctgctgttttcttttcttttgtaagtgtgtaacgttattattatgatggatttgtatattaaattgtcagtttgtgtacctcggctgattcctggacgaggattttatgcacaaataagttcggaaattactagtgaatttctgggcgtgacattattgcactttctagccataatagaagccatgtcttcaattaagcttagcggcttaaatcttttacctcatttgccgcacacgtatatgttggtatttcttaacgtcattactagaaatatgaattccttgcaatggcgccgaaatacttatggtatactatggttacagatttcatccgcaagcgcacggatataccattgtagtatttcacccgagagtattccaaagtgttgacggaaaacacgaggcctgggagatctgcttaactccagtgcaggtccaaaactcgccttcgggtatgctagcgtgccagttgatttgatcctgcaatcaacaagaaataacgacaaggaaaccgcggttaaacctataaacgatagccgatcggctaagtaccgatgacatatcatttatctttgagccgatgtcatatatatatatatcgatcgacagtcataaataaataagaaagaactaaatctactcgatcagctgtagatattaacgatatatactcctcatatcgatatatatttaaatcaagtgattgggatagatcggtcgccatgccgagacagtataaatcacttagatcgaaatatatattaataataggactatatatgttcatagcatagccaatcagatagatctagcatgtatcggctaatactccgataccgctctatactaagatgttaaagcaagtagaatatatcaaacaaaggcctaatatacttaaatgcaacaagatcttaatataaagggcagatttaacatatcaatgaagcatatagggtgaatatagttaaatcaggtaagatcggctgaaaccccgatactattctaattggcaaccagaaggcaggctagagattgatattctaagcacgacttaatagatcaaactcaactgatgccgcattaagtatgaaaaaaagaacaatatctagacaatcaagccgctggaagtttcatagagtggtagatatcctatataatctaagtcaacatcgatgtttaactataactgccctctaccgacagatgttagccgataataggttaaatagcgataatgccagagattatgtaagatatatgataacttgacgaattacatagacaagattagagtatcataaagatggaagcactaatcccgagaacgcaagccgtcataacaagttttacctcttgttgaggatcgaaaccgatgcagctcaacccgaaagtaagaactcgtcgaaataaaactaaagcaaaagggtggcgatgcgccgagattgtattgaacgtgtgtgttctttgattacatgtggttcggggcctatttatactcgaaaattacaaactatgtccatatcggacacgactcttatctctaacaaactctaagataccataagtcttaacggcagacttttgcccaaacatatatctaaggaaattacataaaatatcataattaatagatacaattgccttcccaggactctatccacgcgtggccatcatcttgaagcatatcaactcaacccgatgtcgtacaccaagtcgtattgtcggaatcggctgtatcaccaaaccaaaagtctgactcgaattcagccgatccaatcgtagccgatcaggactccagccgattcttactctgttctcgcgataatccttatctctgattccacttcgatctaatcttcctttccgatgccgatgttgccaaatttggttgttaacacatgccccccaagtccggaatatttggtaatgtttcagatttgccgtatatcgactccgagcaagtttcgcacttcgctattttccgaccattactcccgtgctttaaatactaatcgtcaccctcgagaaatctcacaccgtcctcttctattttcgccgctgaaacaaactttgccctctctttgcggcgactccaccgacgcaaaaagcgattccaaagcgattccatctccgaccggacctccgcctgcgttgatgtcgtcctccgccagcccgtctaccgcgccatcagccgagtacgctgaggtaaggtctcatcggctagatcccttttcctcgcatgaaatcgatttcccctttcctcatcttgttttcttcttctcgattcttttggatttgcagcacctctccaatctagttgcgattcccagcctgtcgcatgaaaaccattactttcttggtccaatcggcaaccttgaccccactgatttcatcatcggcgaaagcaacagaatcccctttagattagccaaccctaacctaggtcactggaagaaaacttttaagtcttggccatctctcgagaaaaccacccctgagaggagttggaccacatggtacaagcgtgtatcggctagtaagaaagttcactgggatgaaatcgggattggccaagcacttgcccttaccatagccaattcagctaaggatgaacctctgatggccgctgccacttatttctggtccaataccatcaatgcctttctgttcaaccgagggccgatgactcctactctgattgacatcaccatgatcactggactagatgtaacctcatcggccaaccctatgagcatgaataccaagaatcaatttgattttagaaccaaaagcataggtggctggtctggctatgtagctgcatacatgggtaaagggcctgtcactcctcgagagcatgtagctttcttgctaatgtggttagaaaagttcctcttctgtggatccagttgtggtcctacaaccaactggcaatttatagccgaagccctagaatcaaagaaacaatttcctttgggcaaaatcctcctcgactatttataccaaatgttgaacaatgcatcggccaagatagctgtcggatcggtagttggagtaggtagaccatggtggttgctgcagacctggttaaacctgatggtcttgaaagttgtcaatcggccatctgtgacagaagctgaatttccaaggtttaagttgtgatgtaattcaaattattattgataaccaataatttggtaaattattgattttatttctctttgttaaattacatatctttcaagttattattcatgtgagatccattgggtaccggcgcctgccgggcatgggtatgggtacagagttttgcccgctaactctagtgggtagggtttgggcaggcaatgtcgggtatcgggtcgggcatggttttactctacccgcgcccgacccgacccattgccatcatccctaatgatagatgtaattcatggctctttgatatgtagctctagcactctttaaaccgaaagtcattacaacccactcgaacaagccgattgcaccaggacacctaaaagctgtcttatggatatcttcttcggccataaagatttgattgtatcctgcattaccatccataaaactcaaaattttatgccccgaggcagcatcaaccagctgatcggctaccggcattaggtattcgtctttcggggtagctttatttaagtttcggaaatcaatgcacaccctgaccttgccgttcttcttgataataggaactatactagaaacccactcagcatatcggcaagaacaaataaaaccagcatcatataatcgtttaatttcagtcttgacaggttcaagcatatcggctttacatctcctcggaggttgctggtgtggcctaacccctggtttgataggtagccgatgttcaacaatcgatcggctgagtccaggcatctcataatactcctaagcgaagcaatatctgaattctttcaacagctctatcaacttggttctaaattctgcagataaattcttactaataaatgtcggccttggtcgatcacctagacctatatcaatttcttccaaatcatcggccgacgtaaaaccctgtccttgcttgtcattgagatcatctattgtgtccttgttgtagacatctgaaccctccaagacgccctcaaaataatagcttgggttctctatcttcaattggctatatatcagaatcggacacttttagaaaatctccatctcaaactattccagataaataatcaagaccatccatctcccaaagagctaaatcggcactggcaacattgactgacctgtcagctggcacgatttcaatcttgtcgccttgccactgaatcaagcattgatgcatggttgaaggaatacaacaattagcatgaatccaatcccttccaagcaacaattatgccgcgcagaaggggcgtgcgaggagcgacgccacgtcggattttgctatagtgctcgggtgtgtttttgaaaaaaagccctccggttttctttaattacgtataggcccctcacaaacagtgtttgtataggaaaaatcgtggacatgaatgtaaaaagtgaaaagaataggggctttttcgcaaaaaaacgcccacactacgtaaaagcatctccagcagtcttgctatctcactctccgagcaaaaatttagcaagtttggttcaaaattagacagactccaacagacttgctatttggatggccaagctatcagctggccaaaccggctccctgcctagccaaatttggccagtcaaaaccagcttgccatccgtgggacccacgcgtgcttccccctctctctctccgcacactctaaggcgcgcagcagcatcccggcggcgtcgtcatcccgtcgccaagtgtcgacatcatcgtcgcccctccgccggctccgctccttcgcgccgcccctcctcgccgcctcttcgccggcgccgctcctccgcgtcgcccctccaccggtgctgctcctccgcgccaccgctccgcgccgcccctcgccggcgccgctcctccgcgccgcccctccaccggcgctgctcctcctcgctgcctcttccccggcgccgctcctccgcgtcgcccctccaccggtgccgctcctccgcgccactgctctgcgccgcctctcgccgggaggcgccacccgcgatgcaagccttgtcgaccttctccaggtcgcgacgcgacgcggtcctggaacaccgacttgccgcctccgccaccagcttggcgctcgacgccaggtcgccgctcccgcccccgccagaccgcccgccgtcgccgccgccgtcgtaggaggccattcgcgtgagctgggtagctagctagctagctttagctttggatctgaaggataagaagaaagaaggggagagggggggggggggaagaggagtagaggctgacacgtgggtccgtcccatctagtttgactggctaaattacatggagagttggctatatggctatttggagaggccaattcagagagactgttggagatgctctaactcccaaaaccctatccgccgccgcccccttctccctctcgtctctcgctcgccctctccctcccgctctcccgccgccgtcgccgcctccgtctccgcgttcccctcgcgccgccgcctctgcctccgccgccgcggccgcgtccacctccgtggccgtcgcgtcggcgtctccgagcgccgtcgccgtcggcgaggcgagcagccatctccgcctcggtccccaccgtcgccgagcgccgccgctgcgaggcgcctcctccggccgccggcgtccggatccggactccatgttgtcggggacgcggatctgaccgccgtccatgcgctgggcagcgtctcctcctccgccgtcgccgagcatcgccattttcgcctccacctcgctctggcgctgtcgagcgccgccgccgcagcacccgtcctccgctgccgttgccatcgccgagcgcccctgctgggtccttcgccgccatcgccgacggccgctgctccgtcctccgttgccgctgccatcgaagatacgacgttggtgacggagccggcatcaatgaaggcggtggcagcagcgagaagaggagaaccgtatgtcaccaggctctcgagctcgccccagatcagtgccctctgtccttctgctcgtcgtgaggacccgccaaccatgacgacgcctcattcctcctttcttctgtgctcagccacggcaacaccaccaccatcgtcgttcctgtcgttgcagcccggtgagcgttgatgggaccggcgacgttgagtagagaggagaataagggtggaggtggtggcggcggcgacgacgacgtcttggatgtcggtgccggtgggggcgggtgcggcgtccgttgtgggcggggttggagcggcgctggcctgacacagcggagagtgccacggggcttcggttcctgtaacct

SEQ ID NO: 9609 - DNA, 14840 bp, Oryza sativa
gaagatctgcacgccctgttgacgtgccgcctaatttagcctgtaatatggttcatctgcaaaatatatattaaatttgcctatctctcattttatattatttgtcattgtagcaaaatttcacatcaaactaggagatgtgcaaattacactgctatgcttattaactacattatagttttcaaaagcaatattaactttgattaacagttatacatggcattgataaaatgtgaagatagaataccgcgatctaaaataataatttcaaatgtgagaatgaccagtaatattttgaaacatacagagtaatatattaatggaatttaattttatgtttccttagaattatgagaaaaaccaaattaagattgtaattaatgatgaccaatagtttggcaaatagttagatatttccatattggaaagtacgaattaccccccgaactattgcggtagtacgatttacccccaaactataataccagacatttaacaccccaaactctcaaaactggataaattataaccctaaatcgattcgaactggttttcagcctacgtggcacactcgtagcaatacagtcagcaaaaacaacggtagggcccacctttcagcgcttgttgtttctctccttctctgcccctctctctcttggtgaacagaaggcggctgcgagcggcgggtaaggagccgaggccggcggtgggcgggggtggaggcggctgtgggcggcgggtgaggagccgaggacgcggcgtactagacgtcagggtagcgctcggtcagctctgatggcagcggcggcggagagggcgagggcggcgggacgtggagcgagacggtggcaggatcctccttcccaccgtccaggcgctcaagcttcaagcttcagttgctagcagggttgcatttaccgcggtaaaccgcgcggttaccgcggttaccgcgcttaccgcgggggtacggtaaggggtaaaccgcggtaaccgcgtcaaattcaaataaatttaaaaaataatttgaatttttgataaattttgtacggtttgtcgcggtttgtcacggttaccgcggttactgtgcggtaaccgtgcttaccgccggggcgcggtaaccgcggccccggcggtaaatgaaaccctggttgctagctagcctgttacattgctcctcgttgcaaattgcaaacaggcgatggctgatctgatgcgtatgatggcaacgggatcatatcactgtagatgatccgaaaaccaatagtttctctttgtggattttgttggcaactttttgtgacaagtcgacaagcacgatcgcaacacctaaacgccttgcggtgatatggagtcgccaaccacctcgatctagccaaagggccaaatcaagatgggttttgtagaaaagcaactaaaccggctagcagagccgatttagagatcaaaatcagcctctaggccgatttagatcgatatgaggataactacccgtctcgtgggcaaaatggaaggttttcaggacaaacctaaaaagaggtgtcgcactctcgcagcggcggcggacggtttacggcgcaaaccgacaaagatagactaaactagagtaaaatagaaaaacatagtaaaagaacgattcaagtagattgtatttggggggttttacaatgaaccggccttgtcgcttaaataggggttggtcttgccctctacaggcccttctccatgtccaactcgggatagaaaccaaaggaaacacgaaacatgccttcccgagcaaggaaacccgagacccgacgaaaacagactcggactcggaccctgccggtctgaccgcccacatacctgcggtcagaccggccctactagccggtcagaccgcccacacacctgtggtctgaccggccctgtgaaggaaacccgtcactttccaaactttggcaattttcccctatttcgtctataggtgtcaaatttgggtgtaaacagatttcagattcactagcatcaacttttgccctaatttcctcgctccttttgacttgaactgtcttcttaatttatcggagacgttcggttctcagctggatgagagtgaaactgatcaaattacatttgttctctgcacttctgctaggctgcttagctaccactagccttttactacccagctgcagataaactaaaacatgtatatatgaacatgaattccctaaccatataaactaaaacgcctccgatgatcgaaccatatcttggtccatcgatttaagtggaaaccaatgatcagttgttttattttatttattatatttatagaacaattactccctcggttctataatataatgtacaaccactttctttatatgttccataatataaggcatgcattcaattaattatgacatcttcttcattaaattattaattttttaaacaattcactctcacattctctaattctattggatgcatgcattatatttattaggatgatccaaactacaagatgataataactatttctttatctttgggttaatgttggttgtgccttatattttggaacggagggagtaatttattagagtcacgtgacaacttaggtgtattttgtcggaacactactactaatagtctcagtttacttgtagtcaactactgttggttgtagcttggtggcatactctacctacctatcagttgttgatgttactcgcggagtatcgttctttatctttggtgctagatgacatgcatgcatgctcattggatatcagctgattcttatattaggtacattgtgcatgaaatgtcttgtaagcaatatgacttattagcgatcggtggatagtggtttgtatgtagaactcgtatacgtggggattagtgaggacatacgattccacatgtggaggggagtatcgtggtgggtatacctgattttttttctttgagatggagatctaatgggtaaaattagtaggtccaccgatttttttttcctaatttattagaacaccatgtggcggtttacgagcgtttgtaggagaccacatggcggcttgggagtttttgtaggaagttaatttaatgaacttttagtatatgatagatagatatagatgtacgtttacaccaggtcacattttctctgctgtttcctaattggttttactttcatgcctagttaattaattatattagctatagggttaaaccaatctgcatgagcacacagacagtaaagtggaggaggggattagctaacagttgcttgcacaagcaggtggacagaaagacatgcattcgctttaatcacactgctctgaatgtgacatttctgtcatgccgctcatgcatgattagtggccggagtaggagtacacgttactagtggaaggagaaaatcttgttgtcggaggctgccgcgaacgggtcatgtgcacacttaattaccgtgtagtcacgtccaaattccaaaaacatagtaagacgttgaagaggatattgagcaaaattcgcatacattatattaattattatactcacgtcacatgggctggagcctatttatacggaggaggagcaaaggatcggatgaaatcgaccaagatgacgaagatagcaggtgttcttattttagttcttgttatctgtccaactattacttccgctaccgaaacccggggaggtaaatccatccatccatctcatgttttctcacaatctagctgagcttgattctctcttcctaattagtagtaattacttgtgcatgtttgtattgtgttagcgcttctattcctaattaattacttgtgcatgcatgcgctaattaattctgtttgtattgtgttaacaggccgggatgacgaccttagtgacgacaaaatctggacatctctgattgcattccactatcctggattggtggttccgccaatctgcatcgaggacattgcaaagaaatgcgggtggaataatctgacccctgcatgcgtgatggaagagatggacagctgccactaaggcgaccaccggccactctccatcagtctcaggctgacaggctctcagccataataattaataagctgtaataaggggcctaattaatatgtactacttcatgcctctgattttgattgcaagcaccactagccatgcatgcatgtcgtatattctaatagaattaattaatggtaataatataaagctagctagatgtgcctgtgggtttgatttttaatcactaggagtaatgatagaaaaaataattaagaattacttcaattttttaaataactagcaaaaatgcccgtgcgttgcaacgggtaaaaagaatccaatgacaatatacacttttcatgcataaccatattaatgataatgtttatatggatcgttgtagttaccacaattagaaaattggatttttccgccccttgtaccatataatggttttttattatatacggacgacggaaacttttttaactttttaagtttttaagtaaagttagggattagagactagatctgttcccttttgtgattaggaatttagattgtttatttacttttttagaaataaaaagaaaaaaaagagatcgggagatggggaggagatttttttccacctccgattcgcttttgtttttctgttgccgcgtttttcttttcaggatcgctcttttttttaagttagacggacgacaaaaacatcataaattttttaagtagtaacagaaacgaacggtcaaatatatttaaataaatcaacggcgtcaaatatttacctcgccaactgccccgaggcttcctccattgtcacggttcaaatcaatagcagccacaaccttccaatttagcgaatgacgagtgaaacgacggccaacaggcaatgtaacagacagagcggccaccggtcgactccaccacaccagcacacgctctcgtgaaaccctaggctcctctcccgcaggccgcagccatgtcacagcactctgttgtctccatgctcatggccacgagtggccttccctgagaccatgccttcacacgacggtggaagagatgacctggccactacttaggggaggatgtgaggcgcatcatggtccggtgttattgctcggtgcgtggggatagcgcggcgcacatccgctcggctggatggggaatcggtgatttcactgtcgcattgttatcacaaagatatctacatccgtttctagccgttggatgaatagatcgaatggctgataaaagagataggaagttttgtgtaggttctcctaggtgcatctagcaaagagaataactcctcctttttatatatattagtaaagatgagtatgtaggtttattagactaacatcataccacttaatatcactgctagacaaatgatctttagtcccgagttgcaaaccgacaccacaaatctaggatatctttagtctccgttggtgttactaaccgagactaaatattatttttttttccttttttcattgttttttttgctgcttgcatattgatcacagatccagaaatcatcacaaaaacagatccacaaaaatcatcgctaatccacaaatcatcagtgatccagatccccaaaaatcatcacaaattatactaccatcacaaatcaaaacagatccgcggacttcgagcactacgactcccacctcagcctcctcctccaccacaacaactgctgccacacccaattccacccgtcaccacacctcggcagctggatcgtcgccgtcggcgctcctctcccgcgaggcagaggcggatcccagcgacgactgtccgcgcgcctaggtcgtcacgcaccgcgacggcgagtgccgccgcctaccccttgtgccaccaccaccccgctcttgccgccgccgctgcagcctcccccctcgtgccaccgtcaccgccttcccccttgtgctgccgccgccgcctccccctccgccggatccagtggaggggagggctctgccaacgcctatcggtcccggctacgatcggagaggaggtgtaggagatcggagagaggaggaaaaggagagatagaaagagagaaagagaaagggttagtggatgagggggagaaagaaataaggacgacgacgcgcgctgctctctccctccccatgtggctcgactgtttttttaatttttcgtcctggttggtttagacaaccgggactaaagatagtgggaggcttgacaatttttgaaccgggacataaaaaatgatctctagtcctgtttgatgttaccaactggaactaaatatcaaaaaattctgttgggcttttgaaccgggactaaacatattctttagtctcggttcctattcgaatcggggctaatgtgatttttgtcatccggacaaatatcaattctccggtagtgtatattgatgtattaaaatggaaggggttggatattggctaccagaaattatttttctagctaggagaaaaagagctgcgatatctaatccattttttcgaccactaaagcatctagaaaccctgcttcactataccgaacaattcttatcaatgggaaagtctgtaatagttatccaagagttctgtgtagaagggctatcatgcaacggatcaaacgtgtggatagcacaccatggcaccacggagatcgatatccacttctgtcattccatgtaaacgacagctccttctcccctttctagagttggttcgatttggagaaggggattgaaaaaaaaaagagtaaattgcatcgccgtacatgaacttgttaggtggtagcaatctagtgtacgaacttataaaacgcttgttctagtgcatgaacttgtcaggtgcgtgtggaggaaggcgaaaagaacactacatggataatcttattgattttgtgattgtagaaaaagattaaaaaaaagagcaatgatataagggtgggaaagatatgaaatatcatcacttccttgatgaaggataaagtagtgatcaaatttataaataattgcagtcttatgcaaacgcactatacatatgcacgtcacaccctaatcaatatcagcttcgtaagattaatattgccaagctattttggctctcgtttgcacgaaactatacaagttcgtgtaccgaaacgagcattttacaagtgatgaggcatcactagattgtctgtacgcatggtttggtataacacacatgcacgtatgcatgtgcctggcagtaggggtgaaaacagtatggaaatttcctagaattctggctaccgtgtccggtttgcaccgaccatttcagtcggtattggtaattgtcggtattggaaatataaacggtaatctcttccggaaatggtagcggaaatgagatgggttttttccgaccgttttgttggtaaccttttttgatcggtaatttccgtcaaatttccgacaaaattccgaagaaggaagcttgggcggctgagcctggctaccaggagcagcccattaggccggaagaaaaaccctagggaatgggcgtcaaccagcgtgtcgcttctcatcctctccctgtctcgtgactctcgtatagctctccgccgcctctacctccgccgaccgccgaccgcccatcgtcgcaaccacttgtcctcgccgccacgccgccgcttgctagtcctagccgtcgcatcctcgcgcctcactgtgtcccttgccggagaagcatgatggcacctgccgaacaaaaatgccgcacccatctgctgtcgtctatcatatccatggcatgtggccgttattaaactatagtctcgtcaacttatcgatattgaagtatcgttgaactttgtttatattgtttgttgaccttattgtcaactcattaatcatcatataacagtgttatgtggcagcgtgatgatgcaagggtgaaattataaggtcatcttcatgcatagttaaatgtgggatgatgtcacagttcgctgtttacgacatgacttttcgacttccgactgatatcggtagattcccgttccggcggttctgtttccaatttacaatattgtgcaatgtcaatctggaatggatatcaaactgtcccaatttcaagaattacatagtagttttagacggtgcataatcacatcacacatatttttagagaaggtaaatctggacagtacatattatcaaaaaaattcgaacgattgttacaacaatctctaactcattcgcagtagtcggcaatgaaaataaacgacaaaccaaggttacaaatcagagcacggagacaagcaatttcttaccccacgactaactcatgccagttacaatctatcgattccaccttgttcctatctcatatcggggacgacggcatccggaggctgccctcggcgtcagcgagaaggggtgtcgaaacatgaattcggcaataataaaagggggtagcgcacgagacctaaaagtggatggatgcgaagacaaaggatttagacaggttcaggccctctcaatgagaggtaataccctactcctgtttggggatttgaatccgccgagtgtgtattgatctgacgatcaggttgtctcatgccccctagagggcctcctgcccaccttatatagggtggggggcaggattacaagatagaaaccttaaccaatacggtatcggtttcctaaatctactttacaatattatcaaaccaggactttaggctgttccgtaatatataaggaaacgtaatacccgagtcatgatctattacatatcccatagatataagttatcccctatgactagtcggataaccatgccgtatgggtatggggtacccataatatccacagtagcccctgagaccttcgcagtcgaaaagataatcttctctcgaaccatattactccaaagccgagtgcttcaatcatctttgtcatggtctcccgagtacttttaccaaatctgaagactgtggagggctggaaaataaagtcaggtgcaccgactagatgcacctaataggtgtagcccccgacaatgtggttaattgaacaaaccaagcatatagtcaaggaataaataatccaaccaaccgagtggttttgataatcgtaatcaaccaagtgacttgatatcaatatatagcatatgcggtgtgaatcctccaaataacatgatccgagtgatataccaactgctttgtaaaatatgatgagtgatatagcaaaatagctataaagaagcttgtatattgtgaataaaggaatttccaaagtattgggcatacgccatgcgcacactgctttaacagatgtgcttaagtccctagaagacacatggtttcaccacacctagaaatatatggcatatgtggtgtaaaatccgagtaaataaactcataaaggatttaccaaccgcctagaaaatgaccacaatatataatcagcctaagccataatattggtcaataaaaatgcacacttacgtggcgaaaagcaatgatattgtatccaatcaattgcttaaaaacccaaacagcaccttgacttatatataaaaaagtcagcgggacagctatataaagctttactatttgacaccttttaagatgcattgtaccaactcctaaaaagttaagtaactgcggtataaaaggattttaaggtattgggcacttgatcacgcgcactttggcctaagcaaaaagtgcctaagtccctaaaagaacgtgacaggccacacctgaaaatatgggctgcagacatattaggcctaggccaaaacatatgccttcgacaccctttaaaggatgacgcatataacatgctcccgagtaataaatcttccgggtaatatagaccaagcgtagctcatatgaatagcttctgatctgagtggttatcccttatgggatactccaaaatagatgtaacaattgaatcccgactggcgcaagtattcagttgataacccttacggggaataataaatagtccagtctttgagcatataaaatagacccatgatcatgaattcatgttgcatgtatccggagcaagtccaaattgaagatataatacttgtatttgagctagtaagcccctgagcacgtagtcacaattgttcattgatggtagctgacgcagttggcatagagacaagacaaccaatatagagagaatattgcccaccagaggtggcaaaaatattggtggtagtgaagatagtgataccaatcaaaagtactgaagtcgcatagccatggaggcgaagaaaccagtcggcggcagtcaggtcagccagcaatgaatatgaaggcgctcagcgataaagttgtgtagttgacgacaacaaacgcaaccgacatgatgaagatgacgatgtcggtgatccagccaatagcagtgtagcaaccaatgaaaatgacaaagacgctcatcagcatttgcatagtaggtcaaccgtgaaggtgaaataataagtcagcgaaaacataatcatccattagcaacagcagagatgtcagggtcgatgaagcagaggtgctggtgatgatgtcagtgacaataatccatcaaattaatgttatagctgttgtagatgcttcacttggaggagagttgatgttgttgtccaactcgtctaaaccgaaatatttgaagttgttgaagtagaatgtctgctccgaagcaaagatgaagataatgactcctggagttgactcgtgggttgatgaattgatttcttcagcttgacataaaatttgtcaaattttgagccttgtatttgtgtagcccccgactctttgattagttgggaaacaactgaacatagagtcgagaactgtagcctcttgtcgtcgaatagttattgcttgattgaagatatgtgttgaagatgttcaagtagaaatcctaaatattggagagcctcttgttgtagtaaaataacatggcatcgcatgccgagatgtcgaggctcacaaagacgtcgtggttggtgaagtagcaaaacttgcgaagtagcatcaatagagtttgccagtgccgaagataataaagatgaagtcgctctaccatgatgacaaagttgcattgccgtgatgaagtgaacacgagtcgtcggcaacagaagcaaactggtagtgaagacgcgcagttgtgaaaataaaagcactagtcggcgacaacataaccagtcggcgacggaagacgatgatgttcatcagtagtgatagttgtataaaccagatgtagaagcgagggcactagtcagcagcagacgagacgaccggcgatgaagatggtaaggccaatcaacactggcagaatcatgcagccatggaagtgaagaaaacagtcggcagccatggcaaatgtaggcagcttgtgttgaagatactgatgcctattagtagtgacagcgatgtagccagccgtgaagaagatagcatcagttggcgttataacaggccagccgtgcaagcggtgacaccagtcagcggcggatgcggcggccggtcggtgaagacgtagacgcctaacaacggcagcataataggccagccgtgcaggcggaaacaccagtcggcggcggtcgaggcggccggttggtgaagacgtagacgcccaacaacggcggcataaaggccagccgtgcaggcggaaacaccagtcggcggcggcgaaggcaagccggtcggtgaagacgtagacgcccaacaacggcggcataataagtcagccgtgcaggcggaaacaccagtcggcggcggcgaaggcaagccggtcggtgaagacgtagacgcccaacaacggcggcataataggccagccgtgcaggcggaagcaccagtcggcggcggcgaaggcaagccggtcggtgaagacgtagacgcccaacaacggcggcattaaaggccagccgtgcaggcggaaacaccagtcggcggcggcgaaggcaagccggtcggtgaagtcgtagacgcccaacaacggcggcataataagtcagccgtgcaggcggaagcaccagtcggcggcggcgaaggcaagccggtcggtgaagtcgtagacgcccaacaacggcggcataataagtcagccgtgcaggcggaagcaccagtcggcggcagacgaggcggccggttggtgatgttctgactgatccattcctggagcgtaagagataagcttaaaaccatgaatcccttttatgcatatctggatctggatcctgcagaacaaacatataggatgagtagtatctgatataaatataatactcgagaaaaaatcaagtattttaaaatatttataaatatgtatttctcctcttgtcaattttgatttccccgagcagatgactcattacgtttaaacactctgcccgactaatcatagccaccaagcactgggagtcggcctaagcacttcccaaacatgcatatgagtgtcatgagttcgtcattaatggaacaaagtttcacggatcggagtttactactcgggtacttttgcaattattaagagcagaaaataaatttatctcatctctatgcttttgatttattccgaatagtacttagcaccttgcgttactcggtccatccaacgagcccccgggtgctaggaatcggcccaaaggcaaccatccattggcaaaccaaacggaaagcataggaagatagaactccataactcgataggtacttttgtactcagattatgtcgcaagcaatcaagataaatattatgaaaaatatgatataacatctgtagcccccgactcactactcaatggaagaccaattggtgtagtgaggcagaggaaaaggaaaaaatatcatataaagaataaaataaatgatgacttagctttgtaatattccccttggtgatggcagaagtggccaatgtgggaacaaagtcgtccatcaataacaatgaagacaccagttggcggcgacgaaggcggtcgacggtgaaagcgaagatgcccactaatggcggcatgataggtcagccgtgtaagcggaaacaccagtcgacggcaacgaaggtgagccaacggtgaggatgtagacatccaacaacggcggcataataggccagccgtgtaggcggaggcaccactcggcggcgacggaggcaggccggcggtgaagtcgtagacgcccaacagcggcggcataataggccagccgtgtagacggaggcaccaatcggcggcgacggaggcaggccggcggtgaagttgtagacgcccaacacggcggcataataggccagccgtgtaggcggaggcaccactcggcggcgacggaggcaggccggcggtgaagtcgtagacgcccaacagcggcggcataataataggccagctgtgtaggcggaggcaccactcggcggcgacggaggcaggccggtggtgaagtcgtagacgcctaacagcggcggcataataggccagccgtgtaggcggaggcaccactcggcggcgacggaggcaggccggcggtgaagtcgtagacgcccaacagcggcggcataataggccagccgtgtaggcagagacaccagtcggcggcggcggaggcaagccggtcggtgaagacgtagacgcccaacaacggcggcttgatatgccagctgtatgttgatctgctgaatcaactcatgcatgcatgaaatttctccgagcaagctataggcggctgctcccatgtgcccgtggtggcgtggtggccgcaacgcatccgtcggcgctgctcccgactgaagatttgagccatcgagattaatctcgccgtttcttctgtagtcgattccatcacacttttcgatgggtaattcgacgcagcccctacctggcgcgccaactgtcgaaacatgaattcggcaataataaaagggggtagcgcacgagacctaaaagtggatggatgcgaagacaaaggatttagacaggttcaggccctctcaatgagaggtaataccctactcctgtttggggatttgaatccgccgagtgtgtattgatctgacgatcaggttgtctcatgccccctagagggcctcctgcccaccttatatagggtggggggcaggattacaagatagaaaccttaaccaatacggtatcggtttcctaaatctactttacaatattatcaaaccaggactttaggctgttccgtaatatataaggaaacgtaatacccgagtcatgatctattacatatcccatagatataagttatcccctatgactagtcggataaccatgccgtatgggtatggggtacccataatatccacaaggggactgcagcagcggcggcggggggtggaacggcgatggcagcaccgccgtgagctatagctgggtgagggcgagagggggatcgcgacaggtggaatggcgatgctgacaagatcgatctagggcaccgccgtgagcaagagccggcgcatctcgatcccctttgtctcactgatctaaagaatgacccaggggcacattggtcacaacactcgcgattcggtgtgttaatccggtgaaattggaaaaacggcgaagcagcgtgttgtgcgagcgtggcgatagcattttagcgaaacaacttggcggaatggcattacagcgaaacccatccttacatgtggctaaatgtcaattttctcggacaatgcaccatgaaaaaagaaaagaaaagccattggttcattcactcgctgtttgttgatgctttttctcttggccaacaaaaatcacctaacgatttgcggtgtaatcgacggtgttgtcaatatcgatagatcaaaa

SEQ ID NO: 9610 - DNA, 16284 bp, Oryza sativa
ccctttcccgaccactgccggcgtcaccacctctgcgccgcttgaccgaccgcgccagcccgcgctccagcggttcgatttccgccgctcgatccaccgccttcgccactcaacgcatccacgccgtcgccgctttcgcaccgcccacgaaaccgccactaccgccagccgagcacttgaccgccaaggtcagttctcccctccccaaaccgacctcgtctccgctataaaaccaagccaccccaaaccccttcctctctcgttttcactcgcctcagtcctcacacccgccgcgccattgccgccgaaccaccgtcgccgccttgttgctgctcgtcccgctctcgccgttgccgtccgttgccgaagcaccggaggagccggtgcgtgggtgacgaggagctccgggcaccacctctccctcccttcttccccggccgcgccctctcggtgccgtgccgcctcggcgtcgcgaacacctcgccgcgacaccgaccgcgccgccaatgctgcctcctcttcgattggtgagctccccaccataatcctcctcctgccgcgcgatgcgccgcgcccgccgccgctcgccatagctcgccacgcgctcttgctctgtcccggaggccgcctctcgtcgccagccaatctcggtgccgctccgtccaatccgacgccggaaacggattccttgaaccccggagatgctcccacccctttgaatcgaaccctcgtcgtctcgtcgtgttttccccttttgatctccggtgattgccgccgccgcaatccaccgtcgtcggctcctctcgcgtcgattcctctcgccgccacgctcccggggatccccatgacctccccctggctgccccaaggccgtcggccttctcctttgtctccgcgccgtgtcgccgcttccgccgccgcctaacgccgccgtgcgtgcgccgccggtgaccatcgggtcccgcgtcaccgcgtgcgcgtcgcaacaccataccggttcggctaagcccgagcccgcgcacccttcgctcttctcgcgcgcggccacgtcggcgtgctggcgagcttggtcgccgccgccagccaccgtcatacctcccctctcaaatccgtgccgttaaacggattccccctgacctcctctagctgccggcggtggccgctcgctccggttcgccgtcgctcgccggaacgcctcgcgcgtcgtcggccgtccgatcccgggcacctcctcctcctcctccttccctttcgcccctgcccgcgtggccgaccacgtggcagccacctcagccccgggcccgcttgactgggtcaagtcgcgcccagtcagcctcctccctccgtcttccctcccatgcgcgcggtccacggcaagccgtgcggctgcacgtgggcccgccgccatccgtccacccggcgcgccgcgcccgaactgcgcgcatccgaaaccctagcgcccgcctccgcgtgcaccctccccaccgtgaacccaaccaccgccatctgggtcccgcgcggtggaccgcgcccaccccgacgggcctccctctctccccgcgcgccctcatgggccgcctcctcgcgcccgcgccggcccatttggtttggccgagccgcgttagcctttgggccgcaccaatgccaccgaaacaagtctaatatacatccctccttgatttcctttttccacccttgttccataaatcaattccttattccaaaattccatgaatcattttccttggtcccggattcaatgactgtcaataatattcttgagaatattatttctataaattccataaatcatctctcctattccagaaactccaattaaactttcaaaattcatatcacccaattcgcaactccgattgactccattccacttccaataattccgtaaattgagctctatttaatggcactactaattagtctaaataggatctttcttttggtcttttgtttaggttttcgattgtttgcgtatagttgcggttatcggattttcgtcgatcgcgggttttctcgaagattcgtgaagcttcgtgaagaccttgagcaaggcaagtcaccatttgatcaattgcccctataattgaaaagtcattattattttgtttgcaacttgcattattagaatcacacacttaacttgcttggcctcggtttgcgtgccaaaccgacggacctacccagtagtcgcactaatttccgtaggtcgtactaccctgattccttgtcgctccacccttgtggtacctcggtattcgtgctctctgagcgcgtataccaaatatcccacatacaccgttgtttgtcgaaaacttgggaaatgggtttgtgaagccttcaaaacccgacatgtggtgtcggtgtgtttgaaaataaaatgaattgtgaaaactcgcgatgcgggggttgtgcctatgtggcactgtcccgtattcgcatataaggaccgattcctgtgggaaactcatcgaacataatcaaagtgcaaccacaaggtggaatgggacaccctggctaagtaactagtcggttcagggaaacctcgcatgccaatagttgggaacgccggggcggggtcggacaaaccgggttcctggtaaggcaaggacgagaagcttgctcacttaccgatcaaggtggttggagtttgatttgtgaacgcctaaaatggcctatgtttatgtgaggatttgatccttctatgtggcatgaggtaaccctgggtcggctcgggaaaggctttgttgcgaacctccgataccgacgggtgttcggaataagttcgtatcttgtgggtaaagtgtacccctctgcagaggttaactaactgttcgaacagccgtgcccacggtcatgggcggatgtgaggtttttcccgttgcgtagatttgtttgcctgtgctttgtgaaaagttgttgtggtgtgggaatcgtaaccagaatcagcctatgtggcagatggacgacctgagtggtcagaaacgaatctgtgtgattcgggatgtctgcgggcatcatagactaggcttcccgagtggaagcggattgttgtgctgctgggcagctggactctgggagtccgagaaaatgaaaaaggctctgggagctgattaatcaagtggaatggctctgggagccgagaagtaatgaactgacccgggaggtcggtacattaccaaatgagctgttgaaaaacatctcttaaagtcgaatcgagacgcaagtctcttttcgtcccaaacttagaaagaaataaatcacttagtgatttcaaaatgatttcaaacaaaagatttgcaaaacaaccttgcctctctgccaagcttgcattaaacacctaagttcccgtgacttgctgagtacgaaagtactcacccttgctctatataaatatatatatatagttcctccgccctgaagggaagataaagtgaagtgaagatttgggtttcgtcctggttcccagccgtcgcctgtggtgttgggtgttagaccgttggttccgctgctgctgctgctgttggtgttttcctcgtccgcgtcgtcggttgtattctcgggctgtctgagctgcaacctaagttaaggtaaataagtcctctatttattttaaggattgctatgattcatatttgtcaccatgggtaccagcactatgtcctgggactggtaccgagatcgcggtttcgtaggaagcggttcgcgccgttttccctacgacacgctcctgtcaggtgccgttgtacggcggtatcagattggggtgtgacaggatcgggactaaactcagggaggagttgaggtccagacagtcaaggataccgggtgacgaagttggatacgagatggcacacagtgaatggatatcgtgtgggagagatcttcgcaacgggcttcacgagatatgcgtgcaagtaccggtgttggcgaaggagattggagtgagaaattgaggaagagtatatggtgatatagtacacgtggtactgtagcatgcatatgtgtggtattgatcgatgcatgcaagtgtactgtagtggttggcagtacatggatgcatgtatgcatatacatgtgtgttggctcggtgagtccaaggcaggagcggcgctaaggcaggagaccgaggccgaccgggacttcgtatgagacggacatgtgtccatgtcgggtttgctatgacacggattgactgtagtcggttgtgaggctgcaggctttaggagactaatttggatagagtcatagtttgacgagtggtactcctatttcgagtaggagaattttcatgtataaatagagaggaagcgtgaggcttcccggtatcggttttaggaagctgagtttgagagattagatagggtttcgtgagaaacttttgaggggtgctgtggctgcaccttgtgaacaatatacttaagcaataaagatcatattcaatcatcaaggcattaacgatctattccggtttcgtaagttttacgtttatatttggttttggtattaacttgtgattgttcattttgctgcgattttgttcaagttaattcatccaaaacttttctaatacttcaaagatcagatctggaaagtttcgttgattggttctatttgatgatattttgtcacgtgcaaggaaaaattgcagtggccaaagcaagcaaataatgtgatccctatatgggatgttcagattgcatgcagagcagtacgagctgtgagcagcaaaccacaagagatcggccgggcagctggttgtatccatgcatgcaagcccgcacatacgcacgcatgggcttcaattacacctgcgtacactcgcatacgtgaccgtattttctagcaatacggccgcgtatatacatggaaaaacaaggagatgcgaagctacggtgtattttacgctatacggttaagttagctcatgcttgcccggatcaacaaattaaatttatgaagagataaaatttatctgaatgaattcaacacaatccttgcaagccacgcgcatacgaaagacggccttccgccggactctcaccggcccagcaacggaagagtggcaaggaatatcggaaaccgccatgacgcgctccggcggatgcgcacacgtacgagagttaaattctatcctgtaggcccatcagaaattaacagaaccaatatttgacgtcaggcggatcgaagagataagattaacaaaccgatcgattgatcaagtatatccgcacttctccaccgacctcaggcccctatataaggcgtcgacgtactctcggcagcctggaggccatggacgccgatcaatccataaacacccatcgacacacatgatcatccatctgtccatctcctcctggaagacaactatccaccggcgacctagctatccatcgaccggcaacgagcatcaagatgtgatctcggcggccggcgacctcgtccacagcacccctgtgtccggcaagaggcgcacatgaggaggaacaacgacatcttccttgggcagatcaaacgctgcaggagatcgtactcaaaccttcaggaggagagcaagtctctgtcgctttcttttctctcgtttcaggtgggagatgagcctgtacgcgacgccgccggggttatcgtggctgccatgactatttctgaaccatctccgctgccatcgagactcatccgcccgccgtcatccacattcatcaacatctccatctcatctcagatggactcatccattcatctacaaatcattcaagaagcgacaccaaagaaagtcttaatggccactacaggtaaagctaatttagattggttcctttcttttggttccagtgcctacgtgcatgcatggaggacggccgggtgtgctgccatcgccggagtcgtcgcgtagaccaatctgttgacgctgatcgcaagcctccgtcaagatcgatgccgctcgtcctcaagctctgatgttcgagctgccggtgacgatgaccctgctcattgctgcgatctcgcctagatgttggatgacgttgccttgccgaccgctgcctccactcggcgacgccgtggatgtctgctggccatcttcgacgatgctgccaccttcctcacactcatcgtcaaggcgctcgaggagaaggccggtcggagtgccgctacccggcactgcgacaccaccaacacccatctgccggagaagaccatcgtgatgccactccgcccgacgcgacgcgccggagatcgtcggagcagccgcggatgctgcctagtcacgctgatccagaagctcttgttgagaacaacacaacaacacggacgccgctgagctgcccgcgtccgtgaacaacatatcgtcatcacgccggtggccgcccacgccgtcctgatagagcagcgggaggccatctcgtccaccttattggcaacgcacagacgctcgccatccccgtcaagctgctggtgacactgtccgccgagtgccaccctgtcaaaggctgtcgttgtaccgacgccaagctctaaggacgccgccattgtgatctctactgtgtgaggacgtctcaccgagactcaggcgacgccttcacgctcgtcgcggtttcttcggtcaccatcaacgtctactcaatcatcttcgacggtgctaccaccttcctcacgctcatcatgaagccactcgaggagatcgccattcggagtgctgctgcccggtgcctgcacgccgtcttgccggagcgtaccacggatcgtcggagcacccgcggatcgacgttgccgagctgtcctgatccaggaggtctggacggagccgtcggggacgcccgccgagctgctcttgcacttaagctcgttacaattatcatgcaactgaggcactgccatgtagtgttcgttcttgccgatcaaacactgtcacactgcctgccggagcacgttggattacgccagagtgccattgctaggggcccgtacgccgtcatcaagactggccgtgattctttctcttcatcaagccgaggtcgttgtgccgtttgtccgcgacgctttcacttcatcatgctggagttgttcgtgatgtcacgtgaacatcacgtcggagcaccactgcttggtgcctataaaccatcgtcaagccggagtcgtcgtgccgtccgtccgtgacgtctccttctctctacaccgcatgatgagatgccatctgtctacgatgctttcacttcatcatgccaagatgagatattgtctgtccgtgatgctctccctcttcgtcgagatcaacgacgctgtattggagcgtcgctcgtccacatcaacataaagcaagaatggtgccgtttgtgatgtcagggaaccgttcatgccagatctacaccaataatttcctcgaccgttctgccgacaaggcatttacttctacaaaggtcgccgttgctaccggcaccctcatagagccccttttatgggctcgtcgtcatatcaactggatcaatagtagatccatcatccgaaggatgtgctatataagccacgttcgtccggctgctgtctgcactgacttcttcatcaacaccttcattacaaatccctgttgtataagggacatgacgggtcaggaggtgcccagccatgtttaatccggttgccgtctacacctactttcttcgtcaattcttcattactttgatcacatctagtcagaaggtgcccatccatgtttattcggctcttgtgtgcaccaactgacttcaccaactcatcttacctttaacaccattccgatgttgttgctatgacgtcgagccgtccaagctaggcgattccatgcgtgtcttcttcaaacaatctacaccgacacgtcgttcaagaccgacgaggctagacgacgagggtgcgcgaagccgacgctaaggctatgtcaccaacactggcgcacggaccgacgaggccgtggatgcgttgccggcgcccacatatatatcacacatcttcaccaacattcatcatccatggagaacgtgaagcaaagacgatgagacgaccacaagcagcttaatcgggggttctcctgcaggcctagacctgcggaggtaattaaccaggagcttctcgaggccctaggaaccagaagacaacatcgctgatgtcagatctgtccaacgacaggcaatggcacgtgtattttctattatacatggaaactgtatcttgataattcaattaataaagatcatgtgtttttgtgtctcttttatgtttattttacatttgtgtatttaggtacactggcacgtccgcacttattttctctctaaacatagagggacatattcgtatttttctaccctaaacaggttcttgttagatttgaatttgcttaagttttaggttttgttcagatttgctgaaattttgatagagctgattttcaagggtattttctcttaaaccgtttattagtttacaaatccctccggtggaattgttctttaggttgtttagtgtcaagtttgcaactcgatccaacggttggtttaagagaaatcgtgtttttaccgaagcgctgtcgtgttgttttcaggctgacggttagaccgcgagaggaccagcggtcagaccggtcaagcttcggtcagaccgaccctagtaggtcggatagaccgccaaacgtgtgttccattggcttttgtgggatgtgttttgatctattaagattcgattatttgacttccgttgacgtaatctaacattcacccctctctggtaggcttggttacttatgtttgattctaaaaaagcaatccgttggaccctatccttacaaaagaaagagcagatctggaaacataatatcacaacacagtagcgtgtaatccattctctttcacatttgtccttagccaggatcagatgcgcttttttaaacctatcaggaagatgattgcgaaaacagtgatgagaatgaattttgacagcaacagctccagttatttatacattccaaatctaaagttacaatagtttcagcaatttttcatccccaaaagtccctgcataaccaattctgaatgtccaagttagttattcaacactactgcagaagtgcagaattgagtcaccctaaagtgaggttgaagcccttaaattcctttattgaaaggggaataaaaaacacgccaaggcaataaatatgaagtaattctcacatagacgtcacaacaatccccatccagccatccttgaattctccatttgcagatagactagaacagctagcgcatgagagtatgtgttcaatggttatggttttgtgggtaaatacaaacatataggcaaagggataaatatgctgttctaaatttgtaaattagagtatcatcaacaaaaaaagcaatgcaatgatctccagggctaacaaacttcatcagacagaggacaagagaaatttaacacaaatcaattatctcaggtcaaagaaggcgatttcaacattagacaagacaaaaggaaagcaatactactgtaaccaacaaccactaaggctatgtacatcctttgggtgcagagtaaggctgggaacatgatcctctgacgtagagcaatctaatctacgtcagagggacgtccgatgccgctacactgctcgatcgccatccaacggaggtaaacaagcatcctcttctgtgagcacggcagccgcacccgagcagcaccaccgctgcgcgcctgcgcccacgccgaggatgccacactcgtgccgcctccacacggcctcaccccgggcgccccatgcgccccatgcgcccccgcacggctgtcgccccgtacggcgatgtgccgtgtgtcgccgcacaatagccgtcagccgcgtcccgcacggcgctgcacggccgtagggccgcaccgcccgaacagccgccgcatcggccacccacgtcgtcgcgctcacgccgcaccgcctgcttcgacccgaccgctgccacgccgcgccgccctggccgcgcgccgccatggccgcgcgccgccatggccgcctccgcgccctgaccgtcctggccacagcagagaagagtgagattcagcagtgctccatctgagcgtgagctcaaggaggcagctaggctgccatggcccatggctccgccagaagcgctggccccaacgacaggaggtcggtgcaggcgaaccacacactcaatgcggacggcaccgccgcaggatgctgcgctgcgggcctgcgacaccgttggtgaagaactcggcggcatatgacgagagaagcggccggccgggagcgagccttccattttcgtgggttgattttggtcggcgtgggctgaaaagaagccagtaggtccgctgtgcttgtttacctccgttggatggcgatcgagcggcatagtggcatcggacgtccctctgacgtagattgctctacgtcagaggatcctattccgtaaggctatgtacatcctttaggtgcagaggccggtttaatccattatctaaaaaaaaccaaacaaccactagcagttttcacattgagtacagaggtaaaggaatgcagagccctgaccttaggagaggccgctccggtaggacgaatcggcggcgatgcacgaccgcagccttgccgccgccaccgcgctgtgcagcggcatcaaagaatccacgctcgccagcgccgctgccaccgccacgaaggacctgaaacagtcaggatctaggtactttgggcgtgacctgcggaggcggggaggagagaccggatgcttcgccgcctggaacgagctcgtaaccggagatctcgactggcgcgcggcggcgcggtagaaagacgccatcttgtttcgtcgtttgctgcggccttcggttgaggaagggaagaacaaaagctcaaaactgggcctgcgtttattgggccataaagggatcgcggtggcgtacatgagacccatttaagttggcccttcttgtggcccatatatacaatgggccagagatacctcgccgccacgggtaaccggaactaactgcggcggcggccgcgggggagcagcagaaactctgaaccagcagcaagctagcttcatgcttcaggcttcaagctttagttgctagcctgctacattgctcctcgttgcaaattgcaaacaggcgatggctgatctgatgcatctgatggcaacgggattagatcactgtagatgatccaaaaaccaatcgtttctctttgtggatttcagattcactagcatcaacttttgccctaatttcctccctccttttgacttgaactgtctccttaatttatcggagacgtttggttctcagctggatgagagtgaaactgatgaaatcatataaaacctattgcttttgcctacaacttttgcccccaggtactgtattactgttctactgttctctcaacagttgatcgatgccatctgcaccgtccaatctagcgtgtgtcaaggatccaaatatccaatatctcttccgcttctaccctcccgtgaccgtgagcagctcgagattagtttcttctcgaccatcgaaccctttcccgctgcttctgttcgccgccgccgtgctccagcgcctagggttttcttcgccgccggcgagtgctccagctcctagggtttcttcaccgccggcgagtgctccagctcccagccctgcgcgtcctcctcgccggacgctgccggtgacgtctgggccaagctaggtgcggccaccctcctcctccccccttcctttttcttgggtttcttccgcctcacgggttcttgattcttgaccttttcgttggtcttgggcccttggccattgcttgcacagcaggtctgtagtgccctccgattccgtgttcccggaggtggagctggccgaggacgacgccgtggtgtgctcccgggtcaccccggatggcggcggggaggtggtcgcgtggtgcaagattaggcgcggcggcgacgtgtcggcggcgacgatttggaatctgaggtatctgttgtgattggtggttggtttatccccttttcgctgctttgctcttctggactgtacatcgtaggcaagatgcgctttttttttttttgcaatcctgttttattggattgggggtacaaatgccattcattgatgatgcatgtttgggcgaaggctataaaatgcagaaaagttcttactgattgcgatggaatgcgagttgttgtcgtttggattatgtgaattgttgcggtgtcgcactatccaaaattaaagaaaggtttcctgtggataaaaaagattcaaatttcctaatgattccaaagtgcctcattttcttatccataagaccataataactcagtttccaaacttttgaacctgattgattttgagtcgtgctgatctgaaatcgatagatgtgagcccctgaagacagggaataggcagagtggccatgggtgagttttttcttttttagggggtggagggaactgtgttgcaaccttccgttaatccttttatcaaattctcgctgatgttagatgcctgtcttgtcatccttgtaatgtatgtttcattcgaccgctatcttacgttaacattatccatgtgccattgagaaagcttggatgcaattattgtcgatggaagagttatccagcaagaagcagttgacatcaaaccggggagtgaaattgttccagggccccagaaagatggtgagacaattatgtattttgagtttggcattttgtgcatagattggttgttatgtttatttagtggtcttgtattttttttaaatagactattttattcctttatgaagccaaatgagtgtttacacatgactctgaatatatgtactcattgagtcatttggaatgtttattgtttcctagacctttctgtttagaaagtgaaacttctatggttgcatgtttgtaattgtgcttctgaaaaatttaccaaattacaaatggttttccttttgtgatttcgttatgttggacaggtgaactgtaccactatgtaatgcatttatgctatccattttcttgcagggtatctgttgtacacctttgatataactggcctgaatgactaggacaaaaataatatcaaggtattttgttgaaatgaatgttgatcaacagcaataacctgggtgcataaaagtcactaacttctatttaaatgacgatgtcagattgtgctaggtattgagaatgcaaagtgcagcatatgcttaaatttgtgggatgatgttgttactgttgcttcatgcctccacaacttctggtacttttgccaattttcctagctacttttgatttatctcaaaattctgattggtgcttattcctgtattccttttaagcaatggctgcttctttgagtggttaagaaggtcttcagctaattcgcgtgataaaagttagagtgctgcctgtccacaatgtaggacgacagtgcaattagttggtgggaatcacttcctacataatattgaagaggtgtgatagttgggtgtgatgacttaactcctcaatactgtttaagtgctacatattgtacagctgagatgtttatttatagttctgcttttgtaggctatactgtaagttttttcatcgctacagcggtctgatgaggagattgcattgttggagtcatatgccccggtcaagacaaatattgtgagttcaaaatcttactaagaaattgttgattcccaccattttctcaatggattgtatcaagtgttgtgccagtctcatatttgccagcactgatatttgtccctgttatctgccataaaatcgaatattgttttaaaatcatcatctttttttcaacttgtaaaccttattttttttcctacaaactttgcccatgttactgtattactgtttaatcaacagctaatcaaggccatctacaccatccgatgtaccacgcggcaacgatccgtcccctcttctgcttctaccctcccgtgagctcgtggttgaaagttacatttgtcatgaatttggattatcattctattttgaagatatccttgattgataaatgcactgccatgtttcagataacattttattctcttatttcccccaattttccttccatttggcaattctcgtggtgttggtttgtctgtactgcactttgacacattatatttaatttacaagacttgccaggtgcctaggattgtctttagtattcaacttttgacaagataatagtggatgaaatgaaaatctgtttacaattagtactggcctcttaataaactaattagtaaaacaaaattccccaaatggtgggctcattccgttagtcgggtacttataattgtagaatttcctttcagtgcaggttgatctagaatcatggttctctctctaagtcctattttgcttatcgaatacttgcctcttaataaactaattagtaaaagaaaattccccaaatggtgggctgattccgttagtcgggtacttataatggcagaatttcctttcagtgcagtttgatctagaatcatggttctctctataggtcctattttgcttgtcgatgatattgttaaatgttgccatggaatgttagcatctgatacatgggcttctcatctatagacatgttgtgcttgtcattacctctaaccatatcatgttatttaatttatatcacatgattgaaaatgcattttagcatgaatgactcataacgatttagaattttctaacttacaattagcaaaccatggcagcacaatatggtatttcaaattttcatttagttgcactacttgagaatgagtttagtggtttggttggattgtctaagtgcaaatgttgctgtcatttgtgggaatcaggaaaatataaaatgccatatataatatcctctatattttagttcatagagagtatagtttccattcactcccaaagaaaatatgggtataatccggagcaaataatctggaagcagatatgaatatggatattttttgctggatatgaatacaaatactatgacgttggcgaaagggcttgtagcctagtggttacaagagcatcagtagcatctgaggtcctgggttcgactccccatgggagcgaattttccagaatttaacggcgttgtgctttcagtagtaggcgacgtacccgtcgacagcgaggctcctgtgtagtcttcgaagatgctcacaggggtagggtttgcgtgcgtgtgtttataggggtaattctaaaaaaaaaagaaaagaaaatactatgacgttgtttccagtggatggggatacaaataaagatgcatgcttattgtttttcaaccacatttgcttaagcaatgattggtctattccagtattactattgttggcccctttggaacatataattgatatgccttttgcatgactcttctcaactaaaatgcattagattgcatcatgtctgtggttcacaatatgttacatatgttatctggaaagaatataattaaatttgctacagttctgtgctattgttatgttatttttgcattgttgcatgtggtgtttgggatccaactaaaactaagttggttattttattatgtaatctcaaccgatatacggaatttatatgttgtgtatattcatggttgttaaattgctacattatgttcagtatatatacagttttttttggcttcaattttatgccgtcctttccagctttcccgccgcaccgcgcggggcaccctctagttatatttgttctctgcacttctgctaggctgcttagctaccactagccttttactacccagctgcagataaactaaaacatgtatatatgaacatgaattccctaaccatataaactaaaacgcctccgatgatcgaaccatatcttggtccatcgatttaagtggaaaccaatgatcagttgttttattttatttattatatttatagaacaattactccctcggttctataatataatgtacaaccactttctttatatgttccataatataaggcatgcattcaattaattatgacatcttcttcattaaattattaattttttaaacaattcactctcacattctctaattctattggatgcatgcattatatttattaggatgatccaaactacaagatgataataactatttctttatctttgggttaatgttggttgtgccttatattttggaacggagggagtaatttattagagtcacgtgacaact

SEQ ID NO: 9611 - DNA, 24201 bp, Oryza sativa
cggcggcagcggttggagcttcggctccagcggccggaggtgggagacgaccgacaggtggggcccacctgtcggcgtcccgagagaggagggaggggcggcttgggccggcccacaaggaggaggggccgcgggagagggatgggccgacggcccaacaaagaaaaaggagggaaaagaaaagaaaaagagaaaaaggattttcctgggattaaaatattgcgcttgctcatttttaattggttaaaattatttccaaggctctgaaaattccactataaatcctgttaatatattgtgacatgtggaacccaagaaaaatcccacaatgccaattccgattattatttgcatttattaattagggaattagctctaggttaattaagataatttcttcggacgatttatttagccaatttttaaagcaagcaaaggggggaaaacttcagggcgtgacaaacctaccccccttaaacggaatctcgaccccgagattcggaagagctggcgaagaggtgcgggtgggtggccttcaactcatcttctctttcccaagtggcctcttcctctgagtggtggctccactgaaccttgcagaatcttattactttgtttctggtctttctctcgctggtttcgaggatacgagttggcttctccacatacgtcaagtcttcctggatttcgatttgatccggacttgcctgttcctcaggaactctcaaacatttcttcaactgggagacgtggaacacattatggatgccaagcatgttggagggaagctcaagctggtaagcaacttcacccctgcgttccaaaatccgatatggtcccacaaagcgtggtgccaactttcctttggtttggaagcggtgtactcccctgagcggagtgacacggagatacacataatcccctacttggaaaacgagctcccttcggcggttgtctgcatagcttttctgccgagattgcgcgattctcaatctttccctaacagctctgactttctcttctgcctcatttaaaacttctgtaccaaacaactggcgttcccctgtctgatcccagaagagcggagtacgacacctccgtccatacagtgcttcaaacggtgccatctgtagactagcttggtaactgttgttgtaagaaaactcagcatacggcaagcttttgtcccatgctccaccaaagtcaagcgcacaggctctcaacatatcctctagtatttgattgactcgctcggtctggccatctgtttgtggatggtaagcggtgctgaaattcaaccgggttcccaattcttcttgtaatttctgccagaactttgaagtgaattggcttcctcgatcagacacgatcttcttaggtacaccatgtaaacacataattcttgccagatagagttctgctaatttcttccctgagtaggtagtgtgcaccggaatgaagtgagccactttggtgagtcggtcaacgactacccaaatagaatcatgccccgatgacgtcctgggcaaaccggtgatgaaatccattccgatttcttcccacttccattctggaatctgaagtggctgtagcaaacctgctggcctttggtgttctgcctttactcgttgacagacgtcacagagtgctacgaactcagctatttcccttctcatgctgacccaccagaacttttctttgaggtcttggtacatcttagtactaccgggatgaatggaatattgagtttgatgagcctcggttagtatcaggtcttttaattccttgttttcgggtacacacaatctttctcccatccagattgttccttgttcatccttaacaaaacctcgggcttttccgaccctcatgttctttttgagctctgctatttcaggatcacttgcttgagctatgcgaacctgctccaccagtgtgggctgtgcctctagggcagccacgaatccgtgctcaactataccaaggttcaaatgttccaaatcatgttgaacctcacagcatagttcctctacccatgcgacgttgcagtaactcttcctgctcaaggcatctgctaccacattagccttgccgggatgatagtgtattcccatatcataatctttgattagctcaaaccatcttcgttgtcggagattcagatcaggttgggtgaagatgtactttagacttttgtgatctgtatatacctcacaacggttaccgatgagacagtgccgccagatctttaaagcatgaacgactgcggccaattccagatcatgcgtcgggtagttgccttcatgaggacgcaactgccgtgaagcataagaaaccactttgccatcctgcatcaacacacatcctagcccctggcgagatgcatcacaatagacctggaaatctttcgtctgatcaggcaggattaagactggtgcagacaccaaccgtcgtttgagttcttcaaaactcctattgcattcagcagaccagataaacttttcttccttcttcaatagctgtgtcattggcttagcaattttagagaagttctcaatgaaccggcggtaataacccgcaagtcctaagaaactccgaacctgagtgactgtccttggtggggtccatttggtaactgactccacatttgctggatccacagctactccttgagcattcacgatgtgaccgagaaactgaacttccttaagccagaagtcgcacttgctgaacttggcatatagctggtgctcttttaacttttcaagtaccagccgaagatgctgctcatgttcttcctcggacttggagtagataagtatgtcatcgatgaaaaccacgacaaacttgtctagaaattccataaacaccttgttcatcaaattcatgaagaaggcaggtgcgttagtgagtccgaaagacataactgtgcattcgaacaacccgtaccgagtgatgaatgctgtctttggaatatcctcttcgcggatcctcaactggtgatagcctgaccgaaggtctatcttagagaacacagtagctcctttcagctgatcgaacagatcatcaatccttggcaaagggtacttgttcttaatagtgacctcattgagtgtgcggtagtccacgcacatcctcttggttttgtctttcttttccacaaagataaccggagcaccccaaggcgacgtgctcgggcggatgtatcccttctgtaactgttcatcaacttgcttcttgacttccgccaactcgttggctcccattctgtaaggcctcttgtggatcggtgcagttccaggtaccaagtcaatccggaactcgatatccctttttggtggcattgttgtcagatcatccgaaaaaacctctggatactctctgaccatgggaatatcctccagcttcttagtggttttctccactgctacctcttgttcttcaccagcagcctggtttaaactaatccctggcttctgcggcactggagactggaagattaccacctctccttttgcattggtcaacttgatggtgcggctggcgcaatcaatcactcctctgtgccttgccaaccaatccattccaagtatgacatctaggtccttggattcgagaagaatgaggttggctggaaaaatcaacccttgaatttcaactgtcacagatgggcagtagtgagttgtggtcatgccacctccaggagtatgaactcgcattggtatcttaagcttcactaaagataacccatgtgcaccagcaaaacgcttggaaatgaaggaatgggttgcaccagaatcaaacaatattactgccggtgtcgagttgacggggaatgtgcccaatataacctctggtgctgactgcgcctcctctgcagatgcatgattaacacggacctgaacgaacttgggtccggcacgtcttggcttcgggcactttccaaccgtgtgtccgggtttgttacaattgaagcagagttcgggtttttctcccaacctcttgggctgttctggcagagctggctgaactgattgggctggaatctttagtgaactcggagtagggttgaggctgtgctgctcactattgttgtgactgtcactatggtggttcttgttgaagttacccgggtggtagggacggtgctgccggataatcatggtggaaggtccaccgtgatgtcccattgtgaaacgaggcttctgactcttcccctggggagtcctgaactgagctgccttcctcttacggtttattttgttacagtgctcctcctgacggatagccttatccaccagcttctcaaagtcctcataatctctagagatcaactggttagtcaattcatcatcaagaccagacagaaacttctcctgcctctcggcatcggtacgcacgtcctcaggggcgtagcgcgcgaggcggttgaactcatgcaaatactctataactgttctggttccttgttgcagggaatggaactctctcttcttttgtgccacaattccctcgggaacctgtgctttattgaaactatgacgaaactctgtccaagtaacctctgccccagctggacgggtcaccatgtagttgtcccaccaaacagaagcgggaccttgcagctggtgtgtagcaaaagcaaccttctcttgctcgttgcattgcaaaaggttcagcttcttctcaatggcatgaagccagtcgtgggcctcgattgggttggtggtgcttgagaaagtgggcggcttgacacgaagaaattctaacagtttggactgaggaggtggaggaccaaactgcaggttctgctgctgcagctgtgcttgctgctgcacctgctgcatcacctgatggtactgttgctgcatctgttgcatcatcattgtcatcatctgagtctgattgtccaacacctgagcaattgttgggttctcgggcggtggggacagactgttgtcagatgcaccgttggcacgtgctccattgatcggctcttcgctgccactggcgttgttcgagtcgcgtgaaccattccttatctccatctgaaggggataggtagaaatatgagaaaaggaagaaaaacagagggctcagaaactaatcttgcttatgaatttaagtgcaattatcttaatcttgattaaaacactgaaaaagaggcacgcaactcctaattgaggcagtcataccactgacacataatatcgaccgccgactaacccacaagcaacaaacctaaacacgaaaactagcaagcaaacagactaagaaggcgataaagctaagggcggcgactctgaagctcggggcggcgcttgcaaacgagggataggactgacatctaaagtagacaagggataggaaccaattcatgctcaaatccaaattaaacaaagcaaaagaagactcaaataaataaccgagcaggatgatttttatgcatagaacatttttcatgaactcaaataaagacactaatgcaactaaacaataaattaatgcatagactagttgcatggaaaatgatgcgcataacattgcccccatcgaatatagacacgacctaatgcataacccccaataaattcccgactgactgtcgaataaactccaactaaaatttttctaaagccctagactgagctaattttttttttttaaaaaaaaaatccgatccgaaagaacgaccaagatttttcccgcaaaccaaagaggcaaaactccaaattttcccgaaacaattccaggtgcaaaaaggcatatgcagatgaaaaaggggttcagagggctcttagggtttccagttggcttgtcctacggtcaaggtcggctctgataccaacttgtcacgcccagaaattctcaaaccagaatttctaagctgaatgtgcattaaatccctgtccaggaccagccagggtacacaaacgacaattgttgacatacagatccacgtcttacaaaaatagaaaagattacaaatgcagcggaaaagaataaaagcgagctaaaccgggaagcttgacttcagcagcgggcgactccactccacaggcaatccttgacggcagcgacgaaaccaactttgacaaaacagctccaactaggaagatcttcagctctggtgtgggggaaaagagagcaagactgagtactacccactgtactcagcaagtcataccggaagaggaggtatgatgcaggatataaccacaggaggctagaggttcttttgcataaagctagcatttaaaagcagtagttgaaagcagtagaacagttgtagtaattaatcaatattaaccaaacactgtccaacgctacaccacgttgcaacaggcccaaccaaccacctgaactacaccagttcattaagctaaactaggggtgagactaatcacggtgaatctggttgatcgcccataaccgcgggcacggctattcgaatagttttactctggccagaggtgtacaactgtacccacaagacacgattccacacatgtcgccatgccccgaagtatcaccatgatactgcaaagggggaaatcgtgacaagaccctccacataaccctcccctaaccatccacaccacgctaaggtttcacccccacccctcaaaaggcggtgggcggtcccctcttgcgccgcggtgaatccggcagctggacaaccggacaccccggccgacccaactccatcacgcccaccctcgccaccggtgcctaggaaagggtcgagctatacttcagatcaagcagttacccactcccgcttgtggtaagcacggtaagtctcccagggtttcccgtgaaccggtccttaaccgccatgggtgcgaccagcaaaaccatgcacccacagcccaccattcagtgtattttaattaactcacaccattgcggtggcaccaatctaaagctatgccaatagacaaagtctatgtaataatgtgatccccatttgtgtactagttgaactaagcatggctaagcatttcctaaaccaacatctaatcattttgatacccaggttatcaatggcatatggtaaacaataaatggctgagtaataggacccatcccacatgatattgtaaaagaatgcaacatttaatagaaatgcgggatatttgtaaattgggtacaatatgatcaaacgtattgcatgacttgccttgctctcgaactgatgagacctcagcaacgtcttcgaggaactgcggatcgacgaaacggccgaaatctacgcgacaaacaaagcacacaagcaaaacaggctataagactactgaagcaggaaacaaaactatttttaatggattctttgcatttttcttgatttactgagacttgaatggacttaaacggagctcggatgaattacttatgaattttagaagataaactgtgtttttactaataaagaaaagtccttaatcaatttattgcgcaataaagccccagggctgacgtcatccaagggggggcggcgccgacatgcgggccccactggtcagcggcactacgagagggagagggggcggctggcaagcgggccccactggcagcggcacaaggggagagggaggggtggtccaccggctggtgggccccaccgggcagcggcacagggcgggagaggggcgtggctgttggcttggcacggctcaagccggccggccagccatggggcggcggcggcggcacgcgcggtcaccggcggtgaccggcagcgcgggagacggcggcggccggcgcgaaggcggcggcggcggccgaagacgacggcgcacgcgcggaggacggcggcgctcatgggagagagaggaaaggaaggaggagaggggattcctcaccttcgagcacggcggccggcgcgaaggaagaaagcggcggcggcgaccggtgatgcggaggcacggacgggcggcggcgacaccctaggagaagatggagaggcgttaggagaggagacgacgaccacggcggcttgaattgccggccggagatggaggggagggaaaaactcaccggctcgcgaggggagaggtgctccggtgggattccggcgacgcgaggcggcggccgggaaagctcttgcggcggcgaagctaacggcggcggcggtttggcgcggcggcgactctagcggcggcggctcgcggccgaaggcggcggcaagcggcggagctcgggtgtgacggcgtgggcgcggtagggggcgtgggagaggacggcaaatgggggaaacgagggaggggactcaggggagggtttttatgggcgagggaggggcggaaacggccggggatggcccctatttggccggcaacgtggagaggtggaggagagagagagggcgttggggatttcaaatcccccaccacttgcgggcgcgcgcgcgcgggagatgcggggagagggcggcgacgtgggcgcgaggtgcgggcgcggagtggaggcgcgacgtggacgcgggaggaacgaagaagacggcggcgcggcggtttcggcggcagcggttggagcttcggctccagcggccggaggtgggagacgactgacaggtggggcccacctgtcggcgtcccgagagaggagggaggggcggcttgggccggcccacaaggaggaggggccgcgggagagggatgggccgacggcccaacaaagaaaaaggagggaaaagaaaagaaaaagagaaaaaggattttcctgggattaaaatattgcgcttgctcatttttaattggttaaaattatttccaaggctctgaaaattccactataaatcctgttaatatattgtgacatgtggaacccaagaaaaatcccacaatgccaattccgattattatttgcatttattaattagggaattagctctaggttaattaagataatttcttcggacgatttatttagccaatttttaaagcaagcaaaggggggaaaacttcagggcgtgacaaccacaggcaatactagggaactaggacgaaaccttaatcttcacttcacttcaacttcaccttcagagctggcagaactatatatatatagagcaagggtgagtacttatgtactcagcaagccagggggacttagatggttaattcaagcttcaaggaaagtgtcggtgatatgggaccgggagtatcgtgaccagaggcttgaggcagacgcagtcgcccacgtggcctggcaccttcggggacgtcgggcccgagggtgaggtgtccgccctcctcctgatttcccccgagggggggtcgggttgcgcttgccccggccccgagggccgaggcaccccgaccccttaaggaagtctgcgccacatatatgggataagtgagcacagctgtgctcacctaacagcatttattgcagtctggtcaagcgtgtcacgctgcatgcaacgcagtacagcgcgttcctttatccggtctgtgaccagtcacagaccggtcagatcacgggttaggtggcggctggcggtctgacgcacgccttgccccatcccgtcaagacgaaagcctctaggcactcgtctcaagccggagctagggtgttatctcttagagatggcacgttagccctggtcagatttacaccaggcttcatcctaaccattacaggcaaggtgttacacgaagaagggcaaacatgcacgttgttaagctgacgcgtggtggacaagaatgaccggtctggcactggtcgcgtcatcgacagacagccacggtcccgcgtcatctctgtcttcgggggaggtgggggtaggtgtgggctgtcccatcagaagggctcccggatggaaaccgtaccgatctccgcccattaaagagaaaaagaacagtccagtttggaaagagaaaggtgcatgtggtatcccctttaaatataaaaggaggaccttgcccatagagaggggggttgattcttttggagattgagagcctagaacaggggagaagtcggctcacactttgtagctccttcatacacagatccaacaaaacacaggagtagggtattacgcttctcagcggcccgaacctgtatacatcgccggtgtctcgcgtttcttctggcgaggagacgatctttccacatacagagagagcttgagatctcaccctaagcccccggccgaaccggcaaaggggggcctgcgcggtctcccggtgaggagccacgagctccgtcatctggcgcgccaggtagggggctcagtgtgtgttttctgagctctcagactcttccgtgtgcgccaagtttttcttgttcagcctaatggccgagcaaggaaaagcgcacgatctctctccgagtgtgagcggcgacgacgtggagccgaatccacgccgtcgagctcgtactcccccacctcctccgcgccaaagccctaagcagggggaggcgcttgagagggtcgacaaatccgtggcatcaccagtcgcaggtgatgcaggagaacggcgagatggggagcgtcgcctcctcgtctacggcgacggcagcacgcctcagggtgcgcttcaggctgctggcgcgctcctacgacacccgcctgtcgtccatgacccggagtctccagcccaacgatggctggaagacgtggccaacttggtcatgacggcacagcagcgcctgggtgctggtggacggtccgccaccaccaagacctccggcgccgctaccaccggctccgtgtcgtcaaggcggagggcgcggcgagcggcggctgctgcgcgccattcggccgccactccctcgtcgacacctccaactcgggagggtcagcatggagagccggatgcccgcatcgacatcgagcgccggcgtaataaccggcgtactccccgcgcaacggagggcgcctcttcgtccagagtgtcacctcgacatggacgtgaggatcagccctccgtgcccccggccggtggtgttggctgtagagcctttgtggcgagtcttcggaatgtccgttggcccccaaggttccggcccaccatcaccgagaagtacgatgggagcgtcaaccccaccgagtttctccaggtctatacgaccgggatcgaggccgctgggggtgacgacagggtcatggcgaacttctttcccatggccctaaaaggacaggcgcggggttggctaatgaacctgccacctgcgtcggtccactcctgggaagatttgtgccaacagttcaccatgaacttccaaggcacatatccgcgcccaggcgaagaagcggacttgcatgcagtacagcgaggcgatgatgagtcgcttcgctcgtacattcagcgtttctgccaagtccgcaatactataccttgcatccctgcacacgcggtgatctacgcgttcagggggggtgtgcggcacaaccgcatgctcgaaaagattgcctccaaagagccccagactaccgcagagctttttcagctcgcggaccgagtggctcgtaaggaggaggcctggacctggaacccctccggttccggtgtggcagcttcggccgcccccggatccgccgctcagacagggcggcgtgacaggaggaggaagaaaaggtcggtccattccggcgacgagggtcacgtcctcgccgttgagggcgctccgcgggccacccgaaaggggaggcctgcgagcgacaaaaagaaagaggctggtactcccatccgggagcgcccagccagcaagtggtgctccgtccacaacacctccctccacgatctcgcggattgtcgcgcagtcaaaaacttggctgagcgaacgaagaagtgggaggaggacaggaggcaggaacgccgtgagggcaagtccgcggcagttccctccggtaaacggcgaagtgaggccaaacagaaggcccccgctgttgacatcgatgatggtgatgatgacctaggtttccaagaacctggggccaccattgccaccgtcgatggaggagcgtgtgctcacgtctctcgccggagcttcaaggctatgaagcgagagcttctggccatggcccctactcatgaggcgatgcgtcgggcgcggtggtcggaggttgctctcaccttcgaccagaccgaccacccaccgtgcattgcccggggagggcaggttgcgatggtagtttcccccaccatctgcaatgtgaagttgggtcgtgtcctcatagatggaggagcggctctcaacatcctttcccccgcggcctttgatgctatcaaggccccggggatggtgctccagccgtttcaaccgatcattggtgtgacgccggggcacacatggccgttaggtcacatcgacctaccggtcacctttggtggatcagccaacttccgcacggagcgggtgaacttcgatgtggcggacctcagtctgccctacaacgcggtcctagggaggcccgcgttggtgaagtttatggcggcggtccactacgcctacctccagatgaagatgccgggccccagtggccccatctctgtccgtggcgaccttaaagtcgcgctcgcctgcatggagcagcgcgcggaccacctcgctgctgcgaccaagcccgagggtggtgacgagaggcttggcgcctccgcccccaccgccccgaggcagcggattgccacatgcgacgaggtcccggtcaaggaggttgccttgggcgacggcccatccaagaccacacggatcggtggtcttctggatggcaaataggaagacgcgctcgtttccttcctgcgggcaaacgctgacgtcttcgcatggagaccagcggacatgcccggggtccccagggaggtgattgagcaccgtctcgccgtgcggccgggcgcaaggccggtccggcagaaagtgcggcggcaggccccggaacgtcaagccttcatccgcgaggaggtggcgagacttctggaggccggattcatccgtgaagtcatccatccggagtggctggcgaacccggtggtcgttcccaaggcgaacggcaagcttcggatgtgcatcgactacaccgaccttaacaaggcatgtcctaaggatccttaccccctgcctcgcatagatcagatcgtcgactccactgcggggtgcgaccttttgtgttttttagatgcatactctggttatcatcagattcgcatggctagggaggatgaggagaaaactgcgttcattacccccgtaggaacctattgttatacatcaatgcccttcgggttaaagaatgcaggtcctacttttcaacgagctactcgaatttctttgggtagtcaaataggacgtaatgttgaggcttatgtcgatgacttggttgtaaaaacgcgcaaccaagaaactttactttcagatctagcggaaacttttgagaacctccgctctgcccgcataaagctgaaccccgataagtgtgtgtttggtgtacctgcgggcaagcttctcgggttcttggtctctgcccgaggcattgaggccaaccccgagaagattcgagctatcgagcgggtgcgcccccccagcaaacttagggatgtgcaatgcgtcaccggttgcatggccgccctaagtcgtttcatatcaaggctgggagagaaggcgctacccttgtttaagctcctcaagcgctcggggccgtttacttggacggaggaagctgaacatgccctcactcagttaaaggcatatctcagctctcccccggttctagtcgccccggagccaaatgagcccttgctactttacttagcggcgaccccccaagtagttagtgcagcgttggttgtggagcgcgatgaagacaatcctcatttcgtgcacccccattctgtgctaacttggcccgggagcgagcggggaggaggggcccccgagtcggacggtggcctacggcccctgacgactggagtcggccctctgcccgcttgtcagacggtgctaggtgcccccgacccccaggagggccccgaggccactgcgggaaggccgcacttaacgccctttgaccccgaggctaaccctgtgctgactcgacccgggaaagagcagggagaagaggcccccgagccgaacggaggccagaggcccctgacgaccggagttggccctttgcccgcttgtccgacgataccaggagcccccgaccctcaggacggccccgaggccactgagggaaggccgcccctttcatcctccgaccccgaggtcatcggcacagaagacaagtgcgccccgaaaggccacttgaacgaagaacgccccggggatacggcccctagcagagaggatcggccccaccgaagggtgcagcggcctgtctactttgttagtgaggccctccgggacgctaagacccgataccctcaggcccagaagatgctttacgctattctgatggcctcgaggaaactgcgccattattttcaggcacatagggtcactgtggttacgtcttaccccctcggtcaaatcttgcataatcgagagggtacagggcgggtggtaaaatgggcaatcgagctttctgaattcgatctgcactttgaaccacgccacgctatcaagagccaggccctcgctgattttgtggcagaatggaccccggctccagagaccgtctcaatccccgaggccagcacgaactcctcgcagctgcctcacaccacccactgggtgatgcagttcgatggttctctgtccctccagggtgccggtgcgggggtcactttgacctccccgaccggagacgtccttagatatctggtccgccttgactttcgagcgaccaataatatggcagagtacgagggactccttgccggactcagggtggcagccggactggggatccgccgtctcctggtgttaggcgattcccagctggtcgttaaccaggtctgtaaggagtaccggtgctctgacccgcaaatggacgcctatgtacgccaagtgcggcgtatggagcgtcattttgacgggatagagcttcggcatgtgcccagacgggataacatgatagccgacgaactctcgcggctcgcgtcctcgcgagcccagaccccaccgggcgcctttgaagaaaggcttacccagccgtcggcgcgacccgaccccttaggggagacggatgcgcctgaccggcccccgaggcccgtcggagtccaggcctcgggacccgaagggagcgctccaagctcccttagattgattgcttggatctctgagatccaaacatacctcacagataagactctacctgaggaccgcgaagggagtgaacgcgtacaacgcatttccaaacgctacgtgttggtagaagggaccctctatcggcgcgcggctaacggaatcctcctgaagtgcattcctaaggaacaaggcgttgagcttcttgcggacatccatgagggcgagtgcggagcccattccgcctcgcgcaccctggttggcaaggcctttcgtcaaggattttattggccgacagctctcaatgatgcagtcgatctggtccggcgatgcagagcgtgtcagttccacgccaagcaaatccatcagccggcccaggccctgcagatcataccactgtcatggccatttgctgcctgggggcttgatatcctgggaccgttcaaacgggccccgggcgggtttgagtatctgtatgttgcgatcgacaagttcactaagtggcccgaggcttatccggttgtcaagatcgataagcactctgctcttaaattcattaagggcatcacggcccgttttggagtgcctaaccgaattattacggataatggcacccaattcactagtgaactcttcggcgactactgcgaagacatgggcatcaagctctgcttcgcctcacctgcccaccccagaagcaatggccaagtggagcgcgccaatgcagaaatcctcaaaggccttaaaaccaagaccttcaatattctcaagaagcacggcgattcatggatcgaggagttaccagcggtgctctgggcaaaccgaaccacaccaagccgagcgaccggggaaacgcctttcttcctcgtctacggcgcagaagcggttctcccatccgagctcaccctgaggtctcctcgggccaccatgtactgcgaggctgatcaagatcagcttcgtagagatgacctcgactacttggaagagcgaaggcggcgcgcggccctccgagccgcgcgctaccagcagagcctgcggcgctaccatcagcgccacgtccgggcccgatcactctgcgtcgacgacctcgtcctacgccgcgtccaaacgcgtgctggactgagcaagctctcaccaatgtgggagggtccgtatcgagtgatcggtgtcccccggccgggctccgtacggctggccacgggcgacggcactgagctgccaaacccgtggaacatcgaacaccttcgtcgcttctacccctgagggggggtcgggtgtcaggtttcgggctcgggctaaccccgcacccccctcgggtgtgcagggttagccgggggctatcacacatgcacagccttacttttcttatttcagcatttcaataaaagcagtttcaatttcctaaaggttgtgtctgtgccgtttttccttctgaagaatcttaacttgaaataaggtcactcgttctcaaccttgccctcgggggctcggttcggtcagctaaaatcgccaagcggggcccagaaccgagccgtgccccggggcgtggtgaactccgggggggaatcggcaaaaacccacaatcgggtcacccataaccctcggtcaccatgttcccggcctggccagtctcgacatgtggatctccccaggcactagccccgacccgagccatttgaggatcgggacttgagcacgagcccttaaatcaagctaagatgcaaaaggaccacggcacaaatcatcctcaactcatatgcatagcaaaataaagttaacataagaaatttttcatcatttttgattgcagattaagttgatctatacaaaaagaagaaagaaaaagaaaaaattggagattggcgggggcctgggggctcattctgacgcgcccgggtcgccggcctcgttgccaccgtcgcttgcactgctggcgttcccctcctcgtcggagttgggggcgaacgcgagccgaggggccgagccctcgaagccgttgacgatgtggtcggcagcatccccgacccgcgcgcgcgcgtcgtcctcggtcccgggagggaactcctccagcgccatccatggagagaagttggggtcccgggcctggtaactcgccagcacgagttcgaccgctccccgcgcgaggtccctcgaggatgacttgatggtcttctcaagctcctcggggagttgttcgagaacccaggccatcctgttgaggtgcggagcgaggccttccagattggtggggggcaccgtcgtctggcctttccagaggcccgcttgccgaccggcgcgcttcaggcgggagaccgcatcccaaagcatgtcgggcccaatctcgcccgccaagcgaagggcctcggcctccccggtggaggagtccagcgctcgctgcatatcggcgacggtgtgttcggcagctgcgaggcgggcggctaagtcgctttcgcccgcggccgccccaccgatatgcgccctcgcgtccagctccttttcccgcgcctcgaggtcagcagcccgctgctccagtgcggctctctcggcgcggacgcattcaagattgcggcgcgcctgctcctcctgcgccgcctcgcgaagggacaggctgtccgccagccgtttggtcgtggcctcagcctcctcgagagctcgctcccgctcagcgagtgcgtcctcgcggaggcggagcgcgcactcctcctcggcgcaggcggcctcgtgcgccgccagcgtcgcctcccggagagtagcggcggcctcgcggcccgtcaagcctttctccacggcgccggcgtgttcttccagcgccatagcacgggcctcaagggactcctcgcgccgccgggacgccgcctcagtctctgttacccgccgctctcgggcagcggcggagtcaaggactccctgggcggcgtcaagcttttctttcagctccgcctcccggctggcgttttgaaggcggagggcgtcttgcgcctcaatcatcgtggtggtagcgatgagggcggccgctcgctcctcctccacctcacgagcgatctccgtcagcgccgccttccgggcttcaagctccgagacgtgacggcggtgagctttacggcccacctccaccatggcgtccaccgagcgccgcccctcctcaacgcgtgcccatgcggcctcgagctccgctcgttccgcgcgcagggcctccacttgggcgctaaacccatccagcaccgcggtgtttgcggcggccaaggcctgcagaatgggctcggcgctcagcggggcgacggaagatgaggagaagagccgccttggagagaaggcgatgcggctcggccccccggaggacgtgctgggctcggggatgtcccccggacccgtttgatcctgggcgtcgcccggggaggtgggcccaggcgatgtgcccgcggcctcgtcgcgagcctccccggaggctgtcgcccgagggttgcccgaaggagtgggcccagttgacgcgccagcagcagctgttgcctcagcctggcgagcccgggcggcctcctccttagcggcttcctcagcccgggcggcctcctcccgagcagcttcctccgcttggcgaatccgggcggcctcccgggcggcctcttcagcttcccgaaggcggtctgcggcttcacgccggtcagattctcgcctccgctcctccgcggccgcaggatcttcggcctcggactggccggacttggggtggcgggaggaatgcgacgggacatcgctgaagcagaagaaaaaaccagaagacgaacaaaatgagtaagaaaaagcttccttttgggagaaagatggttgcaatgagagtgagacgaacctgcgagggggtcggttgaatgaccaccttggaggggaaatcaggtttccccggcatggttccgtctcccccgtcttgcggagccgtttcttcttgcgctccccctcgggctgcgacgtcggcgcggccccctccgggcgccgactgctggcacgcgccgccccgccccctcggggaggagatgggggaggtgttcctcccaacttcctcttcccctgggcgtcggcagggcggctgctccccgagcccccgacgcggggcccagaagcacgaccccctcctggggcagattgttccccccggcggcgctcgcccgcgccgtcgtggcccttaggggctctctcctctgaggccccgacccccatcataatggttagaatggaggcgcggtcgggatcgctgcagagggggaggatctcctgaggaatgcgagacgcctccacggagctaagattcagcaccctttggaccacgatcttgaagtcctcgggagcccaatcccatctggctccctggtgggtccgcatgtagtcttcaggcccagtgtactcccaggcgctccgggcgcgccgttggagcggcgcaatccggcgacggaggtaatcgccgtacaccatggccccggtgagcccctgggatcgcaggcccgccaggcggtcgaggacggcgtcgtagtcctcccccagatctaccggcgcccgccagctggagacctgcgccgggggctggcttggaagtcggaggcgcgcttcgttggcgaggggggtgtagaaccagtcgctcttccagtcgtcccacttcttgcggaggacgcaggggatgtagcggttcaacaccggcccccgcggctggaagtagcagccgccaaccaccgacggcggtgacaccgactgcacggtgaagaaccaccggaacagctgaagagaggggcgcaccccaatgaacatctcgcacaggtgcgcgaagatggccaatgtcatcaccgcattgggggtgaggtgcgccatctggagatcgtagaactccaggacatccatgaagaaagaagaaaatggcgggaccagcccagccattgcgaaggggaggaagaagatggaccgccccgggtagtctggtgccgggcgcccctcgcccagcatcactatctcccgaccggtggcggactccggcatgaagcggcgcggcagtccggcgtgcctctcgctcacgatgcgggaaggcggtagtacactgccgtcgagcagagcagagccccgtgccatggcggtggaggaagagatgattgagaacgagcgcgtgtggcgaaagtagggcgtagcagagaaagagttagagctcaggcggcgaaggcaagaggaacaatggcgaaaggaaggaagcaaatccttttctcgatgcttttatacccttgccatcgctgggcctggctcctcgtttctcgcgcccactacctcgctccctcgtatctcgctatctcgctccctcgtttcccgtgcccacgcttccactaatcccattcgcccgcttacggcgcatgaagtggatatgcggttgtggcaatcgaaatggattgtatcgtgcgcgcgttaattacgctcgccgaccgaagcggcgttaccgtatctccgggcgagaccaatctgctcacccagattcgcgcgctgctcaagtggtgtggcagtcttgaatagaccgcccattatggacaaccaaagttaccaataccaatgtgcatggattgagaccgttgggtattttgcccaactacggagaccggtcccacctgtcaccaggctttaggggtggcgtcacacctgaccgcttcccttgggaagggaaattgctctggcataacgccgggggctactgtcggtgatatgggaccgggagtatcgtgaccagaggcttgaggcagacgcagtcgcccacgtggcctggcaccttcggggacgtcgggcccgagggtgaggtgtccgccctcctcctgatttcccccgagggggggtcgggttgcgcttgccccggccccgagggccgaggcaccccgaccccttaaggaagtctgcgccacatatatgggataagtgagcacagctgtgctcacctaacagcatttattgcagtctggtcaagcgtgtcacgctgcatgcaacgcagtacagcgcgttcctttatccggtctgtgaccagtcacagaccggtcagatcacgggttaggtggcggctggcggtctgacgcacgccttgccccatcccgtcaagacgaaagcctctaggcactcgtctcaagccggagctagggtgttatctcttagagatggcacgttagccctggtcagatttacaccaggcttcatcctaaccattacaggcaaggtgttacacgaagaagggcaaacatgcacgttgttaagctgacgcgtggtggacaagaatgaccggtctggcactggtcgcgtcatcgacagacagccacggtcccgcgtcatctctgtcttcgggggaggtgggggtaggtgtgggctgtcccatcagaagggctcccggatggaaaccgtaccgatctccgcccattaaagagaaaaagaacagtccagtttggaaagagaaaggtgcatgtggtatccccttgaaatataaaaggaggaccttgcccatagagaggggggttgattcttttggagattgagagcctagaacaggggagaagtcggctcacactttgtagctccttcatacacagatccaccaaaacacaggagtagggtattacgcttctcagcggcccgaacctgtatacatcgccggtgtctcgcgtttcttctggcgaggagacgatctttccacatacagagagagcttgagatctcaccctaagcccccggccgaaccggcaaaggggggcctgcgcggtctcccggtgaggagccacgagctccgtcagaaaggctgttattttagcaatcaaatttgttttcaagttttcaacaatctaagtgtgtgctttccacaaacagagcgagacaagtctcagcttggttgggggcgagacgtaaccaaatttgatttgcaagatttacacaactcccagagttggcctcaaagttggtttcccaaaccaaaccaattttccaatctttcagagttttggttgtctccaaacaaccagtcattctcagggactccctgtcccgctgtctccctgacatccgcttgctttatccaaacatcaggtttcccaaacctcaacatcttttcacaaagctgggtaaaacaaaaactacgctaaggaatcacctcacatccgcccatgaccgtgggcatggctgttcgaacagtttgttaacctctgcagagggggtacactttacctacatgacgttactagccttggtcacctagcccgtgcggatcaaacacgtctggtgacttggggctttcacgacaaggcatttccaaagccaacacagggttgccatatgccaacgagaggggtcccggaccaacaacaggttaggtcccagaccatactgtgccatgaagcccaggggtcctccccgacaccaccccggcgaatccacttgtctcttggcatcaaggcttccctggcctagcttgttactcagccaggggtgtcccattccacccatgtggtcgcacttgttatatgctcggatgtaattccaaaggaatcggtccttaaatgtgaccgcacaagcattccgcccaggaatggccttgtgtcgcgagttttatttttaaaactcattttctttcacaaggcaccgacccaggcgtcgggttttccaatcctttcgtaaaccaagttttacccaagatgtttctcagattttaagttttaaaggcgaccgtcgatactcgcacagagtgtatgaataccgaggcgcaaccaggtggttacaagggagcatgatatagcaattaacaatggaaggatcaaatgcaacaagttaggtaggcccaccaatctgcctcgcaggcggggcaaacatattaagtgcaatcctatcaatgaataatattttacaatcaatataattaagttcaaatataggctcaagatgttcaaaggtggcttgccttgctcagggtcttcacgaatcttcgagaaatccgcttgacgaaaaatatccggtaaccgcaactaggcgcatacaatcaaaaatctaaacaaggaccaaatagaaaaggatcctatttagactaaaataatagtgccattagatagatcacaattttacggaattactggaagtggaacgaggtcaatcggagtcacggatcgggagatatgaatttttggaggctttaaatgaatgtctggacaaggaaatgatttatttgattctttggagcggggaaaacaatttgtggaaattttgtggacaagggaggatatgtacttatccgatgggaataagagaaattatttacgaaggttgtttgaattttctgggaggaaggaaaatatttgtggaacaacggaaaaaggatttattgaattttctggattaaagaaatgatttattgaatttgtggaaaagaatattctttttagtcactcattgacgtgtggggccaacatatggtgagagaggagtgaatagggagggagcaattatggacttttggccactgtgtttggggaagggagtaaagatagactttccttgttttttaggccgaggaggaaggttggccaatgggccaagcccacgagcagggagagagaggagggggcggctgactgggcaccatggactgggtcaaacgccacatgggcagccacggtggcaaggcgagaggggaggaggaggcgcctggatcggacggctcacagcggcgcaacgccgccggcgagcggcggcaagccggaggggccggcaggcaccggaagcgagaggggctcaaggcggttccatccatcggctcggatgagggagaggcggcgcgatggcggccatgcggcggcgggatgggcggcacggcgcggacgcggccggcgaggcggccagccgtggcggcgtcccggggagattctctagggctcaagggggcgcgacgatacgaggggttcggtatgaggagaccgatggcggcgcatggccgagcgcggcgcaggcgtggcgagcggccgc

SEQ ID NO: 9612 - DNA, 19668 bp, Oryza sativa
ctcggctggcgcggcgcttgcggtcaaggagcggcaggtggtgacagcggctgtggtcggggaaaaaggcgaaaaggggagggaaaagagcttggctcccttgccactttgggaggaaggaggaaggagggagagagaacgagggagaggagcacgagctctgtctcttggttttggaaggatgcggcatggaggcatcggggccgagcgatgatagcggcgatgacggctaaaggcgagcggggccgggcggctgcgcggcgcaggcgcggggacaggcggcgtctgggctgacgtggcggcaaccgggcggtcagccacgcgcgagcgcgcaggaacgagcgaaggcggtgcagatttgagcggcgttggcgggaatcgacgccggggagagagagagcgaacggagagggagagaaaaggcagagaggcgggagctctcttcctctctcagctctgctgagtgaccacgtgcagcgcacgtgagagagaagggcagaggggagagatgggccgagggaggggattcggcccacgaacctgagggatgaaaattagacttttgcttagaatttgagttggagagaatttggattgggaatggaatttggatatctttcgagttggtacaagtatttggcgagaattcaaagagaggaattgaatttcggaatttgatctcggtgacttgaatcaggattggaaatttgaggtggaggatttcgattttgatgagagggggcaacgggatttgaattgagatcctggcacgacttagactctcacacaaagaacgaaaattttcgcaattaggattttgccgaattagtttttaacgcctcacgaaaagcggagcgttacaatagctcatagccgaaatatttgaccgaataaattaatatacggtcttgatttccgttggtatgctactgtgtgtatgtagcaaaaatttacaaaaactgaaacttcctagtgatagccgatgcaaattgaatcggctttgattttttctttttcggtaacagcgtgcagcaagaacagaactgtttctgtctcgtgtgtattgttagcgatgctactccacgtgacaaacgtataaagaggtgtcacactctcgcagcggcggtggacggtttacggtgcaaaccgacaaagatggactaaaactagggtaaaataaaaaacatagtaaaagaacgattgaagtaagcggcgacgaggtggagaggcggcggctcctctcccgacgatgatgatgactgtcgcgaccaagatgactaccgcgaccacgacgacgactgccgcgaggacgactactgccgcgacaccgacgccgacgcctatgggggcggcggtggatgaaggaggagagccattgtcggctggagggggaggctggcagcggtgcgtttttttatttgctgaaatgtttttttgcaggcgggtgaatctatcgcctacgaagatatcgtccgagggcccgcatgcgaaaatcatctatttttgcaggtctttgcttgcaaaaagaatgcccgtccgcctggaaagatggatttggcccgccagcaaataccttttttttaaaggagtgagagcaaactatgatgacaaagctcagctagataaaaaaaatgtgagcctagagctaaattagtcaatttttatttgaagctcagttgtgtgttttcgcttttactttttaacaaatacgcaataggaagcaaggataaaaatgtattttcaaaacagggcaaatatttgtcatattttgcaaaatctcagtcaaaacaagttgcgaatacacgagtgctgttcaaaattgaggcaaaaatgcaattgtaaaaaagggtaaaaatgtctttttcatgctcaacttaacatggttatgttgtgaaacaaatctctaggagataagtctcttatgggccaatctgaaccagagtagagataagatatatctcttcctaagacccatatatatacaggggcagggtgagacatatgagattggcttgtactcagatgagatctataatgaagagagagctacaacctatatatgtgttcattgtctacttctgcaatgttcttgagggcaaagggatgggcctactgctatgggagggacagggaacggatctggtgatccgctaataggcatgttggtttacaacaggttaaactcaccatatattcaaactaggggcagaactctgcttcatttcaaaaaaaagcagggaaataccctaaaaagttagggcaaaattatcattatcggtaaatataggatagctccgaattctgaaggactacttacatatatagttttagagctaccccgagggctcaagccacatgcctggctttgccactgtatgataatgcaaagctcgttcttttgtgtgtaagggtgtatacaatgattcttgagtgtgttttggtctaggaaaaaaatacattgtaccaattggattatctcttgagtgtaaatacaatgtaatatatttgtaccaattgaagtttcttgtcttagataattgaaaaaaatgtttttgcttaaaagaaatcacaaccacttatattccataattcacttaatagagaacatataaaaactaggatataactagacaataactaataataccaatacaaaatagagaaacatgtattcaagtctgtttgtaaatctccatccgaggctgggaaatatctgcatgaccgttttctctagatttcgacccacagtatgtattagttccttgtcatcatcacaattttgtagttatgtccaaaattgaaaccaatacattgtcctaaatagtgtctggatataagatttcatttagaatttatcaaaaatcatatcatttctacgaggcaatgttttaccactatgtggccacagacttgcagaagactgcagcagtcttgcatgctattgttgttgtcaaccaaccaataaaaaaccttgaaggttttctttattcatgaagcataccatcatcaaaaccataacgccgtatgtcacaaaaaacacgcgcgcgcacacacactaatgcgacatacggagaacgttaacatacatccagcattattagagcattgctcacctgcagctccatgtttatttatattggaagctgctagttcggaaagcaggtaagcggatacaccggcgacttgttaggatagaagaggccaaagttcctctcggtgagatccccgttcttctggttctcgttgaacatggcgaatatgtcactggtagagaaatcgtttgtagtcccggttcgtaactcccctttagtcccggttgtccaaccgggactatgaatccgggactaaagatagcgatctttagtcccgagtaaaataaccggaactaaagatcgatctttagtcccggttggtaacacgaaccgggactaaagatcggtcagccacgtggccggctgatccatctttaactgggactaaagatctatgtaccatttttttttatttacatggccctgtttgctgcatggttgattatatatatatatatatatatatatatatatgcgtatgtatatatgtataaatacatatattacacacatatttataatttaaagcacttaacatttaacattttatgtacatatatattaccaaaatatatattaacactaaagtaaatgtacgtacatatatatacatatatatatatatacatatatatatatacatatatatatatatatatacatatatatatatatatatacatatatatatatatatatatatgcatatatagtacaattcatttgctcgctagctatagctacgacttcgacgccggtgttacgtcagaagaggaaggaccgacgttatgaattgtcgatccgtcgtagtagaattcaccatcgggattaaggacttcttcgttgatgaaccccatcagttgttcttgaacagccgtgataaattccttatgtgggagtttttccctcatgtgaatacgctatcattcgaaaaataatgacatatcaatatatgaaattaataaacaacttaacaaatcgatacgcaatgaaattttaaatggtttatgtatacgtacatcgagctctcgtgtggtgtatatttggtttgataggcagtgggcatactcgcatacgtagtagccgcataagttagttcccttatcctgctttgcacactacatgagaaacgatgagagatttaatatactctttatattaactgtaactagagattcaattcaatataattttggatcatgcatgtactcactggaaaatgaaacctcgatccaagtttttctttccaagtcccgcggaccaattgacggaaccgatcccaagccctacatgtgcagttgcaagctatgattaattaattattacccgagatcaacataatagcaacagagtcccgtgactttggaatagatggcattatattacctgtctatcagttggaagacctttgtcaaaaaccttctcctcgtacacagtgactctgcatgcgtccaagtcgaaaaagaacaggacccagtggaatctggaatatgcgtgagatgagataaatatcagaatgtacatgttatatgtatgggaatgaaatttgttcgaacgacaataaaaactcactctgtgttgtacgacaatagtatgaacgtcttgaaatgctgctgcgttaggagatggacgagattgtcctctgtgtctttctcgtacttgtcgagcatttcggtgttgattttccgagggtcgatgaacccagtatcgtaaaccccccgccgtcgggccctttgaatctccattctacaacaatgaaaggaaattattattgcttacatatatgccaggagctaattattgaacgaaacaaatcgaactcaaagatacttacaaaatccatgcgctcagaagagagacgtcgagggcgtcccgatggtacagatcgaagacatccttgaaatggatccatagaacatcttctccttgcaagaagtcggggtttctaatcctcgctccgaacatctctctaccattggcgctcatttccatgtaccgttcatggaatttatacatttgtgtcggtagggactgcagccgctcaggcctgacaagcggtttaccgagttcaaacttgtatgccacttccgccttcgggattggtgcgcctccaaccaacagagccacagttagaccggtgtccgaaatgaaatccgttatgccaaagtcttcgccggtcaccaacggctcgaccacttggtgtggttgttttccaagctgaggaactggattggacttcttgtaataggctttcctaagtgttcggtcatagtccgatagctttaaggcctccttgtttgcggtggatattcccttgaagaaattcttcacgctcgggttaataggtatcttcttttcaggactccgaggcttgagttgcctcttcacttctcctgccacataagcgtcaagctcctcttgactgcaaccgtacggcggctccttgtttttggtggtgtcaactttggccttcttcgttgcccttgtgctggcaggaggtggagcttggcgagaccttgtcttgggaggtgcaggcggacacggtggaggtggaggcggaggaggcggaggagccggaggagatggtgcaggaggaggtggtagaggagccggaggagatggtgcaggaggaggtggcagaggagccggaggagatggtgcaggaggagacggcggagccggaggagatggtgcacgagacgccgcttgttgcccagggaggatgatgtaccgcttgcgccatagtataatggcgtggcttgtgtctcgtagatgcgtctcaccgtctcctcctgggtagtccaactcgaggtcctcgtacacggcttccaccagctcaacttcgaccctcgagtatcctgctggaatcggccagtagtggtaagtccctgaaatgtccgttgggatggccattcccgacgccaccttcacgtgatgagaggttatctattagtaatcaacctaagcagcaacttgcggaacgtacaagtcaaaaatcatatattacatcgagcataccttgattgataagttcttgaagggaatatgcagcttacatggtgtccgttgcgtgatctcatcaacggggcaggtggtttcgtcctgggtttgcatggcgtccatgctatgtgattctacctgccccgttgaggcgcagctgctacgattgcctgatgggctgaccattggaggaggtatgtatggctggggatcgtgtgaccgatgtgctgccatgcgttcatccaccttccggaccacctcctcttgcatgctgagctcgtagctcgataccctgtactcaagatctgcaatcttcgcctcggtatctctcttgctcctcatccgactcttgtacgtgtggatgtcctccttgaatccaatcttccagggaatcacgcctttccctcgtgttcgtcctggatgctcgagagtctgtagggcgagtgacagctcgtccttctctctgtcgggttggaacgtgccatgagaagaggcttccactgcgtccgttagtcgactggcagcctcgcgtatctgatcgctgaagaccagggagccatcaactgggttaagcgttccaccgtgagcatagtaccagaacttcgatcgatctggccatttagcggtggctggttcgatacccctctcaatcattcttgcctccatctcctcccacttcggtattgcgacgctatagccacctgaccccaagtggtgatggtacttcttcttggcaacgttttacttgtttttgaccatcattgcttgcccttgttgccctgtcttgtaagcaacgaactcgtcccaatgatcccttagctttgggaatacgtcgaagttcggtgttagtcccttcaggatgtatttcttgtacagatctcccttgaaggtctagaactgttctgccattttcttaagagtccactatttcactatgttctccgtacccgcagggagcgtgaacgtcttgagcattgtggtccacaacatctctttctctgattccgggacaaagctgtcattatccccacgtgcccttgttttgctgacaggcacgttatccctcacaacccaaccgctgtggcgtacaaaaattcttggttgcttctgccggggcactaggtcggccgtctgcgtccacctcagttatgatgtgccgaccctctatcttcttcgcggcacctcgttgtctgcgtgccctcttctgtccagcggagggatgacttccactagcctcctcctcgttcccctccgcattcctctccacgttcccctcctcgttcccctctgcatccctctccacgttcccctcctcgttcaagtactggtttggatcctcgttcccctcttcttcgttccagtactggctgcttccctctgcgattgtatcgtacagtatctgttcctcatcgcgatcagccatctgttcatagaagaaatatttgctaagcgtaatattaaaactctactaattaatcttgtattaaaactcaaataatcatatatgctaagtctaagtgtcgtgtattagaaccctagataatcatatatgctaagtttaattaagtttcgaatattatatctctaataatcttatattaaatctctaacaatctctaacaatcaaatatgctaagtctaattaagttccgtatattaaacctctaataatcttatattaaatctctaacaatctctgacactcacatatgctaagtctaattaagttccgtatattaaacctctaataatcttatattaaatctctaataatcttatattaaaattgtaataatcatatatgctaagtctaacaatcttatattaaatcgctactaatcttatattaaaattgtaataatcatatatgctaagtctaacaatcttatattcaaactctaataatcttagattaaaattgtaataatcatatatgctaagtctaacaatcttatattcaaactctaataatcttatatcaaaattgtaataatcatatatgctaagtctaacaatcttatattaaatctctaataatataataatcttatattaaaactctaataatctaataatcttatattaaaactctaataatcttatattaaatctctaacaatcacttctttacatcacttgcctacgcgaattccttcgatggctagctaccacttcggcttgagggacgacaacgacgtcttctctgcaatattaccaggaaaatatattatctaaacagggccaagttacatatattgtatttcacgttttaacctatatatataatcatatatgtatgctaagtttaataatcgtttaattatcttgttcgtacacgtttcgctcgcgttcgttctcacacttttagtacaagtgcattcactttcataagcgtttcgttcacgttcgttcgcgttccttaatgtttcgttcgcgttcgttaacgtttctttaacgtttcattcgcgttcattcgcgttcggtcgcgttcgttcgcgttcggttacgttcgttaagcgttcgttcgcgttcgttcacgttcgttaagcgttcgttcgcggcggcggcgtctcgcggcggtgggggcgcggtccggcgccgtgggccggcccggcggcgtgggggcgcggcggcggcgtcgtctcgcggcggtgggggcgcggtccggcggcgtgggggcccgatggcgtcggcgtcatcggcggtggcggccgcgccgaagtcgttcgtcggcagtggcggttgaccgcggcgtggcgtagtggcgtcggcaacgagctatagctaggcacgcggcagcggtttggagagagagagagagagagagagagagagagggctatatcgagaaagagagagagagggcgggggctctcacccaagagacgcggcggcggcgtctgcggcggaggcggcgaggaccgccaggcgacggtgagagacgacggcggcgtcggcgcggggttgccctagacagtggtggcgaaggagaagccgatgctcgatctcgatggaaaaacgtcgaagtgttggtggagaagacaagggcgcaccgggaatatatatacccccggatctttactcccggttgaaccgggagtaaagatatctttagatttttaatcccggttgttgttacgaaccgggagtaaagatatctttactcccggttgttctcaccaaccgggagtaaagatattttcccgctatttccaaattctgttttaaacccggttagggttaagaaccgggtctaaagataatagcactgaatattgaatttcgttgcatatgtgtttctaaaatagtaaataatgcattaaaaattctaattaacatatgtaaatcccacatgcatgatttaaaacctttaaaaattctaataatcatatatcattagcatatgcatgatattaaattgttaaaaattctaattaacatatgtaaatcccacatgcatgatttaaaacttttaaaaattctaataatcatatatcattagcatatgcatgatattaaattgttaaaaattctaattaacatatgtaaatcccacatgcatgatttaaaattactaaaaattctaataatcatatataattagcatatgcatgatattaaattgttaaaaattctaattaacatatgtaaatcccacatgcatgatttaaaacttttaaaaattctaataatcatatataattagcacatgcatgatattaaattgttaaaaattgtaattaacatatgtaaatcccacatgcatgatttaaaacttttaaaaattctaataatcatatataattagcatatgcatgatattaaattgttaaaaattgtaattaacatatgtaaataccacatgcatgatttaaaacttttaaaaattctaataattatatatacctagcatatgcatgatttaaatttgttaatcatcatatataactagcatattcaatacatccaaaatagtttacaacaattacggcaatacatcggcggtgacggttgtccgcacgtactttctcctcactattgttccttccttgtgatcgctacgtgagtaaggggtgtcttcatttgataggaggatgctagggtcaatcgtcactgtgaaaggggattgcccatcaaactgatcgtaatcctctactccgacgatttttcttttgcctgggagaaccaagtggcgcttcggctcgtcaggccctttgcccttctttcctttgctagacatgtccttcacgtaaaaaacttgcgttacatcattggcaaggacaaaaggttcgtccgagtatccaaccttgttaaggtcaaccgttgtcatcccactgtcatcaatcgttacgcctccaccagtcaacctaacccattggcaccggaacagagggaccttgagaggtccatagtcaagttcccatatctcctcgatggcaccgtaatacatgccagttgtaccatcgtgtcccatggcatcgatatgaacagcactgttctggttcgtgctcttcatgtcttgggctcttgtgtagaatgtatacccattgatctcatatccctggaatgccgcgatcgagccagatggacccctcgccaggaaggccagttgctggttaattgtctcgttacccatgagatgttgtcgcagccatgcgaggaaagtatcaatgtgatgccgtgtaatctatgcatcggacttaccgatgtttctggcgcgaactagagtcaagtgctcctcgatgtaaggagccaccaatgaagattgttgtaaaaccgtaaaatgggctttacggaataaattgttgtctaccgtcattattgctttccttccgagagtcccctttccccttcatggcgtgattcaggtaccccgattgggcgaaggtcttcaataaattctacgcagaattcaatgacctcctttgttccataccccttggcgatgcttgcctctggacgagcacggttatgaacatacttcttcagaacgcccatgtacctctcgaaaggaaacatgttgtgtaggaacacaggcgcgagaataccgatctctttcactaggtgacaaagcagatgcgtcattatattgaaaaatgaaggtggaaatatcaactcaaagctgacaagacattgcaccacatcattctgaagggcctctaacctatccggatcgatgaccttctacgaaattgcgttcatgaaagaacatagctttgttatcgttgcccggacattgtctgggaggataccccttattataactggtagcagctgtgtcatcaacacgtgacagtcatgagactttaggtttgtgaacttcttctccttcgtgcttattattcgctttatattcgtggagtatctagatggtaccttgatgctctccaagcattgaaacatactttccttctctgccttgctaagagtgtagctggctggactcaagtaatggctgcctttctcctttggttccgagtgaaggtcgccgcgttgttccatatgtttcagatcattacgtgcttccagtgtatctttcgactttccatatacacctaggaagccaagaaggtttacgcaaaggttcttagtgaggtgcatcacgtcgattgcgtgacggacgtccaagaattcccaataggaactcccaaaatatggagttttttttccacatcgccgcgtgaccatcttcgcactctataggctggctgccaggcccctttccaaacactactttaagatctttcaccatagcaaacactgttttcccgctgtgatgtttaggcttcgtacggtggtccgccttatgttcaaagtgcttgcctttcttccgtactaggtggtttgcagcaagaaatcgacgatgacccatgtacacaaccttcctacagtgcttaagatacgtactttctgtttcatccatacagtgaatgcaagccttgtaccccttgtttgactgcccggataggttgctaagtgcaggccaatcgttgatggttatgaacagcagcgttcgtaggttaaactcctcctgtttatcctcatcccacacggggacacctttcttcttccacaacagtttaagatcttcgaccagtggtcttaggaacacatcgatgtcgttaccaggttgcttagggccttgaataataatcgacatcattatgtacttcctcttcatgcatagccaaggggggaggttgtagatacacatcgtaacgggccaagtgctatggccgctgctcatctctacaaaaggattcatgccatccgtacttaaaccaaaccgtatgtttcgtgcgtcctttccaaagtctttaaattttctgtcgatgtttcgccactgcgaaccatctgcggggtgtctcagcatcccgtcctgttgatgttcttcagcgtgccaacgcatcattctagcattccccttgttcctaaataaacgccttagccgtggtattatagggaaatactacatcaccttagtaggaattctcttcttcgttagctgcccgtcaacctcacctggatcatctcgtctaatcttgtatcgtagtgttttacaaacagggcatgcttctaggttctcgtactcctcatcgcgatataggatacaatcattcggacatgcgtgaatcttctgaacttccagtcctagagggcagactatcttcttagcctcgtacgttgtctcgggcaatttgtttctctccagaagaatgttcttgacaagtttcaataaatcgccaaatgccttgtcactaacaccattttttgccttctattgcaagaactccagagtggtatccaactttttgtgcccctgctcgcaacctgggtacaacgacgttctatggtcctctaatatattgtccaatttatgggcccccttttcactttcgcagtcctccttggcatcctgcaacatctgaccaagatcatccgcaacgtcgttataatcagcatctctgtcctcctcacccgtttgatttccttcaaatccagcgtactgagcaaagtctggaatattgtcatcttccacttcatcttcttccatttcaaccccttgctctccgtgggatgtccaacaattatagcttggaatgaaccccgactcaaacaagtggaaatgaatagtcctggatgcagaatactccttctgattcttacacttattgcatggacaacaaataaaacccttctgcttgttagcttcggccactctcaaaaaataatgcacgccgtcaataaactctttggaccgccggtcagcgtacatccattgccgatccatctacatgaaatgaaaaaaaaatcgtatacaaataatcattcgtacaataatgacagtcatataataatgataaaataatcacaaactctttcaacagtcatacaataatgacatatcattattcatacaaaaattataaaatattccaccaaataattcttatttattattttttaagttttaaattattttaattttcaatttagtttgttttcttttatttaagattaactttcactatattttcctactcaactattttataaaaccttatttagcaaataaacaaaatttctatatattctttcttttcccacacaaattttctctctcatcaacttacaacaaaattttggagacaaaaaagtgtgcaaaacatagctccaaatgtaatatgaccaaaaaaatattggaggatgaagttgctaatattttaggcacctccgatttgtatataatcaccaaagtaaattcactataaattttggcatgacctcccctcttttttaaagaaattttgaagcttgctcgggctggaggaggaagaagacatatataaaggggtgggactttagtcagatcccggtgatctttagtaccggttggtaacaccaaccgggactaaagttatgaccaaccgggactaaagatcccagggggcctgagatcaaatatgcccgttaccctttttaaccgggactaagatcggtttttattgcaaccgggattattgtggaattcggccgaccgataaaagatggtttctccaccagtgtgtacgtctccagtggcctcggcctcctgggcgtgccacgcctgacgtgatcgatcagtccctggttgtatgccctcgcgttgtccacgctcgccgcgaaccctcccgccgacggccacccgctctccgacaccaccacattcacgttccccgcgccagccttctccagcgcggcgtagatggcatgcatcatggcgtcgaacaggttggtgtaggtgagtccgttattttggtccctctctgtggggctcacccggaacgtggcgtagttgaggttgatgcacggtttatccttgtaggcgaagtaggggtagacgttggccagcagcggcgcgccggtgctcgccaggtactgagctatgccattcatgtaggtatacgcgaacacgccggcggagggagggtaatagttggcgatcacgtcggatttcaccgcggtggaaaccttgatgccgccgatgccggccgcggcaagggcggagttgacgttgcgcatggccgggaggatgctctccgtggtgccgcctaccacctcgttgccgacggcgatgtacttgatgttgacggccggatagtaggggctgatgttgtcacggacccacgcggccgcgttggaggagctggcggcgaggttggacaactggtcgccgacgtcgaggatgagggcgatgccggagttgcgcagggcgttgagagcctccttgtcggggtagtagatgcgcatccgtttgatgcccttggatatgtacatatgcaccacctcgctccgcgacgggaggttattacccaccatgccatagcacacaccgatcatttgcacggctgcacgtgcaccgcaacagttagctggagtactacaaacgtggaattttttttatttataattttttttattaaaagttttacaaaaataattttccattttgaaaattgacggaaatagtcgcctaccgccctctgggagggcgatttttaaaaatcgccctcccagagggcggcgaaaatgacgtggcagacggccgttcgctctcgggcgacggccgtcaacgaaatttgcaggcggcccccttgccgccctccgcgagggcgattttgtactgtgcggggggccgcctgcaaatgggcggcgagggggggcatggaaatttgcaggcggcccccttgccgccctccgcgagggcgattttgcactgtgcgggggcccgcctgcaaatgggcggcgagggggcatggaattttgcaggcggcccccttgccgccctgggggagggcgattttgtactgtgctctatattttttttatataaatatcaatagttatcaaatctttttatattgaaaactatacaagattaaaatctccaagattggtaaaatacaattttattattttttagggcatatttggaatgttaccgtacaaatattttgttaatgccaaaatataagcaagttttggcactaccaaatatttggtaaggtaaaattgcaattgatcatatttggtttgctgccaaaatgtaaaattgtagtgaagaatgttgtacataatctcaattctagattacgtattaccaattaataggcttccattttcgtgtgtggtgtggtagtgggaaagaagatatgaagaggttgccttcagattgtcaattatatagcgtcgttttcactgcaatatatgtgaactcaatgagatacattattcattagatgtgacaagacgatcacgcgtgggcgtgattcactttatgtcaacaggcagcgccgaaagttgatagtgataactcgagctgccgcttttcatgtgtgctgttgtggactgtgcgcgctactggatatggcactaccgtgaagcgccgaaagtgtgttgttgtgagcataagttgttcaagcaccatacgaatgaaaagaactacgtagacgagacaaacacaagtagtactgcagtagtaatagcaaaagtagtactgctttacaagtttgtaagccaaaagaaacggtcacataaggactgaagaggtagaacactactgacgaggcctcttacccctgtccctcctaccctgcgccctaatgtgcccctgggagtacgtgagtcggtccgggggtacggcacggccaacccgtcctgcctgtacaggtgtgacctctggctgctcctgagtgtgcgcctctggagctcctccaagctgagaggagcctagtacgtcctggtggtctgcaccgtgcaagtcgtcgtcgtagaactggctagtaggaccagtcctaccggcgtgagacgaagaggccccagtaccgaagatcccggctgcaaatcctgctggacaaggaccatcagtttcgtataggtatttaacagtattaataaaaagtaaagtaccgtgtgggcgagggatcgacgctccgtgagaggaagagctggcgaacgcgcctgaagaggtggcgaacgcccctgcggagctcgcggaagcgccggtcgtgcctgcgaacgcgctcgaaggcatacgaggtcctgcgatgaggaaacgtgcagttaaaacatggtgacacattcgtgcaaaagctgaaacaaaaatgaactaatatctgggctgaactgtaccgtgcgaaaccggtgctgtaggtcgcactgctccgaagctaggggcgctcgaagacaaacgaggtcctgctccgacggtaggaccgcgaggccgtgggtgtaccggaccagctggaggtacgacgtccacggcgctgcgacaggagaagacgcgcatgaccgcacgcatcttctcctgcatccggtcgaaggtcgacctctgctcaacgtcagtcaagtgcaaacctctgttcaacctcacctggactgcggtgatatcggcactgatatcccgtgccgcatcagcctatgcaagatggaaataaaaaattcagtagttgtcctatattatgcaagataaatgacataattgttggaagtaatacaaattggacgtaccgccacgaagtagtctcggtcacggtgcgtgggatacgcgtccgtgacagcggcaacgtgcggctctggggcgtctggagtgaaggtcacatgcgcacgagtgcgaggaaggtaccagcgaaggtagtcacggtagttctcctccgtgtgtgggaagagctcgttgatcacctcctctgtagctaacacccagtcgtcaacgtactgctgtacacgtggagcccaaagtgcgcctgctagctgtccccgtcgagtcaacctgtgaagagaggtaaattgtatggctcgatgatgtaattatcataaaaatttagaaatgaacaatccgaactcacgagtggtcggcaggggggacggtcggctgcacgttgccgggaaacacctgcctaagtccgaactgtctcatcacacgctgcggccagtgaggctcaacgaaaatgtcgaacaccatcggcaggatggtgagccagtaagcctggtcgcgtgtgcacaaggacgaaagtcctagcggtgctctcgcagcgacggcctcttctgtgtacggctcccagatgacgtcgctcggctggagacggtcaaactcgaacacgaagtccgggtaaccacgtctcacctggacgtgagcgtaacgacgctgcaataaacatgatcggaattagacatgttatgtgaaggaaaaaaaaagaagaggactgataaacttataacgtagcgaagttgcactaaccccacgtcgacaccagtaagtccccatcgtgggaccgtcctctggccactgcgcgctgcgaccaaccccgtagggtgcgctgtccaccactggtcgccctatggcaaacctctcggctgcccaaagctgaagcaacataggacagccagcgatgatcgctcccgcgtcagtcttcgtgcacgcctcacagagggcacggtacgtggctgctagcacggcagaaccccagctccactgcggcacgtcctgtggctgagcatccgcgatggaccgtgcgtagtggaccagccggaagtccacagcgtgcccgtgggtgctagtgaacatcacccacccgaacaaccacaacaggtacgcctcaagggagcgtcggaccgagtaatcatcagcgtcagggtgcagaaggtccgcctacagttaagaatgaaatgttagtacaaaacactgatccggtcgcaaataagcacgtatgataataacaacttatttacttacagtgaactggagcaaccaagccttgctaggcccgactgtagagtacggaggaagggtggtggtcggtcctaggtgtggaaggcgcatcacctgctcgaagcgcgcagtgatatcctccttccacccaaaaacaccgtcgacgggaccaactggtgctcccgccagcggtagcccgagcaggtacgacacgttctgcagtgtcggagccatctccccacagggaaggtggaacgtgtgcgtctcaggtctccagcggtctacaagagcggcaaggagtgaccggtctgcatcccaccgcttcgctgggtcacggtcgtccgccgccgcctcaacaagcctacaaagtggtagaaggcctgccgcacgcaacctgtatagagcaaacttcaaacataagtataaaacaaagcaaagttgagttgaaatgtgaacatacgcgtaccaaggaacgtgacgggggtcgacacgcaaccactcgcgcgacgtgcgtggacggaaggtgctgagctgtgcaccctcgactgctgacaggaacgagcggtggttcctgtcaatcccacggttcaacagcgccggtgtgtcgtacgccatacctgcatcaaataggttgatcagaaacatataaataattagttcaacataagtaataaatgttcataagcgaattactaacacatattaaacaagagtacaaacaaacaaaagtgtttagtccgaacactcatcacgataacattatgatacaacaccgaatagttcgcaatactactagtacaacaatagtcggaggtactcattacaacaagattgaattgaaattacacgatagaagtatttagtccgaacactcattacatcattttatttcctaaatcgaaagcattgttacaccatggaatcgcctgctgcgcgacgacgccttggccttgcgcgcctgcttgttgttccttcaccaggtggtcgcctaccatcacttgcctgtccagatggactagcatctgcgccgcttggaacttctgcattcttcgggcatgtcttgtaagtatggccgcgcagatcacacttgctgcagcgtaaagtcctcccacctgcttctgactcatccatatcatttctgatgcgtctagtttggcgtcgaccctttttcaccctaaacttagatggatctggaatataaaaaacttgggcactcagcgttgtgtaagatcctgagatcccgaacccatatatctcctcactccatgtatgaaagattgcttctttcctgaaataatttgagacgtacacattgggagatatgccaca

SEQ ID NO: 9613 - DNA, 12036 bp, Oryza sativa
cagcgataaagttgtgtagttgacgacaacaaacgcaaccgacatgatgaagatgacgatgtcggtgatccagccaatagcagtgtagcaaccaatgaaaatgacaaagacgctcatcagcatttgcatagtaggtcaaccgtgaaggtgaaataataagtcagcgaaaacataatcatccattagcaacagcagagatgtcagggtcgatgaagcagaggtgctggtgatgatgtcagtgacaataatccatcaaattaatgttatagctgttgtagatgcttcacttggaggagagttgatgttgttgtccaactcgtctaaaccgaaatatttgaagttgttgaagtagaatgtctgctccgaagcaaagatgaagataatgactcctggagttgactcgtgggttgatgaattgatttcttcagcttgacataaaatttgtcaaattttgagccttgtatttgtgtagcccccgactctttgattagttgggaaacaactgaacatagagtcgagaactgtagcctcttgtcgtcgaatagttattgcttgattgaagatatgtgttgaagatgttcaagtagaaatcctaaatattggagagcctcttgttgtagtaaaataacatggcatcgcatgccgagatgtcgaggctcacaaagacgtcgtggttggtgaagtagcaaaacttgcgaagtagcatcaatagagtttgccagtgccgaagataataaagatgaagtcgctctaccatgatgacaaagttgcattgccgtgatgaagtgaacacgagtcgtcggcaacagaagcaaactggtagtgaagacgcgcagttgtgaaaataaaagcactagtcggcgacaacataaccagtcggcgacggaagacgatgatgttcatcagtagtgatagttgtataaaccagatgtagaagcgagggcactagtcagcagcagacgagacgaccggcgatgaagatggtaaggccaatcaacactggcagaatcatgcagccatggaagtgaagaaaacagtcggcagccatggcaaatgtaggcagcttgtgttgaagatactgatgcctattagtagtgacagcgatgtagccagccgtgaagaagatagcatcagttggcgttataacaggccagccgtgcaagcggtgacaccagtcagcggcggatgcggcggccggtcggtgaagacgtagacgcctaacaacggcagcataataggccagccgtgcaggcggaaacaccagtcggcggcggtcgaggcggccggttggtgaagacgtagacgcccaacaacggcggcataataagtcagccgtgcaggcggaaacaccagtcggcggcggcgaaggcaagccggtcggtgaagacgtagacgcccaacaacggcggcataataggtcagccgtgcaggcggaagcaccagtcggcggcggcgaaggcaagccggtcggtgaagacgtagacgcccaacaacggcggcattaaaggccagccgtgcaggcggaaacaccagtcggcggcggcgaaggcaagccggtcggtgaagtcgtagacgcccaacaacggcggcataataagtcagccgtgcaggcggaagcaccagtcggcggcggcgaaggcaagccggtcggtgaagtcgtagacgcccaacaacggcggcataataagtcagccgtgcaggcggaagcaccagtcggcggcagacgaggcggccggttggtgatgttctgactgatccattcctggagcgtaagagataagcttaaaaccatgaatcccttttatgcatatctggatctggatcctgcagaacaaacatataggatgagtagtatctgatataaatataatactcgagaaaaaatcaagtattttaaaatatttataaatatgtatttctcctcttgtcaattttgatttccccgagcagatgactcattacgtttaaacactctgcccgactaatcatagccaccaagcactgggagtcggcctaagcacttcccaaacatgcatatgagtgtcatgagttcgtcattaatggaacaaagtttcacggatcggagtttactactcgggtacttttgcaattattaagagcagaaaataaatttatctcatctctatgcttttgatttattccgaatagtacttagcaccttgcgttactcggtccatccaacgagcccccgggtgctaggaatcggcccaaaggcaaccatccattggcaaaccaaacggaaagcataggaagatagaactccataactcgataggtacttttgtactcagattatgtcgcaagcaatcaagataaatattatgaaaaatatgatataacatctgtagcccccgactcactactcaatggaagaccaattggtgtagtgaggcagaggaaaaggaaaaaatatcatataaagaataaaataaatgatgacttagctttgtaatattccccttggtgatggcagaagtggccaatgtgggaacaaagtcgtccatcaataacaatgaagacaccagttggcggcgacgaaggcggtcgacggtgaaagcgaagatgcccactaatggcggcatgataggtcagccgtgtaagcggaaacaccagtcgacggcaacgaaggtgagccaacggtgaggatgtagacatccaacaacggcggcataataataggccagctgtgtaggcggaggcaccactcggcggcgacggaggcaggccggtggtgaagtcgtagacgcctaacagcggcggcataataggccagccgtgtaggcggaggcaccactcggcggcgacggaggcaggccggcggtgaagtcgtagacgcccaacagcggcggcataataggccagccgtgtaggcagagacaccagtcggcggcggcggaggcaagccggtcggtgaagacgtagacgcccaacaacggcggcttgatatgccagctgtatgttgatctgctgaatcaactcatgcatgcatgaaatttctccgagcaagctataggcggctgctcccatgtgcccgtggtggcgtggtggccgcaacgcatccgtcggcgctgctcccgactgaagatttgagccatcgagattaatctcgccgtttcttctgtagtcgattccatcacacttttcgatgggtaattcgacgcagcccctacctggcgcgccaactgtcgaaacatgaattcggcaataataaaagggggtagcgcacgagacctaaaagtggatggatgcgaagacaaaggatttagacaggttcaggccctctcaatgagaggtaataccctactcctgtttggggatttgaatccgccgagtgtgtattgatctgacgatcaggttgtctcatgccccctagagggcctcctgcccaccttatatagggtggggggcaggattacaagatagaaaccttaaccaatacggtatcggtttcctaaatctactttacaatattatcaaaccaggactttaggctgttccgtaatatataaggaaacgtaatacccgagtcatgatctattacatatcccatagatataagttatcccctatgactagtcggataaccatgccgtatgggtatggggtacccataatatccacaaggggactgcagcagcggcggcggggggtggaacggcgatggcagcaccgccgtgagctatagctgggtgagggcgagagggggatcgcgacaggtggaatggcgatgctgacaagatcgatctagggcaccgccgtgagcaagagccggcgcatctcgatcccctttgtctcactgatctaaagaatgacccaggggcacattggtcacaacactcgcgattcggtgtgttaatccggtgaaattggaaaaacggcgaagcagcgtgttgtgcgagcgtggcgatagcattttagcgaaacaacttggcggaatggcattacagcgaaacccatccttacatgtggctaaatgtcaattttctcggacaatgcaccatgaaaaaagaaaagaaaagccattggttcattcactcgctgtttgttgatgctttttctcttggccaacaaaaatcacctaacgatttgcggtgtaatcgacggtgttgtcaatatcgatagatcaaaatttcaagattaattcactttcgtggaatcaaacgactaatttatgagcaaattagcaaataagagaaatatcgtacttacatgacgagaaatatcggaattacgttacgacaaacgagtagtttccgagcaaactagcaaaggataacctcctcgctttcgtggagaaacacaaccatttttcagtgcaaaacaacaaagattaaccaaatcctcttagccataaaaacaaaatagaaaatatcatatctctactacttaaaaaataagagatgcttccatcgtccgtcaaaaaaactggcgaaaaaaaaaccgggcgagcgaggaaaaaaaccaaaacagggcgagcgaggaaaaaaaccgggccaaaaaaaccgtaactgtccggcgaaaaaaataattcgattctgtgaaaaaaatacaaagtgtttccttcgtccgtgtaaaaaaagtccgactgtaaaaaaaaaaaaggccagcgcgaaaaaaaataggaagggtgaaaaaaagggcggcgagaaaaaaaaagcggcaaaaaaagaccgattccgacgcggcaaaaaaaacgtaaaaaaggtaaaaaaaaaaaggccagcgcgaaaaaaaataggaagggtgaaaaaaagggcggcgagaaaaaaaaaagcggcaaaaaaagaccgattccgacgcggcaaaaaaaaacgtaaaaaaggcaaaaaaaaaaaagaagcgccccaaaaaatcatctgattcctattcctatcgtaccataaaatttaaaaaaagggcagaaaaatgcaaaaaaaaaaagaggcgcagcaaaaaaaaaaagaagtcctatttctattcaacacggaaaaaaattaaccgcctttgaaaaccgattcgataccccaccatgacaaaaaaaacaagtttccatctaaaaaaggttcagcataacataaaaaaaatctgactatagaaaaaaaaatcaacactccaaattggctgtaaatcaaccgaacaggagttggtttaaatcgtaccaagtcctattcagcacacatcaggagatcaaaaccatatatctctatctcttctctactacttaaaaagatatgcttccatcgtccgtcaaaaaaaccgggcgagcgaggaaaaaaaccgggcaaaaaaaaaccgtaactgtctggcgaaaaaaataattcgattccgtgaaaaaaagggcgacaaaaaaccggcgaaaaaaaccaaatgaaaaaaaccgtaactgtccaataaaaaagggcaaaaaaaagtccgattctgtgaaaaagggcgacaaaaaaaccgccccaaaaaaacggacgagcgagaaaaaaaaccgtaaatgtccgatcccaaaaaaagggcgaaaaaataatccgattccatgttaaaaaagcgaaaaaaaatctctatctctatctctgtctctactacttaaaaaataataaaagatgtttccttcgtctgtaaaaaaaaaagctaaaaaaaaaggtccgactcctatccgattccctctcagaaacaaaaaaaaagtccgactatagatccgattcttaatctataccgtgatatctcacatatcttggtgaaacaaaatgatgtgccggattagagatctgtttaataaaacagaacctacaggtcgagagcattccatttttatatgattttaatttttgggtttgtacttttgcttttgagtccctataatttttatatttatatttgagttcctataatcttgcaataaggtacttggggccgtttttgttaaaaataataataaaagagagaacaaaagcagaaaggtgcataaaaagaaaaaggaaagctgcaaaaaaaaaagaaaaacaacaacaacaaaagttctgtttcccctatgtggcaaaaaaaaaccgtagatccgaacgaaaaaaaatctgattcctataaaaggcaaaaaaaagtgaaaaaaaatactagattcgattccgttaaaaacaggaaaaaaagtcggattcctataaaggtgaaaaaaaacagaaaaaaaatctaaaaaagtttgtccgattccataagaaagtggcgaaaaaaatggttcgtaaaaaataaaacgcttgttcgtataaaataaaaaatgcacacaggaaaaaaatggaaagggcgaaatttctaatcaatatatatctcttctctatctctaatataatctaactattttttaaaaaaaaatgcacgagagaatagaaacggttcaaacaaacgcgtgagaaaaaagtcagaaaaagcgcaaaaaaacacgctaaaaaggttttccatcttccataaataaataaaaaaacgcgcgaggaaaattatttccatcatcggtaacttttttaaaaaataaaacatgcaaggaaaaaactgtcagaaaaaacgcgccattttaacaaatggttttaaaaaaccgcgcaagaaaaaaacaccgtctattaaaaaaatcgctctgagtcggataggatccatcgattttttgccacctactacacggcttttatttcgtctatattctcttgtttttaaaaaaagcaacaaaaataacatttgaaaaaaaacaagcaaaaaaacacgcgagaaaataattggcaaaaaaaggcaaaaaacacacgagaaaagaaaagcaaaaaatagagaaaaatatggttttcattgtaaataaaaaagcaaaaagatcatgttagaaaaatcttttagaaagaaatgcgtcatttctgaatggtttgagaaaatcgcgcaagaaaaaaacaccgttcgtaaaaaacaagccgctcattaaaatacaaacattgccattgacatgattatttatgaaaaacgtatattatcattagaattttttcacccgttgcaacgcacgggcatttttgctagtaaaaataaaaagaggaaaatagtagattgataatattgttcggcggggtcctttctgccgacgccttgactaactttaaagcgccgcaggccgcatcaacgatctccttttttctgctccgtgggcccatccttccttcctatccggactggtataccgcatgcaatcaatcaggttgataatcctctataatctcgtaccgttccatgattccatctgatcatccctgttgcttcatccaaaattccaaatcatgtgcacgctattagtgctgctctccattctgcaccatctgcctgtgatgtgctacaatagaaacctgctcagcggcatccgcatagtccacatacatatatacatatatatattcctagctatttgtttttaatgtataatttaaccgttataatttcatttagcccgcatagtgtctcagccaatttaaaacattggttgctgctatagcatttgcacgttgcactttgctttctcatactaaattagtaataacacaaataggaccaagcagaaataggaaaaatgaaggtaaatctggataagtacgatatcttatggtgaaaaccatattgatatcctgtatttctgtaaaataaataataatcgggaaaaactaaataacaaatatgaagtgaaagattcgatgagaatttgtaatactaagaaccgttttttcaaatatgcactttagtctataactttttggttaatgaaatcgcaacaattttgaggaaacataactttaaattttataatagaatatctaaggaaaaagtatgaattacccccctaaactatcgcggtcgaccgaattaccccctaaatctgaaaaccagacatcactcacctcgaactttcaataccggacgaattacccccactggcacaatccaaagcggttttatcctacgtgacgtacacgtggcaatccagtcagcatttcctttttttttaaaaaaatggtggggcccacctgtcatctcacctcctccttctcctcttcccctctctctctctctctctccccccttctctcggcgagcacggcagctcgcggctctacgccggcctcagctacgcctgctacgcgtcatcggccacctccccgtccaccaacggccacgttcgtcttctcccgcgcggcgccgccgccgacgacctgtacgccacgggctgcttcacctactgcgccgagctcacgccgacggcgcgccgtgcaccgggacgggttgttgccaggtccccatctcgccggacatcccctacctcggcgcggtgttccacaccggcaactggacgaacaccgcgggcggttcacactactacagatccgggcttcagtgacgggtcatctgtgacgggccaacgcaactcgtcaaagatgagtcatctctgacgggccgaaaaaatatcctcttcaatatatggctaccagggaggacccgtcacagatgtgaagtcatctgtgacggcttgcacttgtaacccgtcacagatcgtctgtgacgggtcacaaccatggctcgtcacacatgacatgtcatctgtgacgggtgtagtattatgaaccatcacaaaagagaccactcatctctgacgggtcttttaactaacacacgtcacagataacgttatctctgacgggtggtagttatgacccgtcagtgatgagtgaaaattcaaatttttaaattttgcaaaaaaacctcggattgaaacatgtcctatataaaagttgtagctcttaatgatatccacaactttataactaacaacatttctattagagatcatttacatccccgaacatgcattacaagtgatcagatctacttttaaaaacaaaattttgagttttttttcaaatgacatggatggatacatgccccgtatcaaagtcatagaactcaatcagatctacaacattataattgaaaatattttcatttcacaaaatttacatgttataaagtgagatatattttgaaaaatgaaattttgaattcttcaaacaacatcggatgaagatattttctatgtaaaagttataaaacacgatgagatctataactatttagttgataatattttcatttgaagtcatttagggtgttaaatatatgttaaatgattcagacaagcatagacaaaataataacattgggttagtagtcaatatgtgttaagtaggtgagttggtaagggagctctatatggaggttgaggtcttgagttcgaatctcacttgtagcatccaagttatattgcgtgaaaaattgtgaatttgtaggtagtgatgtgtaaccatgtataggatggctagtaaaattcaaaatatttttttgaggttttttgttgcgtttaaaattcaaaaattgtatttcttgctttgtcatcagtgacgggtcgtaagttacaacccgtcagagatgagtcatcagtgacggtcaggtgggtacgacacgtcactgatgactcatctgtgacgggtgacaagttttaacccgtcagagatgacttatataccggtcagagatgggttatctgtgacgggtgtttcatccgtcacaggtgattttgtcatcagtgaccactaatcactgaccaagaccaaacccgtcaaaggtgagggtttgggcccgtcagagatgacctggtccggcgtagtgtcaacccgtgcttctaagccatcggcatgctcgtgtactacaacgagaccttggatgccggccgtggcatccccgtggacgtcgacgtgtgcgctcaggtcgccggcggcgagctagaggtcgtacaccatacggaggaggtgccgaagctcgtagttgtcggcgcgggtgagcacgccgatgagaaggcggaagtcgggcttccgcgacgccgtgtacgcccccggtgtcgccgggccgcacgagctcatcatgagcgcctggacggtgggaaggaggatcctgccgccatctcgctccacgtcccgccgccctcgccctctctgccgccgctgccatcggagccgaccgagcgctaccccgacgtctagtacgccgcgtcctcggctcctcgcccgccgcccacagccgcctccgcccccgcccaccgccggcctcggctccttgcccgccgctcgcagccgccttctgttcactgagagagagaggggcaaaggaggaggagagagaggggcagagaaggagagaaacaacaagcgctgaaaggtgggccccaccattgcttttgctgactgtattgtcatgagtgtgccatgtaggctgaaaaccggttcgaatcgatttagggttgtaatttatccggttttgagagtttgggatgttaaatgtctagtattatggtttagggggtaaatcgtactaccgcaatagttcgaggggtaattcgtactttccaatatggaaatatctaactatttgccaaactattggtcatcattaattacaatcttaatttggttgttctcataattctttggaaacagaaaattaaattccattaatatattactctgtatgtttcaaaatattactggtcattctcacatttaaaattattaatttagatcgtggtcttctatcttcacattttatcaatgccatgtacaactgttaatcaaagttaatattgcttttgagaacgattataatgtagttaataagcatagcagtgtaatttgcacatctcctagtttgatgtgaaattttgctagaatgacaaataatataaaatgagatatatgcaaatttaatatatattttgcagatgagccatattacaggctaaattaggcggcacgtcaacagggcgtgcagatcttctagtatctactaatctaaagctagcacttcttgtgccaacgggacatttaactatttaccactatttggtttgacaattatcaaatacccttcttatatttgcacatgcattggtagtgcataaacttgttagatgggtacaatttagtacataatcttgtaaaatgctcgtttcggtacacgaacttgtctagttttgtgcaaacgagggccaaaatagcttggcaatattaatcttacgaagttgatattgattagggtgtgacatgcatatgtatagtgcgtttgcataagactgcaattatttataaatttgatctctactttatccttcatcaaggaagtgatgatatttcatatctttcccaccctagcttatatcattgctctttttttaatctttttctacaatcacaaaaacaataagattatccatgtagtgttcttttcgccttcctccgcacgcacctgacaagttcatgcactagaacaagcgttttataagttcgtacactagattgctaccacctaacaagttcatgtacggcgatgcaatttactcttttttttttcaatccccttctccaaatcgaaccaactctagaaaggggagaaggagctgtcgtttacatggaatgacagaagtggatatcgatctccgtggtgccatggtgtgctatccacacgtttgatccgttgcatgatagcccttctacacagaactcttggataactattacagactttcccattgataagaattgttcggtatagtgaagcagggtttctagatgctttactggtcgaaaaaatggattagatatcgcagctctttttctccttgctagaaaaataatttctggtagccaatatccaaccccttccattttaatacatcaatatacactaccggagaattgatatttgtccggatgataaaaatcgcattagtctcgattcgaataggaacagagacataagaatgtgtttagtcccggttcaaaagaccaatagaattttttgattctttagttccagttggtaacatcaaccagaactagagatcattttttatgtcctggttcaaaaattgttaggcctcccactatctttagtcccggttgtctaaaccaaccggaacgaaaaattaaaaac

SEQ ID NO: 9614 - DNA, 30910 bp, Oryza sativa
  unsure (1)..(30910): unsure at all n locations
taggcgactatttccgtcaattttcaaaatggaaaattatttttgtaaaacttttaataagaaaaattataaataaaaaaaattctacaaacgtgtacatacgtgcggatacgatcatgcgaaagacaataataacgacattggggaaccaaagcctcgggctacctgggccgtgaaagcccacgatgtgagccgtctttttaccatgtaaaacttacggacgtcactacacagctacacagcgtgatagtctaaaccagctacctaatccttttcataactagtacccttttcaatcgagtgtgctttctgaaaatagatatgtctaattagaatttatctttttctcacgtagggagtatacaagcattcaacaataagagtcctaatagctaaacttcaaataaacttctctttcaaattacatatctgatttacaatccaattatactattgtattcgttgtaactaaatctttgcatcattatattctaatgaaaataaacatatatgttgtaaattacttttataatagatgtaagttatttttatcacatatatatatatatatatatatatatatatatataaattactgttatatttgattaaattactttttataaatttagtgaacagtttaatttattggttaattctataatatgtcaattaaatttaatttttagatagacatatgtagttaccccccaccaagatttacttttaatatcgtgacaagttactttatttttttagttacttctataatatatttaaattacgtttagcctttattgaatttacttttatatgttcaagaagtaatttaataaaatctaaaagtaatttgtaatttttcataaaaatatataatcatatgagatcttattataaagatttagttgttacggacataacggtgtaattgaatcgtagatcggatgagtaatttaagagaaaattttatttaaaacataggtgataggaatatattttctatacttgtttgatggactagtactatagttaagtagatttttctagtcatgtgatgcttcgtcactagttacaattaaaacgagatgctctagatttagattttacgaaaacttaagcacggtttaatatgcgatgggttgggacgggccttcgaccatactgggtccgccacttaatacgaggtggagcttgcacaaccgaataggtgggtgtggtgctatgtgcgtttttagattttcgttcgaatgaaagctcataggaacgcaaaaaagaatgtaggattctttttatttttgccaccttacacatgtattctctattcaaccatgaaaaaattgcacttaagagtaaatttgacctaacaacgtgtattgtagtctaagttgcacatgacatataactccatgtattatagccatatagtttcataaacccacaatcatcttaattttgatctatcaaattttttagttctacaatcaatttcttagctatttatcaatcatataaatgttacatctatgtaagtaatgttttttaaaatttgaaaatagatgttaaattggttaacggtgtggttttgtgaaactttagaatcataatacccgaggttacgtgtcatgtgctaaaattcctataattttgtaaaacttagactatagtaggtggggttttatgaaatttactcttgcaacttatcattttcaccactctttcgttagtgcatatctttcgtttgccatcactaataaatgtagttattaaaaacaaatttgtaatcaatgtcagttgaccgttaagtttgtccctaattaaacaaccactgttcccttgtaaaagttcaaaataaagtagcacttgaaattttaacatgtaccctaatattgtcaagaaaagtaaattatagcaacttaaaagatacttcctctggtttatattataagtcgctttgatttttcctcatcaaacttaatcaagtttgatcaactttatagaaaaatttagtaacatctaaaataccaaattagtttcattaaatctaacattgaatatattattttgataatatatatgttttgcgttgaaaatgctactgtgtttctttaataaacttagtcaaattaaaaaaagtttgactagaaaaaaatcaaaatgaattataatatgaaaaggggagtagtaatattgtggagagtatggttactaagtgtacacacggtctacacatccgattacagataggtggtgagctatatgatataataggccagtgatagagtaggaccggtcgtcatgttgccttctatcctaaggttgtgttcggcactctgtttttccaactctcccctctcgttttcggcgtgtacgtttttcaaactgctaaacagtgtgttttttgcaaaaagtttctatatgaaagttgcttaaaaaatcaaattaatcctttttgaaaaaaatagctaatgcttaattaatcacgcgctaatggaccgctccgttttccgtgcatactgttccggttgggaaccagagatgccgaacatagcctaaaggtagtgtatagagctccaattggagacccgtgtaatagattagaaaaccgaagtcatgtcttcgagagggcttaaatctatctaaaccattgtcttcagtatctatgcaattttaggtctcacgcgctaccatatttattatcaccgatatagaatatggagaaatatatttttagggaaaaaaagtaaaattgggtttcatgctagagataatccattatatgccactaagtttgtcatatgtctacgatttttcactgactttgtcacgttataaaatatgccatcgacttttgtttaacttctacgatataccatcatcgtccggttaacctccgttagtaatgtacaattttgtccaaataaccaaaatacccttgggacaaaaacttctaaattttagattaaaaaatctaaaatatcatattacttagtggcatataatgatagtggcaaaagataaatgaatactaatgaaatagtggcaaaatagataagtgtaaaatttcgatgatgggaagtacaatatggtttcgacaagtggcaaaaaggaaatttcccccaaaatgtattattttcaattctttagtttactctaaatagcgactagctacctccatctcaaaatcttgcccatataactacctgtagtacgtgcgagtgtgtgcgactgcatgcaagaaaaaatgacattcatctattgtaacacggttataggacatgagaatttattgtatatatcataacaattcttgagaggaattagttaccacaagtagatcagatcctcaagagaaaaggagagggaaatgaatctaaatataccttccatttggtcaaatatacagctaggcgaattcggtttcactgcttgatcgatcgagtatctcgggtatgcttcgatgctagcttgtgattttccctaggaaagaatgtgtggccttatatagcgtaagacgatggtgtgatatttcacgagaaaagtccatatctacgcttgtaaccactcttaatctgttggttatgtaaatttgactggtaatagccaactactaacattcaaattaagttggctatgtaacatagtcaacttaattaatttaaatgttaatagtcaacttaagttggctgttaacagtcaaattaagtccgtatctacgcttgtaaccactcttgatctgttgggctaacaagagaagtttactgttggctattaacagtcaaattaagttggctaattaaattcattatcgacgcttgtaatcactcttgattatattactacactatctagggaaatgtcatttacgaacaaatgccaagatggctagttgtgtttcgctgagtagcttgattaccaaaattttttttcccaaaaacatcacatcaaatttttggatacatgcatgaagtattaaatatagataaaatgaaaattaattacacagttagggaggaaatcgcgagacgaatcttttggacctaattagtccatgattagctataagtgctacagtaacctatatgtgctaatgacggattaattaggctcaacaaattcgtcttgcggttcccaggcgagttatgaaattagtttttcattcgtgtctgaaaacttcttccgacatccggtcaaacatccgatatgacacctaaaattttttatttgacgaaaaagggcctatatatccatgcgcgcactggcccatcttatcaaagaaaccggtggtcagacagaagctagagacaaagttagttttcattatttgatcacgagacaaacttgcattgtagttgtagacatctttctattggaactcatagactcagattatttcactaaattaatctccgccatcctgtttcgctgaacttccaggtatttaagctactcgtgttttttgctgactggaacacgtacttaggagctcatacaaatatgaaaaaccacaaactcgctaatgggcctgttcggctgccgttttattgcagttgcgcgggctgcagctgcaagccggctacagaggcctatgttttcacctcgatggaccagtgggcatcctcggtcctatacgccatatggaataagttcacctgacatccctcaactttaagtccagtttgcctagggcccccaatccgcaataccagaaatctctatccttcaactatcacaaaccgtacaaaaaaagatctcaagacagtattgacccatttttccccggttccgctgacgtggcatacggtgggacccacatgtcagtgtcctatctttttctcttttctttttcttttttcttcttcttttctctttcttctcctctcttctcctcttctcttcttccccgagccttagaggctggtgggtaggcgagcaggcaagcggcggtggcggtgggtggagcaggcaggaggcggcaggcggagttccagcggccagaggcgagcgcagagggcgtagcaggcagggggcggcgggcgcagcacggcgtgtgagcgacggctccgcggttccgagcggcggcacctctgagagagggtgtggtgtgggtgtcactgtgctacggcgggcggagtggggtggcggcggcggtggggtgcaaaggacgacggcagatggagccggccacggacggtgaggacaacgacgacgtggcggacatagtaggctgggagaggacgacgacgacgcgcttggggtttcaccgggagacctcgccttcaccatcttcgtgccctcaccggagttgttccaccgcgtccttaggctgcggcgtcccaaagacagtgttgtcgataggaaggccgatgacgccacctacgccgtcatctcccacgtgctcggcttctccatcgttcccttaccgcctgcgcgctacggatgtagcagcagcgccgccgataacgggcggtggcgcttgtcctggtctcttggagtccgtgtctgggctgaggatctccgcctggagaaggccgacggcctctcacccctctcctgtcggcgtggcctgcctcctttcccccttatcctgccggcacagccggcggcctctcccctctctcccgctggtgcggcctctcccgccagcgccctcccctcccgccggctgtcccatgtttgggaagaaaagaaagatgatggtgctgataggtgggtcccacatttttcttctatttcacttacatgtgggacccacatattatcttatttctattttgccgactaggatgccacgtcagcaaaaccaggcatctatattaccatgggacctaatttgaacagttttgtatagtttagaggtgaatatttctggtattgagaataaaggatgtcaaacaaactcggtgtaaagttgagggatggcagctgaacttattcttacgccatattgactgactcaacatgcaaggatttcttcttttactccctctagttaggagcccgtgcgttgcaacgcaaaaaaaaaaagtttttcggctcgtacaacgaaaatcgattaatataacagcacagtaagacagcacgtccatggatgtaaatatatcaagcatcttgcttttgtttaaaaataattgtactgatttgaaagcgataccaacattacaaataattattgatcgttcagcgaaaccgtatactacgtctaactatggagaagatgactcaagtatcaggcagacttgaaaaggctttatacacactaaaaggccccatagaggcttgagtagaattgcacatgagcaattgagcatggagagcgtccaaagatatagcgcacaaaaagatcgcaacaaaaaggagaaacaaacgttgagttaaaatgtaaggaccatttaagaaacaaaaggcattacacaaatactgctaaacctacgtttgggtgtactgatatgagcactcgtcatttagagtaaattcacacttgaaagccaaactctttaaaatatagatgcaggattaactcgtcatgttaattcacacttggaaaacatgtgagtattaaaaccggtgagtttttttcggtaacatgcaaataaatcacgagttgacaaaaatcactcaattgtccttgctgtagattctcacgatttgtccacaaactcagtgacctccaggcatttgagacaaacttactctaaaaatggcttaaaccataaaattttgcaaacacctaaaccacaataaatttattccatgtctgcaacaacagcattcagtgcatcaccagtccaaaggtatcagtggagttgtcgccaaacagacttgaatagctagcaaatggtgatgttgcatacaaaagggtgtttttttttttgagttgtgattcaaattcatttgcacataataaccatcgccggaggcttgggctggagcgaagcggagaatcgttattcttttagggtttcaccttcgtatactttcatgagttcagttgagaatccatttggtcgatggaaccattttaatcacaagatggcaaattctgctttctctttcccttgaaagaaagtccatgtccctgcaaagtgcagaatcagaacaccaatgattgataagtgtgttcatgctgaaattgaaaggaaaagtttagagtttagttgactacatgaataaatcttctatattttagaaggagaaacatatgggtagcaaacttaatcaattgcaatgacatcagattcgtcaaccagaagggcccaatctctagctattgtgacattctcctttcccttcttgtggccactaccggaagtggattttgatccctcgaggggatatccactcgttgtttgcatgttatttaaatggctatgaagaaaattaaaaaaaattaagaaaatgtattaacatgtgatataccactccataaacatgcaagtaaaaattcaactcctacatcttacaacaaaaaaaataaatttgactctgaatatacgttaactagctgcggtttaatttgtttttttgttacgagatgtaggctgtgtttagttcagcgcaaagtttggattttggttgaaattggagatgatgtgattgaaaagttgtgtgtgtatgacaggttgatgtgatagaaaaggactgaagtttggatccaaactttggatctaaacacagccgaagaagttgaatttgaacctgcatgattgtgtagtgttatatcatgtagcgcccgttccgtcgtggcgcctagcgggaaaattatctcctaaaaaccctaattgcgaaatctgtttctttgcttgttgtctagtgtccgtgccatctcaagatctcaatccccgatctatcgtcgagttcaattccgaatccaaatccttccaaatcaaattcctccgcaaaagtccattttgcctcccccggggtcgatgggccaattttctctcggcccatcttcccctctcccccggccctttcccctctctccccggcgccctctctctctctcgctctctcccccggcgcgctcccgctccctctctccctctctctctccgctctgcccgcgcgcgtgcgcgtgagtcgccggcgccgagccgagtcttccctctccgctccctcgctgccgctccccgcgctcgttcgcgcgcgcacccgcttggttgccgcccgtgtcgcgtcgcgtctgcgccgcccggtcccgctgccctgccgcctgcagccgcgcagccgcttggccccgcgagccagcgcgcgtgcccgagccgcgccactccatccgccgcgcctcccgttgcgagccgcgcgcgcgtgccgtggtggccgaccgcccggtcgccgccgccgtcagcctctgcacgcgcctgtcgccagtgtcgccgctccgctccaaaccgccccgccgtcatcgccgtcgtcatcgcccggccccgccactccgcgcgcaagccgccaagggatggaggcagcatccctcctccctctgccgcgtcgcccccgctcacctcctcctttttcccgaatcggcaaatgggcaagccccctttctccccctccttttccccttttttctcctcgccggcgtcatcctccctgtcgccgctttggccgtgaccgccgaacgccagctcgcgcccttgaccgcgcaagtcggttcccaaaccgacattgccgcccatttaaaccccagcctcccctttcccttcctcttccattcgcctccgtgccattaccgccgcccccgtgctctgtctcgcctccgccgtccttcgccgagcgccaggaggaccggtgcgttcgaggacgcggaaggggacttcggccgcgccctcttcttcctcttccccagcccgaggccggagagattactcccgcgccgtcggcctctcgtcacagcgccccgtcccgcacggtagtgtctccctccgttcttcctcctcgctccatctccccccccttagttttcggtggtagcacgagtagactccccgtagctagccggcgccgccccagccgttgccgtcgctcgccgtgtgctcgccgccgtcgccgctcgagctccgtagcacccgcacgtcgccagcctcgctcggcgtagctccgtccaatccgacgctagcatcgagttcccgaaaccgcgtagatactctcaccgccgggaatcgacccctcgtggtctcgtcgccgtttccctcttccctccccgccggttgtcgccgccgcgattcgccgccgtcaagctctctccggcgaatccgagccgttggctcgtctcccctcatcacgaacaaccgcccggtgtgctcgcttttgcccgtatcgccgtggttcgctccgccgctcgccgccgccgcccgccgtccattcgcggccgggtcgtcgtctacctcccgccagcccacgtggcagccacgtaggcgccacgtcggcgccagctcagccgaggtcgggacgggccgacctcggtcagtccctccccgtgcgcgcgttccaccgcgagccgtggggctgcgcgtgggcccgccgcacctgcgtcctccgcgaaccgcgtgcgtgcaccacgtccatcctccaccctagcgccgcgccgcgtgctccctccgcacggtgagccgagccgctgacaagtgggtcccacccgggaccgcgcgtggtgagcccggtccaccggactctctctccttcctccgcgcgcgcgcgtcttgggccgctctgggccgccttcttgggccggccgacccgttaagctcggccgagccgctctttctctcgggccgcgccctagccgcccgagaaaagtctataatccctccctcttttcttttctttatcttttccaaaaaggatttaattaaatccttttcctttagaccaaaaatccaataatcttagaaattcaatatcttccccgccgtaaatccgtttgactccgttcaacttccaaaattccccaaatctcgagatctacctaatggcatgcttagaggtcattaataaggctttattttcgccgtttgttgagttgtcccatttcgcgtgtagtttcggagcccgaagacccgcagtgcgaggatttcgaggatcaagctccagatctcgagcaaggcaagccacctttgaacatcttgagcctatatttgaaatttaattatattgcttgcaaaatattatgcattgataggatcgcacttaatctgttgtcccgtctgcaaggcagattggcggacctgcctaatttgttgcatttgatccttcctttgttaattgttataccatgtccccttgtaaccacccagttgcgcctcgatattcgtgcactctgtgcgagtatcgacagtcgccttcaaacttaaaatctgaaaaacaacttgggtaaaacttgggttttacaaaagacttggaaaacccgacacctgggtcggtgcttgtgaactaaatgaatttctaaaaccgcggaccggggaacgtaccgggtgtacggttttcccgctcccgcacttaaggaccgattccttggaatttcatccgaacaaaagacaagtacgaccacatgggtggaatgggacacccctggctgagtaactagcttatcaggggagccatgatgccgagagacatgtggattcgccggggtggtgtcggagaggacccccctgggcttcctggcacagtatggtctgggacctaacctgttgttggtctgggacccctctcgtcggcataaggtaagcctgtgtcggctttggaaatgccttgtcatgaaagcttggaggtctcccgacgtggctgatccccacgggctgggtgatccgggttagtaatgtcgtgtgggtaaagtgtaccccctctgcagaggttaacaaactgttcgaacagtcgtgcccacggtcatgggcggatgtgaggtgattcctagcgtagttttgtttgacaactgcttgtgaaattactgttgtgaaaaggggttcgatgtttgaaaaatcagcagctgacgggatcagctaggcccgggtggccgtttgaaaagttgttggcccgggtggccgtttgaaaagctgttggccgggtgccaaccttgttttaagatctaaagattgatacattgcacatactccgaccggacgggacgcactgtctcaaccgtgtcgtttgagaagcactcacctagatgtttttagaaaagagttcaaataaaatcaattacgaaaacaacagcctttccttgaaacctgcattaaacacttatttcccctggcttgctgagtactcccgtactcacccttgctctatataaatattccccccagttgctgatgaagatgaagcggatcctgctgatgaggagttcttccaggagcaagccggttacgatgagttttagggtttcggcctagttcccaagtcgcgcctgtgttgtttggtccaagtctcggcttccgtttcccttttgtaatgcagttgtgagctcgggatctgtccgcagcccaacatgactgtactcctactctataataaagagacctctgttgctgtgatattctatcttcctgtgataccagcactgtttcctgggactggtatcgattaacaggttaatttggagcgtcacgggctaattccagtcgggactagctcggggcgtgacatatcacatgttaatacaccttctcaatttttttcataaccatttgagtgacatgcaaataacgagaggatatcccctcgaggaattaaaatagtttcccgccactgccaccatccatgacccatctcatcagctctttttccttgcctctccaaagtcaagaccatgaccggtgatggtgcttcccatcctctgctgcaagggaaacatagtcaatatagtcaacagtcgaatggaagaatggtcctacattaaggtgaaatcatgctttttatacaaagccactatataatcaaagagctaatatttgaatcaagcaacccttgttaccaatcaaagtaggaaatattgaggatagtattaacgttgaagtgaaataaaaaggtaaaaaggagttcagggcctgtttagatctatttggaatggcaaatagcaaaagttttggtggcaaaagttttgatattgtaaaagtactagttggtgtttagatgcatcctaaacttttgctattctagcactaaagtgagagagagaaagagagagtgagtggtcccaaagcactttttggcacaatttactactatggactagcaaatgctaaatgccaaattgtcaagttttgctactagtgtttagatccaaaatggcaaaaagtgcttcagatctgatttacaattcgttggtgtgcattcaatgtagtaatattgtcaccaaaggcgctcaattagcattctcgtaattggccacataaaactttttttatctgtgataaagaaattatataaaacaaacatgtggtagcaacttgcaattaaaaatgcagaaaaaaatatgtctcgcctatcatcgaatataaaaatcatcaggaggggcatgctgcactgtagtctgattgtgattccatttttcgcataacaggagacaggttgcgtcatggagtgtttaaaatgaaccatcggtaccaggtgaccaaagaacgaactgatttatgtcgctgcctcgaaaaaattatcctcctggctcttcctgttgacgatgttgaaaagagagagtttgcacaaaagaaagttttgacaatgtaaatggcagttaggaaaatgcaccagcctccaataatagctgcagcccgtagggcatagatgtaataacacaaatatgtatataatgagagttactaactaaggtccaagaaacttcctgataaataaattagaatcaaattaatccttaacgttatatgcatgctatcttcaactgcagaaaaagtccaaattaactttctacttcacaaataattgttttttttcctgacagtaaataaacagaccatactttctttcacgtttgaaaaaactaaagatattggcacatgcacaattatcaatgttacaagaaaataaataaggaatcacacaacagggaattatcaaagttctgaattttttgtacctaaaaagcttagatctccgaggcatatcccagagttgcacctaccaaccaaccaatcaatccatattgcatttgaaatccataactgtcaagagcaaaccttttttcagttacgtgaccaaaccaagaagagaatatcaaacggtattgtcaatgtttgcaacatgcttatgactacgagatttcgttatttatatgaatgcatattgattgtggatcaaagagaacagtgtgttttcacatgcttgcctatagttatcttttgagtaaattacactttggtccaccttttattacccaagtttcaatttggaccacccttaaacctatttttttaatttggaccggataaatttaccattgttgcagtttggactaccgtaaacaatttttctcgtcatgactaacttccctttcaacaaacatatgaaccatacatataggagtttggccgtatactaaagctgatgtgtttaagatcgttaattgtactgaaaaaaatcgttcgtggtggtccaaattgcaacaatggcaaatttatccggtccaaagtgaaaatatatgtttaagggtggtccaaagtgaaacttaggtaataaaatgtggcccaaagcgtaattcactcttatctttttcatgcagtcctcactcgtgtgcacccgggaagaatttcccgatcggtcacatatcttttctgcacactttgtcctcactcgtgtgcacccgggaagaatttcccgatcggtcacccatcccaaattgctccaggccagttatttggagattggcttccggaaaagaagttccaacttgttgatatgagtattctattaatcctattaagccctaggccaggatgttacaccctcacccccttaagagagatcgacgcccccgtcgatcaaccctaggccaggaacgtcctctcttggccacgtccatgtgtccagtgccagcacatgtgccatgctgtgtaaccactcccggtctacaccagccatgcgcaccatgcctgcgcaactgcaacacacgcgcccgtgaaaccgcgagagtcggctctgataccaatttgtaacgtcccgccttcccccaggccaggcccgcttacatctgatagctttcataggtcatagactgccctcacagaccaacacatatctcacccatcccaaattgctccaggccaagcacgcttaactctggagttatttggagattggcttccggaaaagaagttgcaacttgttgatatgagtattctattaatcctattaagccctaggccaggatgtcaacccatgcaataccaccagtgtcacgccccgaactagtcccgaccggaactagcccgtcacgctccaaattaacctgttaatcgataccagtcccaggaaacagtgctggtatcacagggagacagagtatcacagcaacagaggtctctttattatagagtagaagtacagtcatgttgggctgcggacagatcctgaactcacaactgcattacaaaaggaaagcggaagccaggacttggaccaatcatcacaggcgcgacttgggaactaggccgaaaccctaaaactcatcgtagccgacttgctcctggaagaactcctcgtcagcaggatccacttcatcttcttcagcaactgggggggattatttatatagagcaagggtgagtacgggagtactcagcaagccacgggaaataagtgtttaatgcaggcttcaaggaaaggctgttgttttcgtaattgattttgtttgaactcttttctaaaaagtctaagtgagtgcttcccaaacgacacggatgagacagtgcgtctcgtccggtcggagtatgtgcaatgtgtcagtctttaggattgcaacaaggttggcacccggccaacagcttttcaaacggccacccgggccaacaacttttcaaacggccacccgggcctagctgatcccatcagctgcagatttttcaaacatcgaaccccttttcacaacagcaatttcacaagcagtagtcaaacaaaactacgctaggaatcacctcacatacgcccatgaccgtgggcacggctgttcgagcagtttgttaacctctgcagagggggtacactttacccacacgacattactaacccggatcacccagcccgtggggatcagccacgtcgggagacctccaagctttcatgacaaggcatttcgaaagccgatacaggtttaccaaatgccgacgagaggggtcccagaccaacaacaggttaggtcccagaccatactgtgccaggaagcccaggggtcctccccgacaccaccccggcgaatccacatgtctctcggcatcaaggctcccctgataagctagttactcagccaggggtgtcccattccacccatgtggtcgtacttgtcttatgtttggatgaaattccaaggaatcggtccttaagtgcgagagcgggaaaccgtacacccggtacgttccccggtccgcggttttggaaattcatttagttcgcaagcaccgacccaggtgtcgggttttccaagtcttttgtaaaactccagttttacccaagttgtttctcagattttaagtttgaaggcgaccgtcgatactcgcacagagtgcacgaatatcgaggtgcaactgggtggttacaaggggacatggtataacaattaacaaaggaaggatcaaatgcaacaaattaggtaggtctgccaatctgccttgcagacgggacaacagattaagtgtgatcctatcaatgcataatatttcgcaagcaatataattaaatttcaaatataggctcaagatgttcaaaggtggcttgccttgctcgagatctggagcttgatcctcgaaatcctcgcactgcgggtcttcgggctccgaaactacacgcgaaacgggacaactcaacaaacggcaaaaataaagccctattaaagacctctaagcgtgccactagatagatctcgagatttgagaaattttagaagttgaacggagtcaaacggaattacggttgggaagatattgaatttctaagattattggatttttggtctaaaggaaaaaggatttatttaaatccttttgggaaaagaaaaagaaaagaagggagggagggaatatagacttttctaggacggctagggcgcggcccaagagaaatggagcggtctggccgagctaaatgggccggccggcccaaggcggcccaaactcgcgcgcgcgcgggagggaggagagagagggccggtggaccgggctcaccacgcgcggtcccgggtgggacccgcttgtcagcggctcggctcaccgtgcggagggagcacgcgacgcacgcgcgcgggcggggaagggacgcggtgcatgcgcgcggtccgcggtggacgcaggtgcggcgggcccacgcgcagcctcacggctcgcggtggaacgcgcgcacggggagggactgaccggggtcggctcgatccggtctaggctgagctggcgccgacgtggcgcctacgtggctgccacgcgggccggcgggaggtagacgacgacccggccgcgaatggacggcgggcgacggcggcgagcggcggagcgaaccacggtgatacgggcaaaagcgtgcacaccgggcggttgcacgtgacaaggggagacgagccaacggctcggattcgccggaggttgctcgacggcggcggattgcggcggcggcaaccggcggcgggagaagagggaaacggcgacgaggtcacgagaggtcgattcccggcggtgagagcatctacgcggcgtcgggaactcgacgctagcgtcggattggacggaactacgccgagcgaggccggcgacgagcgggtgctacggagctcgagcggtgacggcggcgaacacacggcgagcgacggcaacggtcggggcggcgccggctaactacggggaggctactcaagctactaccgaaagctagggggaggagatggagcgaggaggaagaacggagagagacatcaccgagaagaggaggggcgctgtgacgagaggccggcggcgcgggagtaatctctccggcctcgggccggggaagaggaagaagagggcgcggccggagtcctcttccgcgtccttgctcgtgccggctcctccgacacgcgcaacgacgatcggcgacggcgaaacagagggcagcaatggcgcggaggcgaaaatgagggagtttggagggggagggcttgggcttaaatggacggcaatgtcggtttgggagaggggaaccgacattggacggttaaggcgcgagctggcgctcggcgcttgcagccaaagcggcggcaagaggatgacgccggcgaggaggaaaaaggggaaaaggagggggagaaaggggcttgcccctttgccgattcgggaaaaagagggggaggggaacgggagcatcgcggcagagggaggaggggcgcggctccgtcccttggcggcttgcgcgcggaggggcgggggccgggcgatgacgacggcaatgacggcggggcggtttggagcggagcggcgacactggcgacaggcgcgtgcagaggctgacggcggcggcgaccgggcggtcggccaccacggcacgcgcgcgcgggaagcaacgggcggcgtccgcgcgggcgcgcacacgctggctcgcgaggacgagcggctgcgcggctgcaggcgcggcagagcgaggggaagggagggggcgctcggcgcggcggcttacgcgcacgcgcgcgcggcgggcgggcgaggctgagcgggggagcggggagagaggcgctcggggcggctctcgcacgcgcgagcagcgtacgggcgaggccgagcggggggagagatgggagagcgcgagagagagagagagagagcgcccggggagagagagagagagagagagagcgcccggggagagagggggccggggaagaggggaagatgggccgagcgagattcggcccatcaacctcgggggaggcaaaatagacttttgcggaggaatttgattggaaggatttggattcggaattgaactcgacgatagatcagggattgagatcttgagatggcacggacactagacaacaagcaaagaaacaaatttcgcaattagggtttttaagagataatttttccgctaggcgccacgacggaacgggcgctacagcaaatctctataacttctgaaagaaagtacatgctaagaggcaggacaagttatttgtgacatgtctgatgtccctcatactattacacagccaaagatagtaagtatgatgatgcggtattcgttctctttgcgtggtattgtggcctcagaaaataactgtgtaccaatttaattgttgtcaatcgataagaaaccttgaaaagtttatattcatgtagcttttattataaaacataaagtaacatactgagaacattaaaatacgcccaacatttaatgaagcattactcgatcgatcacctgtaaggctgtaactcatttatattggcagctgctaattcgaaaaggcaatctgatagaccggcgacttgttagggtagaagaggccaaaatgcctctcggtggcagcccctgtcttctggttctcgttgaacatggcaaatatgtacgcctccatctgtccgggcctcttgggcgtgccacgcccgacatggtcgatcagcccctggttgtacgccctcgcgttgtccatgctcgccccgatcccttccgccgacggccacccgctctccgacaccaccaccctcacgttcccggcgtcggccttctccagcgcggcgtagatgcagtccaccatggcgtcgaacaggttggtgtaggtgagcccgttgccgtcgtccctcaccgtcgtgcccggctggaacgtggcgtagttgaggctgatctcgcgcgggttgccggcgtaggcgaagtaggggtagacgttggccagcagcggcgcgccagtgctcgccaggtactgagctatgccattcatgtagggatacgcgaacacgccggcggagggagggtaagagttggcgatcacgtcggatttcaccgcggtggaaaccttgatgccgccgatgccggccgcggcaagggcggagttgacgttgcgcatggccgggaggatgctctccgtggtgccgcctaccacctcgttgccgacggcgatgtacttgatgttgacggccgggtagtaggggctgatattgtcgtggacccatgacgccgcgttggaggagctggcggcgagataggacaccgtgtcgaagccgccagcgtcgaggatgaggtcgatgccggagttgcgcagggcgtccagcgcctccctgtcgggattgtagatgcgcatccgattgatgcccagggacacgtacatctgcaccacctcgctacgtgacgggagatcgttgcccaccatgccgtagcacacgccgatggattgcacggctggacgaggataagctacaaaaattaccaacacacgaatgcacgcacccgttagctacatgtaccaacgtacgtgtatacgcggatatatatacgacgatatatcatacgaaatgtgataatggcatacgtgtaatcgggtaggccggcgtcttgtcagggttgaagaggccgaaatgcctcctggtctcatcgccagtctgctggttctcgttgaacatggcgaacacgtacgtctccagtggcccgggccgcttcggcgtcccgttcttgacgttgtcgatcacgccctggttgtggttcatcgcgttctctgccgtcgccgcgaaccctcccgccgacggccacccggtctccgacacggcgatgcggacgttgggcgtgccggccttctccagcgcggcgtacacggcgtccaccatggcgttgaagaggttggtgtaggtgaggccgctgtcgctgtccctcaccgtggtgcccggctggaacgtggcgtagttgaggctgatgtcgcgcgggttctccctgtaggagacgtaggggtacacgttgacgagcagcggcgacacggtgttggcgaggaaccgcgcgatgggagccatgaactgctgcacgtcggggcggaacacgccgtgcgacggagggaacgtgttggcgaccacgtccatcttgatcgccgtcgacaccttgatgctgctcgagaggccggcggacacgagggccttgtgcacgttctgcatggccgggaggatgaggcccatgtcgccggcggggagctcgttgccgacggtgatgtagcggatgatgacgctcggccagtaggcctcgacgttgtcccggacccagtcgccggcggcggaggggttgctggcgaggttggccaccgcgccgctgtcgccgacgtcgacgatgatggcgatgccgctgccgcggagcgcgtcgagggcctccttgtccgggtagtagatgcgcatcgcgccgatgccttgggacttgagcagctgcacgacctcgctccgcggcgggaggttgtcgccaagaacaccgtagcaaacaccattgacagctgcatcatcaccacggcaccacgcaaccgtattacgatcgatcgatcgatcaaatcaacgaaaatagagaattaattgcttgaaaaaaggaaggaaaataatgaataatctaaaatatatacctcccatttgctcaaatagctaggtgactcgatctgtctcagctagtatgcttgatcgagtttctggagatggatatacgtatgcttcaatgctcgctcctgatcgtcgataggaatatgaatgggcagcttcatatatatagcgacggatgatcaatgatgttaacttcacgtatcagagagccaatcgttcttctcttgtcaaaggggcacgagtttttagccaagtggtgccaccagtataaacaagtggcactaatttcatccgttaaatttgccgatggatcaaggatgtgcaagcctggtagcaccgtgggtccgtggcggctatcagctctattttcatttgcacgttaatctacgacgtggtttcgtacgcgcacatggtttacagtattcaatcggctaatagcttattgattggtctctatgtaataattaggcttgacaaattgcattagcatgcatggttccgatgattacttgggagggaagagcatggcatcctcctgcgatgcatgcatgtacgcaagttccatcgcaatgtcaagttcccccggccgtttgttgagatgactatatgcgttttgttatttgcgatattgaaattgggcgcacatggtaggcgtgtacttgtacagtatttttttttagataatggaaaaaaatacaatatatatacatggggaaccacctatgcatctgtcgggtgattttttctcaaaaatcacccagatttttccttgcccttagattttcatccaatggagtaaaaaaaaaccgaacagacagctaaaaaaggccaaaaatgactgggccaacacactaaaaaaatagataaaacatgggctgcaatctggcccaaacaacaaattagaaaaataaatcaaacaaagaacagatctgagaggctcaaagaagtaaagtcaaccctgtccaaaagcatcaacttggctgccaagaaagctaaaagaaaaaggacaaacacaaatccaaactaacacaccagatccaaaaaagcaacaccacgcacaccatggagaacgagtaggagagaaagaagagaaaaaaggttgaaccaaagcaaaattcttcaaatcaaagtgaaatcacaggggagaaacaagaaataaggaagaaatccaaactaggtatgttccataaacctgtgctcatcctcaaaattgactacaaatcttagatcatagcaccatacgtgcccccatccataaggagtgttttgaacaaaatacagggcacagttcatacactgaaagtaaaacttacagtgcatttgcactaaaattacattgtaaaaacagtatatatgacatgtaagtgcactgtaagtttagtacaaatgcactgtaaaattatcaatcaatcaaacaagtagaccatacagaacaacttctgttgtttactacctaaaaactgaatacatcaattcaaacatgaactcaggagttccagcaccaaatacatcatatcagttgggcagcacaaaaaagaaaataaaaccacaatagtgagtagtatggtgatatgggttagagacaactaacctgcatgatggctgccgggtttggtcttgatgctggataggatagttgagatccatggagtcagaaccaaactaaaattaagagaacacaagcatgaattaggacatgttccacagtaaacttcagttacaaaccaattggtatagggcacaatccatatgaaaaacaaatatatgcacaagggataaataatgaaaaacaagttcagaaactaaaaaacaacccaccaaaccaatttcacattcatatatgctcaaaagtagaaatttacattgcatttgcactaaaattacatttgtaaaaacagtacatatggcatgtaagtgcattgtaattttagtacaattacactgtaaatttgggtaacataattttttgcattattgaagtgtaattgataaaatgatgcttgattagtaatctgtcatacagaacacctgcatatttcactcctcaatactaggtattcactcatttaagacaaatggctggataaaattttagtgatttccaatttggaactagcaaaacagattcatagttctctatatatttggcttagaatatagaccatagatcacatttaatactctcatacagaacattcaggaattatataggagcaggaccctccaataatccattcaaatcaaatctaggattaaaagaatatcactccaagaacatcatagtaaacaatctagggtactcaatatcttggaaatgtgtgatgactcgatctgccatataaacaatcttagtacatgcagagcccgatccacaatattttagtacttatttaactaatacaactacaagtatatatgcattatgcaacagttacatcatcattgagaatcatttatgcacatcaaatctatatctctagatcaggatagattcattagatcaacatgactagatgatacacatggaatacaaaaattactgtcctacataactaaaattacatctgtaaattcaggtcattgtgtatgtaagtgtactgtaatttttatacatttgttgtgtaagttataatgtattactctatgatgtattgttgtattctaatacattcaataaaattttgcagaaatgaagtcatatgcagatcctgtcaaaattagcatcaggcagaaaaaggaatctggggagacaaacaaggaaaaactacaattaggtattttcttttaaaaaaatcacatactatgttgatctgaacatcatgtagaaatttaaaaaaaatatcatagtacaactttgaaaaaaaaatcacaggaaaatgttcagctgcagggtgaaggatacaaaatattaaaaaatacattaagggttaaacactactactttcacaccattgttatcaaaactagaaaagggttaaacactcaaaacacattaacatagcacccaatcttaaatagcactatccatgctgccatacatatgcaaaatcaaacactggaagtagaaattacagtgatttgaaattaaaattaaaattagaaattacagttgtaaaaacaatttatattgcgtgtaacttcactgtaatttttgtgaataagctatgtaaataaatatgtaatacttaacattctagtaagatggtttcagtggacatgtatactaatttattccatgaattttgcaggaatgaaatttactgaaccagtcaaggttggatccatggagaaaaaaggtattgcaacactacactacttattcaagtacaaaacatctcacaatttcaaaaacttcaactacatagccaaatataataatcacatatataccactcctttcacttgccactcaataccaaacacacagaaatacaatcacatatgtgcctaaatacagaaattttaaaaatatatgcaaaaccattctaggctaacaatcataatttgacctaaatattatggccaaaaattacagtgctttatatctaaaattacatttgtaagttcagttgatacaacatgtaataaatccaaaaagtataaaacttacagtgatttataactaaaattacaattgtaaaaacagtttatatgacaagtaagtgcactacaaatgtggttcagtttataactaaaattacaacaatttatgactaaaattacatttgtaaattcagtttatttgtcatgtaagtacactataattttggtataattgaagtgtaacatgtatgtgtattgtaattttggtgcaaccacaatgtatttgaaaaatatattcatgtttgacataaaacatgcaaatgccacactgaacatatactgctaaagctcaatacatgctaaaaaatacaaatgattctcaaaagacatacctatttaacaaatcagtacctcatatacttcatttctcccatggcacaggtcgtgaagcaatacaagaaggagaaacaattagacaacaatcagaggagagcaaaaatgatgcaatgcatattgaaggaagcaaaagaaacatcaacatggctccaggtcagaaaatatatttgaataaattttgctctaagaataaataaaggtaactacaattatgtttgttgattctaacatatgctctaatgatttatataaattttacagggaggctggcatatgcaggaagtcctaatatctacaatttgcaggagggtgaaggaagcagcagcaaaatgccccatttaggtactaactaagtttctaaactaccaggtcgacaagctccaacaaaacaattgcaacatacactgatctaatattctgatctttatctttttcaaaatgcaggatgcaggaaaatacaacacgtaggaaaaaacttcaattcaccagaattaagcaataccataggaacaattgcatcagaagttgtcaattatggaggacaaatgctatatgatcaattcacattgctaaactcagacccaagacaggtacactaatcaaaaagcatagatgtagcatataaaactattttatacatgcagttataaactaataaacatataactgtgcaggaaggacagttgagctacactaacctcatgcaccaaataattcatagtccaactgtcaccatacagcaacaaacagtaagcatatcaacttacattatatacctaacaaaaaaaaagagaaaataataaatgaactgatatgtaaactatgaatatgcagggaggacaagaaagctttacaagtctacttcggacaccagcatttgatgtaagaataaaaatttatgaatacttatgtaacaattccctaattagtcatttaaatcagtactaactactgttttttgatattgcagaattcaatgatcttaacaaccagtagattttctccagaactagaagagcagcaggatatgacatatgagcaacacatatcaactacacactggagctatgaagaatttgatcagatttacaacagcaaatacatcacaccttttgctgaggtgattttagctaaaatattgacttcaaattgtttagacttaagctattttgcactattgattaacaagaacttattgtttggcagaatacaacagcaagaatagaagagctgtatcaatcaaaaaatagccatttcactacaaaggtaaaataaactttgcaacaaaaaaaccctatatcagcaagaattatcaagatataagtctaaccatcacaaaacatgcaggacaatgaagtggatatggcgactgaaaatgatgattatgtggagctgaattcagatgatgaaaatgagcaggtatactatcacttatttgaaaaacacaatacttattcaaataatgttaggaggatagatctgcaatggtgctgacatattacttgaacaaaattttcaggaagggacttcaaacatgcttcagcaagattcccaaatcaatacaatcacagcaattgaacaagttgagcaacagtgttgggcaagaagaaacaacaagtgagacaaaagctacctcagcagaggacaatgacactatcaatgaagaagacattaacaactacttggctaatgaagaagatagccaagataacactcctgtagtaattgacaagaaacacataccttgcattggcaagaaattcagaactcatgaagaagcgcgtagtttcttcaacttctatgcatatcaagtgggattttctgtagtcattacacaccactacaaatctacaagcaaaaaaagatttggtcagatcaccaagtacacataccagtgctacaggtatggtaagaatgatgatggtcagaagaagaaaaaaaagaaaactcagcagcagaggaatacacaggtgattgacagaactgattgcaaatgcatgctaacagtgaggcttgaaggtgatgtttggagaatactaagcatgaatctcaaccataaccatacactcacacccaatagagaagcaaagttcctcagatcacacaaacatatgacggatgaagagaaaaagttgataaggactttgaaacaatgcaacatacccacgagaaatatgatttcaatattgtcatttctcagaggaggcatagcagcactgccatataccagaaaagacgtcagcaatgttggaacagcaattaactcagagacaagaaatactgacatgaatcaagtgatggaatatctaaggcaaaaagaagcaaaagatcctggctactattacaagctgactctagatgagaataacaaagttaagagcatgttctggactgatgggaggtcaacacaactctatgagcaatatggtgaatttgtgagtttcgacacaacttacaaaactaacagatataatatgccatttgctccaatagttggtgttacaggccatggaaacatatgcatttttgcatgtgcatttttaggagatgaaactacagaaactttcaaatgggtttttgaaacgttcctaacagccatgggaggaaaacatccagaaacaattataacagatcaagacttggcaatgagggcagctatacgtcaagtatttccaaacagcaaacatagaaattgtttgttccacattttgaagaaatgtagagaaaggtcaggaaatacattttcagacaagagaaggaaagatctctatgcagaatttaatgacattgtgcacaatagcttgacaagagctgaatttgaaagcctatggttgcaaatgattgcacagtacaacttggaaaatatcaaatatctggaaataatgtggagaacaaggaagaattttataccggtgtattccaaaacagatttttgcccatttatacatagcacagcacttagtgagggcacaaatgcaaggtttaaaaggggagttggcccaacacatagtgtcatgacttttctactggaatatgaaacaatcaatgacatcatcttcgacactgagtatgggaaagattatgaatccagaaacaagaagccaaagtctttttggtcaaattacatgatagaagaacaagcagcagacctatacaaccatgggatatttgataagtttcaagatgaattgaagggaacactaaatctagaagtggcagctatacaacaaggaaaagcatatgaagtatatgcagcgccaaatctgaaacaacaagaattcagaccaagaagatatgttgtgatgacagacttaccacaagaaaacttcatgtgcatatgtgcaaagttctccaaagatggaatcctatgcagccatgttttgaaagtgatgttgtatctgaaaatgagcaagattcctgataagtacataattgaaagatggaggaaaaaggagagaaaattaacggtgagcatgcaacttgcaacaaatgacgagaacagttctgtgctaaggttcaatgtattatctagaagaatatgcaacatggcatcaaaggcatcanaaagtaaggaaacatatgagtacctgctaggagagattgataatctggatagcaaccttgacttgataattgaagatgcagctcaaaatcaagcaacaattgatgaaagcaacacggtggaaaacacaagtgaggatcaagcagaaaaagaaacaacaaatgagcaagaagatattcaagaccctgacatagctaacacaaaggggaaaaaatcaacaagaacaaaagggatggtagagaagataaaagaacagccaaaaaaacattgtacaagatgtggaagaacaagtcacacaatagaaaattgcccgctgatgcgaattgcaagaagtacaaagaaaatacagaagactacaacaacaagtaaaagaaatgaataatatgtaaaatattacaaacatgggcaagcaaaaaaaatcaagctaatggatataaatttttgtattgcagggacaatagagaagcaagcaatgcccgctaggaagaagaaacatgaagaaaatgacaaaggaagcaagctacctaaagatcaaggaagcacaaaaaagaacaaattaaattagaagacagaaaacaaggatgtcaaattttgagactgaaagtattagaccttaatgtttttcactgtattactgcactacacacactatatatgtgtattcatactaaaagtatttgatgtaagtgaacatctgtattcactacaggaatatgtaatggcactgcaaaaatgcattcactatgatcctatacattccactatgctagcacacactacagttttatatagcgactaatcttctggacaaattcagccttcaccagcaaattgatcctacaataacaaacaaaaataatattttcaaaactatgaaagaatccaaaaaacaagaatggcaaaaaataaaagacacttacaagattaaaccaattttcatagcaactatctttctgaaaaatttcagccttcaccaacaaattgagcatacaaataaaaaatgaaaaacatttttttcataactaaagatgtatcaaaaaacaagaataggaaaaaaataaaaacacacttacaggattaaaccaattgagcacaacttcttcaacttcagtctgcagcattttattcgttggatggaagaataactgatttgcatatagcatccgaatattgtcaatatcatctgaagaaaattcatttggtagaacaacccttggtgaccacaattccatacacttcataacaaaaattcagaatcaaagctacaaaaaaaattgaaacaactctttaaattacaaaaaacaaagaaataaaacctaggtagcactgttcatgatattgttgaatttagttgtaccacaatggcattttttcttgtttcttgtattattattattattattattattattagtatgttaaaaattgggcaagtgttattactaacatcctaagaatatatgcaatacgcaaaaaatataaaaatatatgcagcacagtaatatcacaaaatgtaaacacaaactactcaccacagtaatatcagaaattaaaatacacagcaaaagtgtgagcatagcacacacagaataaaaaaatatctagctcacagaattacatggtaatttcactagttaacaaatgaagcaagaacattctacaatgccccaatgagaggacaattaatgacatttagaaaattagaaaacattggccaaagtaaagaagtattgagaatttggacatcaacaaataagtaatgtaatacaagcgtgactctgcacattcctgaaataacgtattttgcaatgctccaattatttgaacagaaaacattaaacacaaaaaatataccaagatctctgttttggaacacaagggtaaactttcttcaaagtagtaaaatcaattgaagagccatcataagaatcccagaatgtctgtaaattattgatctgaatacaaaataaaaaaaaatcaatcaactacaaaaaacaagaagaaaaaaactgaatgaaaacgcatttaaaattaaaatatcataccagtaagcattcaatgtcttcaaaatagggatcacctttttcatgtaaagaatctaagaggaccaacattctgtcctttatatcaacaacaaaaaggaaccaatgttcaaggtgttcgatggggaaaaatagctgcaaaaaatcattcagaattaacaacataactttggaaaatttacatgagcatgaaaacaaaaaaaataccatgtcagaaaggtgcaacttcctagcactagctgctccaagaaacgatcttttcaccttgctcaaatcagcacaagatagatcagttaacaatagttcctgaaaaaaaattaaaagtgaaataaacataccaaaaaatatgtaacatatcaacattaacagaaaaaagcacaaatttgaaaaataactacttacaccaatagaagagaagaaatagtgtctcttggagtttgaaggatgattgttgttgaacaaaacacggcaaaacacattgataacatagctcaatacagtaccacctttcatgagagattgcccaaaagaagagaattttgctctaacattatcaatgtctacagcatcataactacaaaaaaaagatataaaaagaaaagcaaagtaagaaacatgcataatgc

SEQ ID NO: 9615 - DNA, 38712 bp, Oryza sativa
cggcggcggcggtctatagctccatgtcacggtggtcgcgcatatggctccctgcttatgctctgtgcacgacccagtcgtggtggagatatagaccaccgccgccgcctattacatctagggaaattcatctcggatcaatttttatcacttgagagtttgcgtgcagcgtggtctatgttatgcatttgtttgcacataaaaaaacaggtccttatccccttgaaacaagattagctgaacaatgcctcaaaatacttatgaaagtctttcttctttacatcgttgtttttttcggtggaaaattgttatttttcttacataaaaactctatttctacaatcacaagcatgggcttttactattcgtgtagtctgtagatagtgcttctgtcatacaacttgttcaatggaactctgtagtcgctatgccccttactcttaaaaagtgcaataaatagaattttaagagagaagcaaaggccaactgccctgtttgcttgcccttaagtgatgtgttattgtgatatttgaattatttttttctttcgttctggaaatactttcgttagtattattaggtctttccatggtatcatgtctgacctactagcctttcatggcacagtatagtatttttacttgtttggaaccaatatccttcttatgtaccagaacataatattgtccttatattctggcaggactgcttataatctggcacttcacgaacatgggccaaagctctatgacaaactgacagaagacatggaagatcacctgcaagaaatgtgcgtatcgattgaggctgctcaaggtggtttaaaaattatagataggtaaaacagaatgactacaggtgttggttttgcctccaaaataaaataaagctacttcactttgctgacattgaatatttgtttttggtaggttcagtcaagagagtaccttgccctattatttgcttccgtttgtatgggagaacatcttagcttgcgctttaattgttgcagcagagtgaagttataatttcaggtctctattaattgatgccttagtcagaaatctgttactgcagtgctctttctggaagtgcaaaaataatatgattaatagcataatgtaagctggctagattttatggttgggtgatatgggaagagtcaattgcgttttctgtccagctcggtttctatcggtgaatggttgttcgtttttttcctgtgcttttctattgttggaggatggcagggttcaaggttttgtttagtgcgttgtatcatttttatattcattttttaatggttatgtggcgatgtttgggatagggtaatttatggtttatctggtttttaaagactaaaaaggtatttctcggtttgattgcaacaggcttcgttccaaacagctagcgtgtataccacagcactctatggttggtggcagcaaaagatggaaggaaaaaacgtattagcggatgggtgagtggacctacctagatcagtcgcataggccaggattataattatatttagatggtctgattaactttatggtcggtcaatctatttaactggatacatgttgaggccatggttaaaaaaaaactgtttggtgtggttcctcatagtctttgtgtttgatgcttatctaagatgagcaaaccatgtttattatgttaccttttcagttatgattttggcgttaccttttcgttatgtattctggtcctcatttctggctggttggaaactgtatgtgatgtgatatagattttgatattgcgtttgtatattgctctacctaaaagtttgtagttgggccttggggattatgtgtatcacaaatattactttggtattgttattctggttatgattaagtttgtaaaatgatgcttcttatcgtattttctactggatcaatttgaggcaaacgaataaatgagcttcctattgtctccagtgtgatggtgccgtacttgttcatcagagaaaactaacaaggtaatgcgctactcttcttgccacttattgtaagagacatgatgatagacccggccatgctaagattggttcttaaaacttagtgttttgttttatcctatgataatggtcataaatttaagtcgatgaaaaaacatacagattatcgttaattttatacatgactaatgctgtggaagaatgttgagatctggggaaaattgttgcctattaatgttcattaataggaaggtgaaatttgagtttcatgctgctttccatgaaaaactgtgcatgttattattaaaagttgctgctaaatggttgcacatttgattacatgtttttatatctattgatattctgatgtccagaaagcctttttatcataagagtgtggtttatatgatcagatacatgcgattttggaattgagttgcattacgaccagaattatcctgaatgttgtgcatgaaaattacatttcctgttgtttttggttctctttgcgcctgccctacactttgtgcatgctttctttttttttttcagctgctgagctttcaggatgcaatagcctcagttcaaatatatgttccactatacatatgtgtttgctaatgtgctgctttagaataaaaaaagagagttatgaattgttcacttgtttgttttccttctgccccgcatgagctataggtttacctctgcttttatgtcttcaccgtgttttatcagttccatgggaagatctttcgttttcttccagttcctttttttactaattttaggtttatacaggttttgttcacaagaacaacttaggtgctaatttatataaatataatccacatgcacgaacccaggatgtgtttttgtcttgcctgagcgttatatagaactagcttactatatccatgtagataacagacggccatgcataattcatgcctttgtatctatgttataagaacatagattttacatgaagatgttagctgttttgttattttatttacaaaagatgacatgttccaattttagcttctcgttggtcccttatgacattggttacgtataatgtcaatctattgaattatatttatgccgttctattaagcacatttgattatacggtttggtgtttcatgtgttgtgtttagacttttagcatttagactttgttcatcaatatatgtttttatgcatgaggatgcactgctacatagtagtgggatgtgcagttctgaccttctcatccaccttcattatagttaagttcattgtacactttaatttgtttattcttctcagtccacggcgaagctggggatttaactggcattcgtagatttcttggatttgggattggtttgcagcctgattcagactatatggacattggagggtgaagcttggtgagatgctatttatctgtattaggacgtgtgtatttcctgtgtgtttgttactttatataggatttagaataaaaagcgggcagttttatgtgcaggggtgcttttggaggcagatacggtcttcatccacccgacggtagatccgagcatgtgcatttgtggcggtgcgaggcagcaggcagcggccagtagcccgagaaccccgacctcgatgccctaatgggcgtcacgccatatgtgacggagatacgcgacgaattgggggtgagccagggagactgcgcgaaccatgatcttgcgagttgcgagcgctgggcctggccaccgttttcaggccgttgggcaagctaggaggcaagaccttggagacgggaagctgatctacttctccagtctccagttatgtcttgcaattcgtaactcccttcttggctgcggcctacagccctacagcgagtggtatgactttattctttctagatttctagcatctgatctatttgtcgattaaggggatttaacatatgttaattgatttactagcagttcaagtgacacccccaccccaaaataactagagcacgaatcaatcaaagagccttcgattattactttatcctaaagagatatttgctgatcaaacataacaaatacaatttgagaactatgcaattatgcttctaaaattagagatgaagtgaggagggcatatttgttgaatgaaccaaataaaacagctgagtaattattttttccatttcatcatgtgcacatcacattcgacatgtgtaagggcatatgcttcatttttgttttactgatttgaacttagggttcgagcccatcctccattctcaacctggatttgccactcatcaagcctcaaggaaattggtggaggttggccaacgtttaccttctactgcagaagcttggtcatcgactgcgtgccttggtgctgtcttgccatagctgcggctgcttgccttgatctgttcacttcttagtttgctaatttcaaacgcgaaattggttattagtggttccgttctaatagctaaatattagagattgatttcaccgagtctacagcttgccatattcatctattatattattaaaacagctttgaaaggaggcaccacattcgttgtgggggctaaaaatttccagtctatgtaggaatacaataaaaaaaatggctgaaattcggaattagaaataagcaatattgaaagaagagtccatataagaacctaatacgagattaatcaaaattcggaataaaaataaaataaaatccgaaattagaaaaaaaaaaagaagaggtccaagtaggaatacaatttaaaaataactgaaatttggaattaaaaataaggaatattgaaagaagagtccatacaagaatccaatacgagattaattaaaattcagaataaaaaataaaaaaagaaaaaagaaaagaaaataatagttcaagtaggaatacaatttaaaattaattggaattcggaattaaatataagcaatattgatatgagagtagatataagaacctaatagtagattaattaaaattcagaataaaaataaaataaaatctgaaattaggcaaattaaaaagagagtgaaagtaggaaaataattttgaaacaactgaaattgaaaataaaaaataaaatatcaaaagaacacaatacgaaaaataaaataaatactgaaattagaaaaataaaaataagatttcaactaggaatacaatttaaaaataattaaaattggtgataaaaaataaagacaactgaaaaataaagaccatctaaaacacatgacgagattaattaagtaacaggcctatacaggagcagagtggtggctgttgatgggacatctgataacttgacgattaaaaggaaaaacaacgggcaggtcgtgaagcaatcggtcaaggcggttggcgggactttgacttttagaaagtaaaaaaataaaccttggtgataatcatatttaatttttaaaatctcaattacaataaaaacgagaggcagcgggcctgtataggagtacaatggcagagccattgatggttggtgggtcttatagaaagtaaaaaatgaattccaatgatagttatgatcgatttttacaatcccagtggcaataaagagtatgcggcggacgggtcgtagaagagtatagtggtaatgtttgacgggatttctaaaaattataaaacagatgaaacccaacgagacaataaactctaaaaactataagatctaatttttaaaggttcgggcttctaaataataaaaaaaataaaccccaatgataatcatgtttgattttaaaaactcaatgacaataaagaagagcggcagcgagcgagccatagaggagtatggtgactaagtcgctgatattttggtggaacttctagaaagtaaaaaaaatgaacctaaacaataattatgtacgacttctaaaatagcaatgacaataaagagaagatgcggtggatggtcgtagaggagtataatggcagcgtttgatgggacttctagaaattataaaaaagaagcccaacatgacaataaacctatagtttttagatccaatttttaaaggttccaaggagaatgaatagaaacaatggtaaatcgagcaagcaaataataaagaataatatgacagatgtaagggtagcaacaggtgtgacttttaaaaaccacttcctccgtttcatattataagactttctagcattgcccacatttatatagattttaatgaatctagacacacattcatatatgtctagattcattaacatacatatgaatgtaggcaatgctagaaagtcttataacctgaaatggaggtagtataaaattagaaacacgagaatgataaggtttgatctttcaaaatcttaagacaacgagataactatttaataaaatttaagtaaaatcatattaaaaacatataagtttatatgggtgctagccgcgcaattgcgcgggccacccagctagtttattttaaatccttaaatttcattcttacaaatgattgggcgatgaatttttttcttgtgttcttagcaatgagaaaagaacaatgagccatgggtcctgaatcttgccatacatggaccagtatggcagtacatgtgcttccttatatacaatacaagaaccagaatgtagaatcatacttgtgcgcacctttaattttgtaggataattgtatggatgaagcaattaaagttataagtcttttgaagagttcagagtccctcatagagcttgcaatccaacatcactttatacctggatttagggtgcacatttttacaggcaagtgattagggtgttgccctcggtttagttttcagactgtcattatattcactagccatcaacccgtgcgtcgcacggactatttttttgataaacatcataaagattaaattacattggcttagattaaaataatagttaataagattaacaacttgctaatcaatagagaatacttaatggacagtgatatgcaacttcacgtcaattaattcttactaatgatttacttggcttaccaggttctgatattttacatggattctttctcgatctgtttgttttacagagtaccacaagttgtggcttatcggcaatgaatgagatcctatctggagccgtataggtgatgatttatcaggttggcgactcccattcaaaacttatgcaactattatattttctatgtatcaattcaatatccctttagaaagcttgatgactctgtgtagtgtgatttctgtgcaaataagtcttgcagcttagctaatggaaatagtaaaaaaaatcttcaatatatcacctcccaaccttgtccatgatttttatatcattgctaagttttgatggaatttgttcgtttgaaagcttgaagatagtggtgtttatgcttgcaattaaccttacctgatttcttttctgtgattttcgtgttaagaatccggctattagcattattgtttcagttgtaaaagaatatgttgattgttaggacaggctttcgaccaattaggctcctcatcttggcaatattgtaaggcaccgtgtctctccctattcaacatatagagaacagccatttatttttcttttagtagcaagagaaattacattggccagaatggccagttgtgaactgaattatcctgaacctgtgctgtgtgatttgatggtatatgcaggatgttttatttgtgggcattaccgtcttccctctttcatggacggtatgatgaggaactcccattgtgcaagctcttcagcatgcctaattgggtacgcatgtatgcaaaccactttcccaattaattaacactactgtttttacttccctataggtcaattgattggtgaagcattttatcccttttcgaacagaaccaatgaagcaacaacaagacagtgtggtcctattttgttttttgcaaatccaagccattagtacgacttactatatatgaaactcgcccctgcgtgctgtatgatatcctgtataaaacctacatcttgcgatgagcattgtaactgctttgaatttatgaaagttacttatctaatgcactgtgcttctaggaatctgtcaatgcttgtagcaatcaaacgaggaatatagctaggaataggaaatattgatttaaacttactgatccttgaagtagatcatttagccatattctgatttacaactgactatgctaacaatcagcatattctgatttatgactggaacaataattctaatagatcaacttctattaccatgttaatcccaaaatacgttaattgttagcatagatcagcttcaaatatgctaataatgcaggcaaaaattgatgtcctgtgaagagtactatatcaatgctatatgctatacccatccttttcctgtcaacaaactgcagtatccatccccatggaaatcaaccatttacaagttatggtactactgtttgctaattagcttttcatcttagatggtcatcgtgcacactgcacttctttgtaaatataacatacctcctacgtatctagcagttattagagactgctaactaacaagatgcttatgtgtagtgaacaatccagtatgttatcgttgtcttatattttgtttctgatatgtttatttacctttcctaattttcagctctttctgcaaatctactcaacatattatcacactcttcgcaccaaccacgcataggccttcatgaaacaagacagagtggttagctcttccgtttgctttaaattcttttatgccttcagccaacagctgacacccagttttcattacagtacttttcgacgaaatactccatagatcacatagcgccactcatggacagcgcaacagtggatatacaagttcaagcattggaaggcccttcaatcacaatggttctccacacatcaacggatcatcgttgcaacttaaaagatggatggacagactttgcagtaaacaacagcatgaggttgctcactatgcattttcatttctacaagaaaagcatttgcaagcaaccatagatatcttctgaagaccgtactggccctgccatacagtccttttggtgccatcagggttcgctctccatgaaacgtgatgctaatatcttatgatatcaatatggtgttaattagccttgtgccttataaggccatcgtgcagactgcacttgtaaatctactatgccacccacatatttagccactgttataaggaccaaataggcaacatccttatctatatatggacacctgagtaagttaacatggtcacctgctatattgctttcaacctgtttctttttcagtgtgcaagtataacaaccggattgttgctattcccaacatgtacgtgcaggcggcgcaccattggcgcgtcccaccctctagtacaatgtatcagacaagtcattcagactagaatgtatgaatggcaacttgagcctttgctgcttgctgaaattgctgaaatggtaatgaatggtgtcatgttgttttaaaaaaaatctggcatgcgatatcgttaccatttccgagtgtatcgttccgattccattttcgtgaaaataaaatgaaaatggaaatggtagagggtttttcgactgtttccgaccgttttcatccctcccaggcagcttgggagctcagtgctttgctacggcttgctcccccgtgataaatcaagaaacggcgctttacctttttttttcctctgctcgcggggcttagggccacgtggcgcaaatttgtagaactgacggaagaccaatcggctagcaccggaaaatttaactatttgccactattagctttgacaattatgcaaatatcccttttagatttacacaaactttttgttgtccttcttaagtggtggtttcttaacttttcttccacttttacctacgtggcatgccaaggtggcaatcagggtcgacgagggagaagatggaggggagatagagactgaccagtaggtcccacgtcgtttttcaccctagatatccacgttggcatgccacgtggacaaaagtggcaaatagttaagaaaccaccacttaagagggtctaaaaagcatgtgcaaatctaagaggggcatttgataattgtcaaacataatagtgacaaatagttaaatgtcccgttggcacaagaagcgctagctttagattattagatactagaagatctgcacgccctgttgacgtgccgcctaatttagcctgtaatatggttcatctgcaaaatatatattaaatttgcctatctctcattttatattatttgtcattgtagcaaaatttcacatcaaactaggagatgtgcaaattacactgctatgcttattaactacattatagttttcaaaagcaatattaactttgattaacagttatacatggcattgataaaatgtgaagatagaataccgcgatctaaaataataatttcaaatgtgagaatgaccagtaatattttgaaacatacagagtaatatattaatggaatttaattttatgtttccttagaattatgagaaaaaccaaattaagattgtaattaatgatgaccaatagtttggcaaatagttagatatttccatattggaaagtacgaattaccccccgaactattgcggtagtacgatttacccccaaactataataccagacatttaacaccccaaactctcaaaactggataaattataaccctaaatcgattcgaactggttttcagcctacgtggcacactcgtagcaatacagtcagcaaaaacaacggtagggcccacctttcagcgcttgttgtttctctccttctctgcccctctctctcttggtgaacagaaggcggctgcgagcggcgggtaaggagccgaggccggcggtgggcgggggtggaggcggctgtgggcggcgggtgaggagccgaggacgcggcgtactagacgtcagggtagcgctcggtcagctctgatggcagcggcggcggagagggcgagggcggcgggacgtggagcgagacggtggcaggatcctccttcccaccgtccaggcgctcaagcttcaagcttcagttgctagcagggttgcatttaccgcggtaaaccgcgcggttaccgcggttaccgcgcttaccgcgggggtacggtaaggggtaaaccgcggtaaccgcgtcaaattcaaataaatttaaaaaataatttgaatttttgataaattttgtacggtttgtcgcggtttgtcacggttaccgcggttactgtgcggtaaccgtgcttaccgccggggcgcggtaaccgcggccccggcggtaaatgaaaccctggttgctagctagcctgttacattgctcctcgttgcaaattgcaaacaggcgatggctgatctgatgcgtatgatggcaacgggatcatatcactgtagatgatccgaaaaccaatagtttctctttgtggattttgttggcaactttttgtgacaagtcgacaagcacgatcgcaacacctaaacgccttgcggtgatatggagtcgccaaccacctcgatctagccaaagggccaaatcaagatgggttttgtagaaaagcaactaaaccggctagcagagccgatttagagatcaaaatcagcctctaggccgatttagatcgatatgaggataactacccgtctcgtgggcaaaatggaaggttttcaggacaaacctaaaaagaggtgtcgcactctcgcagcggcggcggacggtttacggcgcaaaccgacaaagatagactaaactagagtaaaatagaaaaacatagtaaaagaacgattcaagtagattgtatttggggggttttacaatgaaccggccttgtcgcttaaataggggttggtcttgccctctacaggcccttctccatgtccaactcgggatagaaaccaaaggaaacacgaaacatgccttcccgagcaaggaaacccgagacccgacgaaaacagactcggactcggaccctgccggtctgaccgcccacatacctgcggtcagaccggccctactagccggtcagaccgcccacacacctgtggtctgaccggccctgtgaaggaaacccgtcactttccaaactttggcaattttcccctatttcgtctataggtgtcaaatttgggtgtaaacagatttcagattcactagcatcaacttttgccctaatttcctcgctccttttgacttgaactgtcttcttaatttatcggagacgttcggttctcagctggatgagagtgaaactgatcaaattacatttgttctctgcacttctgctaggctgcttagctaccactagccttttactacccagctgcagataaactaaaacatgtatatatgaacatgaattccctaaccatataaactaaaacgcctccgatgatcgaaccatatcttggtccatcgatttaagtggaaaccaatgatcagttgttttattttatttattatatttatagaacaattactccctcggttctataatataatgtacaaccactttctttatatgttccataatataaggcatgcattcaattaattatgacatcttcttcattaaattattaattttttaaacaattcactctcacattctctaattctattggatgcatgcattatatttattaggatgatccaaactacaagatgataataactatttctttatctttgggttaatgttggttgtgccttatattttggaacggagggagtaatttattagagtcacgtgacaacttaggtgtattttgtcggaacactactactaatagtctcagtttacttgtagtcaactactgttggttgtagcttggtggcatactctacctacctatcagttgttgatgttactcgcggagtatcgttctttatctttggtgctagatgacatgcatgcatgctcattggatatcagctgattcttatattaggtacattgtgcatgaaatgtcttgtaagcaatatgacttattagcgatcggtggatagtggtttgtatgtagaactcgtatacgtggggattagtgaggacatacgattccacatgtggaggggagtatcgtggtgggtatacctgattttttttctttgagatggagatctaatgggtaaaattagtaggtccaccgatttttttttcctaatttattagaacaccatgtggcggtttacgagcgtttgtaggagaccacatggcggcttgggagtttttgtaggaagttaatttaatgaacttttagtatatgatagatagatatagatgtacgtttacaccaggtcacattttctctgctgtttcctaattggttttactttcatgcctagttaattaattatattagctatagggttaaaccaatctgcatgagcacacagacagtaaagtggaggaggggattagctaacagttgcttgcacaagcaggtggacagaaagacatgcattcgctttaatcacactgctctgaatgtgacatttctgtcatgccgctcatgcatgattagtggccggagtaggagtacacgttactagtggaaggagaaaatcttgttgtcggaggctgccgcgaacgggtcatgtgcacacttaattaccgtgtagtcacgtccaaattccaaaaacatagtaagacgttgaagaggatattgagcaaaattcgcatacattatattaattattatactcacgtcacatgggctggagcctatttatacggaggaggagcaaaggatcggatgaaatcgaccaagatgacgaagatagcaggtgttcttattttagttcttgttatctgtccaactattacttccgctaccgaaacccggggaggtaaatccatccatccatctcatgttttctcacaatctagctgagcttgattctctcttcctaattagtagtaattacttgtgcatgtttgtattgtgttagcgcttctattcctaattaattacttgtgcatgcatgcgctaattaattctgtttgtattgtgttaacaggccgggatgacgaccttagtgacgacaaaatctggacatctctgattgcattccactatcctggattggtggttccgccaatctgcatcgaggacattgcaaagaaatgcgggtggaataatctgacccctgcatgcgtgatggaagagatggacagctgccactaaggcgaccaccggccactctccatcagtctcaggctgacaggctctcagccataataattaataagctgtaataaggggcctaattaatatgtactacttcatgcctctgattttgattgcaagcaccactagccatgcatgcatgtcgtatattctaatagaattaattaatggtaataatataaagctagctagatgtgcctgtgggtttgatttttaatcactaggagtaatgatagaaaaaataattaagaattacttcaattttttaaataactagcaaaaatgcccgtgcgttgcaacgggtaaaaagaatccaatgacaatatacacttttcatgcataaccatattaatgataatgtttatatggatcgttgtagttaccacaattagaaaattggatttttccgccccttgtaccatataatggttttttattatatacggacgacggaaacttttttaactttttaagtttttaagtaaagttagggattagagactagatctgttcccttttgtgattaggaatttagattgtttatttacttttttagaaataaaaagaaaaaaaagagatcgggagatggggaggagatttttttccacctccgattcgcttttgtttttctgttgccgcgtttttcttttcaggatcgctcttttttttaagttagacggacgacaaaaacatcataaattttttaagtagtaacagaaacgaacggtcaaatatatttaaataaatcaacggcgtcaaatatttacctcgccaactgccccgaggcttcctccattgtcacggttcaaatcaatagcagccacaaccttccaatttagcgaatgacgagtgaaacgacggccaacaggcaatgtaacagagcggccaccggtcgactccaccacaccagcacacgctctcgtgaaaccctaggctcctctcccgcaggccgcagccatgtcacagcactctgttgtctccatgctcatggccacgagtggccttccctgagaccatgccttcacacgacggtggaagagatgacctggccactacttaggggaggatgtgaggcgcatcatggtccggtgttattgctcggtgcgtggggatagcgcggcgcacatccgctcggctggatggggaatcggtgatttcactgtcgcattgttatcacaaagatatctacatccgtttctagccgttggatgaatagatcggatggctgataaaagagataggaagttttgtgtaggttctcctaggtgcatctagcaaagagaataactcctcctttttatatatattagtaaagatgagtatgtaggtttattagactaacatcataccacttaatatcactgctagacaagtgatctttagtcccgagttgcaaaccgacaccacaaatctaggatatctttagtctccgttggtgttactaaccgagactaaatattattttttttccttttttcattgtttttttttgctgcttgcatattgatcacagatccagaaatcatcacaaaaacagatccacaaaaatcatcgctaatccacaaatcatcagtgatccagatccccaaaaatcatcacaaattatactaccatcacaaatcaaaacagatccgcggacttcgagcactacgactcccacctcagcctcctcctccaccacaacaactgctgccacacccaattccacccgtcaccacacctcggcagctggatcgtcgccgtcggcgctcctctcccgcgaggcagaggcggatcccagcgacgactgtccgcgcgcctaggtcgtcatgcaccgcgacggcgagtgccgccgcctaccccttgtgccaccaccaccccgctcttgccaccgccgctgccgcctcccccctcgtgccaccgtcaccgcctccccccttgtgctgccgccgccgcctccccctccgccggatccagtggaggagagggctctgccaccgcctatcggtcccggctacgatcggagaggaggtgtaggagatcggagagaggaggaaaaggagagatagaaagagagaaagagaaagggttagtggatgagggggagaaagaaataaggacgacgacgcgcgctgctctctccctccccatgtggctcgactgtttttttaatttttcgtcctggttggtttagacaaccgggactaaagatagtgggaggcttgacaatttttgaaccgggacataaaaaatgatctctagtcctgtttgatgttaccaactggaactaaatatcaaaaaattctgttgggcttttgaaccgggactaaacatattctttagtctcggttcctattcgaatcggggctaatgtgatttttgtcatccggacaaatatcaattctccggtagtgtatattgatgtattaaaatggaaggggttggatattggctaccagaaattatttttctagctaggagaaaaagagctgcgatatctaatccattttttcgaccactaaagcatctagaaaccctgcttcactataccgaacaattcttatcaatgggaaagtctgtaatagttatccaagagttctgtgtagaagggctatcatgcaacggatcaaacgtgtggatagcacaccatggcaccacggagatcgatatccacttctgtcattccatgtaaacgacagctccttctcccctttctagagttggttcgatttggagaaggggattgaaaaaaaaaagagtaaattgcatcgccgtacatgaacttgttaggtggtagcaatctagtgtacgaacttataaaacgcttgttctagtgcatgaacttgtcaggtgcgtgtggaggaaggcgaaaagaacactacatggataatcttattgattttgtgattgtagaaaaagattaaaaaaaagagcaatgatataagggtgggaaagatatgaaatatcatcacttccttgatgaaggataaagtagtgatcaaatttataaataattgcagtcttatgcaaacgcactatacatatgcacgtcacaccctaatcaatatcagcttcgtaagattaatattgccaagctattttggctctcgtttgcacgaaactatacaagttcgtgtaccgaaacgagcattttacaagtgatgaggcatcactagattgtctgtacgcatggtttggtataacacacatgcacgtatgcatgtgcctggcagtaggggtgaaaacagtatggaaatttcctagaattctggctaccgtgtccggtttgcaccgaccatttcagtcggtattggtaattgtcggtattggaaatataaacggtaatctcttccggaaatggtagcggaaatgagatgggttttttccgaccgttttgttggtaaccttttttgatcggtaatttccgtcaaatttccgacaaaattccgaagaaggaagcttgggcggctgagcctggctaccaggagcagcccattaggccggaagaaaaaccctagggaatgggcgtcaaccagcgtgtcgcttctcatcctctccctgtctcgtgactctcgtatagctctccgccgcctctacctccgccgaccgccgaccgcccatcgtcgcaaccacttgtcctcgccgccacgccgccgcttgctagtcctagccgtcgcatcctcgcgcctcactgtgtcccttgccggagaagcatgatggcacctgccgaacaaaaatgccgcacccatctgctgtcgtctatcatatccatggcatgtggccgttattaaactatagtctcgtcaacttatcgatattgaagtatcgttgaactttgtttatattgtttgttgaccttattgtcaactcattaatcatcatataacagtgttatgtggcagcgtgatgatgcaagggtgaaattataaggtcatcttcatgcatagttaaatgtgggatgatgtcacagttcgctgtttacgacatgacttttcgacttccgactgatatcggtagattcccgttccggcggttctgtttccaatttacaatattgtgcaatgtcaatctggaatggatatcaaactgtcccaatttcaagaattacatagtagttttagacggtgcataatcacatcacacatatttttagagaaggtaaatctggacagtacatattatcaaaaaaattcgaacgattgttacaacaatctctaactcattcgcagtagtcggcaatgaaaataaacgacaaaccaaggttacaaatcagagcacggagacaagcaatttcttaccccacgactaactcatgccagttacaatctatcgattccaccttgttcctatctcatatcggggacgacggcatccggaggctgccctcggcgtcagcgagaaggggtgtcgaaacatgaattcggcaataataaaagggggtagcgcacgagacctaaaagtggatggatgcgaagacaaaggatttagacaggttcaggccctctcaatgagaggtaataccctactcctgtttggggatttgaatccgccgagtgtgtattgatctgacgatcaggttgtctcatgccccctagagggcctcctgcccaccttatatagggtggggggcaggattacaagatagaaaccttaaccaatacggtatcggtttcctaaatctactttacaatattatcaaaccaggactttaggctgttccgtaatatataaggaaacgtaatacccgagtcatgatctattacatatcccatagatataagttatcccctatgactagtcggataaccatgccgtatgggtatggggtacccataatatccacagtagcccctgagaccttcgcagtcgaaaagataatcttctctcgaaccatattactccaaagccgagtgcttcaatcatctttgtcatggtctcccgagtacttttaccaaatctgaagactgtggagggctggaaaataaagtcaggtgcaccgactagatgcacctaataggtgtagcccccgacaatgtggttaattgaacaaaccaagcatatagtcaaggaataaataatccaaccaaccgagtggttttgataatcgtaatcaaccaagtgacttgatatcaatatatagcatatgcggtgtgaatcctccaaataacatgatccgagtgatataccaactgctttgtaaaatatgatgagtgatatagcaaaatagctataaagaagcttgtatattgtgaataaaggaatttccaaagtattgggcatacgccatgcgcacactgctttaacagatgtgcttaagtccctagaagacacatggtttcaccacacctagaaatatatggcatatgtggtgtaaaatccgagtaaataaactcataaaggatttaccaaccgcctagaaaatgaccacaatatataatcagcctaagccataatattggtcaataaaaatgcacacttacgtggcgaaaagcaatgatattgtatccaatcaattgcttaaaaacccaaacagcaccttgacttatatataaaaaagtcagcgggacagctatataaagctttactatttgacaccttttaagatgcattgtaccaactcctaaaaagttaagtaactgcggtataaaaggattttaaggtattgggcacttgatcacgcgcactttggcctaagcaaaaagtgcctaagtccctaaaagaacgtgacaggccacacctgaaaatatgggctgcagacatattaggcctaggccaaaacatatgccttcgacaccctttaaaggatgacgcatataacatgctcccgagtaataaatcttccgggtaatatagaccaagcgtagctcatatgaatagcttctgatctgagtggttatcccttatgggatactccaaaatagatgtaacaattgaatcccgactggcgcaagtattcagttgataacccttacggggaataataaatagtccagtctttgagcatataaaatagacccatgatcatgaattcatgttgcatgtatccggagcaagtccaaattgaagatataatacttgtatttgagctagtaagcccctgagcacgtagtcacaattgttcattgatggtagctgacgcagttggcatagagacaagacaaccaatatagagagaatattgcccaccagaggtggcaaaaatattggtggtagtgaagatagtgataccaatcaaaagtactgaagtcgcatagccatggaggcgaagaaaccagtcggcggcagtcaggtcagccagcaatgaatatgaaggcgctcagcgataaagttgtgtagttgacgacaacaaacgcaaccgacatgatgaagatgacgatgtcggtgatccagccaatagcagtgtagcaaccaatgaaaatgacaaagacgctcatcagcatttgcatagtaggtcaaccgtgaaggtgaaataataagtcagcgaaaacataatcatccattagcaacagcagagatgtcagggtcgatgaagcagaggtgctggtgatgatgtcagtgacaataatccatcaaattaatgttatagctgttgtagatgcttcacttggaggagagttgatgttgttgtccaactcgtctaaaccgaaatatttgaagttgttgaagtagaatgtctgctccgaagcaaagatgaagataatgactcctggagttgactcgtgggttgatgaattgatttcttcagcttgacataaaatttgtcaaattttgagccttgtatttgtgtagcccccgactctttgattagttgggaaacaactgaacatagagtcgagaactgtagcctcttgtcgtcgaatagttattgcttgattgaagatatgtgttgaagatgttcaagtagaaatcctaaatattggagagcctcttgttgtagtaaaataacatggcatcgcatgccgagatgtcgaggctcacaaagacgtcgtggttggtgaagtagcaaaacttgcgaagtagcatcaatagagtttgccagtgccgaagataataaagatgaagtcgctctaccatgatgacaaagttgcattgccgtgatgaagtgaacacgagtcgtcggcaacagaagcaaactggtagtgaagacgcgcagttgtgaaaataaaagcactagtcggcgacaacataaccagtcggcgacggaagacgatgatgttcatcagtagtgatagttgtataaaccagatgtagaagcgagggcactagtcagcagcagacgagacgaccggcgatgaagatggtaaggccaatcaacactggcagaatcatgcagccatggaagtgaagaaaacagtcggcagccatggcaaatgtaggcagcttgtgttgaagatactgatgcctattagtagtgacagcgatgtagccagccgtgaagaagatagcatcagttggcgttataacaggccagccgtgcaagcggtgacaccagtcagcggcggatgcggcggccggtcggtgaagacgtagacgcctaacaacggcagcataataggccagccgtgcaggcggaaacaccagtcggcggcggtcgaggcggccggttggtgaagacgtagacgcccaacaacggcggcataaaggccagccgtgcaggcggaaacaccagtcggcggcggcgaaggcaagccggtcggtgaagacgtagacgcccaacaacggcggcataataagtcagccgtgcaggcggaaacaccagtcggcggcggcgaaggcaagccggtcggtgaagacgtagacgcccaacaacggcggcataataggccagccgtgcaggcggaagcaccagtcggcggcggcgaaggcaagccggtcggtgaagacgtagacgcccaacaacggcggcattaaaggccagccgtgcaggcggaaacaccagtcggcggcggcgaaggcaagccggtcggtgaagtcgtagacgcccaacaacggcggcataataagtcagccgtgcaggcggaagcaccagtcggcggcggcgaaggcaagccggtcggtgaagtcgtagacgcccaacaacggcggcataataagtcagccgtgcaggcggaagcaccagtcggcggcagacgaggcggccggttggtgatgttctgactgatccattcctggagcgtaagagataagcttaaaaccatgaatcccttttatgcatatctggatctggatcctgcagaacaaacatataggatgagtagtatctgatataaatataatactcgagaaaaaatcaagtattttaaaatatttataaatatgtatttctcctcttgtcaattttgatttccccgagcagatgactcattacgtttaaacactctgcccgactaatcatagccaccaagcactgggagtcggcctaagcacttcccaaacatgcatatgagtgtcatgagttcgtcattaatggaacaaagtttcacggatcggagtttactactcgggtacttttgcaattattaagagcagaaaataaatttatctcatctctatgcttttgatttattccgaatagtacttagcaccttgcgttactcggtccatccaacgagcccccgggtgctaggaatcggcccaaaggcaaccatccattggcaaaccaaacggaaagcataggaagatagaactccataactcgataggtacttttgtactcagattatgtcgcaagcaatcaagataaatattatgaaaaatatgatataacatctgtagcccccgactcactactcaatggaagaccaattggtgtagtgaggcagaggaaaaggaaaaaatatcatataaagaataaaataaatgatgacttagctttgtaatattccccttggtgatggcagaagtggccaatgtgggaacaaagtcgtccatcaataacaatgaagacaccagttggcggcgacgaaggcggtcgacggtgaaagcgaagatgcccactaatggcggcatgataggtcagccgtgtaagcggaaacaccagtcgacggcaacgaaggtgagccaacggtgaggatgtagacatccaacaacggcggcataataggccagccgtgtaggcggaggcaccactcggcggcgacggaggcaggccggcggtgaagtcgtagacgcccaacagcggcggcataataggccagccgtgtagacggaggcaccaatcggcggcgacggaggcaggccggcggtgaagatgtagacgcccaacaacggcggcataataggccagccgtgtagacggaggcaccaatcggcggcgacggaggcaggccggcggtgaagatgtagacgcccaacaacggaggcataataggccagccgtgtaggcggaggcaccaatcggcggcgacggaggcaggccggcggtgaagatgtagacgcccaacaacggtggtgtgaccaaccaaccatataggcgaagacaccagtcggcggcgacggaggcaggccggcggtgaagatgtagacgcccaacaacggcggcataataggccagccgtgtagacggaggcaccaatcggcggcgacggaggcaggccggcggtgaagatgtagacgcccaacaacggtggcataataggccagccgtgcaggcggaggcaccactcggcggcaacggaggcaggccggcggtgaagtcgtagacacccaacagcggcggcataataggccagccgtgtaggcggaggcaccaatcggcggcgacggaggcaggccggtggtgaagtcatagacgcccaacagcggcggcataataggccagccgtgtaggcggaggcaccactcggcggcgacggaggcaagccggcggtgaagtcgtagacgcccaacagcggcggcataataggccagccgtgtaggcggaggcaccactcggcggcgacggaggcaggccggcggtgaagtcgtagacgcccaacagcggcggcataataataggccagctgtgtaggcggaggcaccactcggcggcgacggaggcaggccggtggtgaagtcgtagacgcctaacagcggcggcataataggccagccgtgtaggcggaggcaccactcggcggcgacggaggcaggccggcggtgaagtcgtagacgcccaacagcggcggcataataggccagccgtgtaggcagagacaccagtcggcggcggcggaggcaagccggtcggtgaagacgtagacgcccaacaacggcggcttgatatgccagctgtatgttgatctgctgaatcaactcatgcatgcatgaaatttctccgagcaagctataggcggctgctcccatgtgcccgtggtggcgtggtggccgcaacgcatccgtcggcgctgctcccgactgaagatttgagccatcgagattaatctcgccgtttcttctgtagtcgattccatcacacttttcgatgggtaattcgacgcagcccctacctggcgcgccaactgtcgaaacatgaattcggcaataataaaagggggtagcgcacgagacctaaaagtggatggatgcgaagacaaaggatttagacaggttcaggccctctcaatgagaggtaataccctactcctgtttggggatttgaatccgccgagtgtgtattgatctgacgatcaggttgtctcatgccccctagagggcctcctgcccaccttatatagggtggggggcaggattacaagatagaaaccttaaccaatacggtatcggtttcctaaatctactttacaatattatcaaaccaggactttaggctgttccgtaatatataaggaaacgtaatacccgagtcatgatctattacatatcccatagatataagttatcccctatgactagtcggataaccatgccgtatgggtatggggtacccataatatccacaaggggactgcagcagcggcggcggggggtggaacggcgatggcagcaccgccgtgagctatagctgggtgagggcgagagggggatcgcgacaggtggaatggcgatgctgacaagatcgatctagggcaccgccgtgagcaagagccggcgcatctcgatcccctttgtctcactgatctaaagaatgacccaggggcacattggtcacaacactcgcgattcggtgtgttaatccggtgaaattggaaaaacggcgaagcagcgtgttgtgcgagcgtggcgatagcattttagcgaaacaacttggcggaatggcattacagcgaaacccatccttacatgtggctaaatgtcaattttctcggacaatgcaccatgaaaaaagaaaagaaaagccattggttcattcactcgctgtttgttgatgctttttctcttggccaacaaaaatcacctaacgatttgcggtgtaatcgacggtgttgtcaatatcgatagatcaaaatttcaagattaattcactttcgtggaatcaaacgactaatttatgagcaaattagcaaataagagaaatatcgtacttacatgacgagaaatatcggaattacgttacgacaaacgagtagtttccgagcaaactagcaaaggataacctcctcgctttcgtggagaaacacaaccatttttcagtgcaaaacaacaaagattaaccaaatcctcttagccataaaaacaaaatagaaaatatcatatctctactacttaaaaaataagagatgcttccatcgtccgtcaaaaaaactggcgaaaaaaaaaccgggcgagcgaggaaaaaaaccaaaacagggcgagcgaggaaaaaaaccgggccaaaaaaaccgtaactgtccggcgaaaaaaataattcgattctgtgaaaaaaatacaaagtgtttccttcgtccgtgtaaaaaaagtccgactgtaaaaaaaaaaaaggccagcgcgaaaaaaaataggaagggtgaaaaaaagggcggcgagaaaaaaaaagcggcaaaaaaagaccgattccgacgcggcaaaaaaaacgtaaaaaaggtaaaaaaaaaaaggccagcgcgaaaaaaaataggaagggtgaaaaaaagggcggcgagaaaaaaaaaagcggcaaaaaaagaccgattccgacgcggcaaaaaaaaacgtaaaaaaggcaaaaaaaaaaaagaagcgccccaaaaaatcatctgattcctattcctatcgtaccataaaatttaaaaaaagggcagaaaaatgcaaaaaaaaaaagaggcgcagcaaaaaaaaaaagaagtcctatttctattcaacacggaaaaaaattaaccgcctttgaaaaccgattcgataccccaccatgacaaaaaaaacaagtttccatctaaaaaaggttcagcataacataaaaaaaatctgactatagaaaaaaaaatcaacactccaaattggctgtaaatcaaccgaacaggagttggtttaaatcgtaccaagtcctattcagcacacatcaggagatcaaaaccatatatctctatctcttctctactacttaaaaagatatgcttccatcgtccgtcaaaaaaaccgggcgagcgaggaaaaaaaccgggcaaaaaaaaaccgtaactgtctggcgaaaaaaataattcgattccgtgaaaaaaagggcgacaaaaaaccggcgaaaaaaaccaaatgaaaaaaaccgtaactgtccaataaaaaagggcaaaaaaaagtccgattctgtgaaaaagggcgacaaaaaaaccgccccaaaaaaacggacgagcgagaaaaaaaaccgtaaatgtccgatcccaaaaaaagggcgaaaaaataatccgattccatgttaaaaaagcgaaaaaaaatctctatctctatctctgtctctactacttaaaaaataataaaagatgtttccttcgtctgtaaaaaaaaaagctaaaaaaaaaggtccgactcctatccgattccctctcagaaacaaaaaaaaagtccgactatagatccgattcttaatctataccgtgatatctcacatatcttggtgaaacaaaatgatgtgccggattagagatctgtttaataaaacagaacctacaggtcgagagcattccatttttatatgattttaatttttgggtttgtacttttgcttttgagtccctataatttttatatttatatttgagttcctataatcttgcaataaggtacttggggccgtttttgttaaaaataataataaaagagagaacaaaagcagaaaggtgcataaaaagaaaaaggaaagctgcaaaaaaaaaagaaaaacaacaacaacaaaagttctgtttcccctatgtggcaaaaaaaaaccgtagatccgaacgaaaaaaaatctgattcctataaaaggcaaaaaaaagtgaaaaaaaatactagattcgattccgttaaaaacaggaaaaaaagtcggattcctataaaggtgaaaaaaaacagaaaaaaaatctaaaaaagtttgtccgattccataagaaagtggcgaaaaaaatggttcgtaaaaaataaaacgcttgttcgtataaaataaaaaatgcacacaggaaaaaaatggaaagggcgaaatttctaatcaatatatatctcttctctatctctaatataatctaactattttttaaaaaaaaatgcacgagagaatagaaacggttcaaacaaacgcgtgagaaaaaagtcagaaaaagcgcaaaaaaacacgctaaaaaggttttccatcttccataaataaataaaaaaacgcgcgaggaaaattatttccatcatcggtaacttttttaaaaaataaaacatgcaaggaaaaaactgtcagaaaaaacgcgccattttaacaaatggttttaaaaaaccgcgcaagaaaaaaacaccgtctattaaaaaaatcgctctgagtcggataggatccatcgattttttgccacctactacacggcttttatttcgtctatattctcttgtttttaaaaaaagcaacaaaaataacatttgaaaaaaaacaagcaaaaaaacacgcgagaaaataattggcaaaaaaaggcaaaaaacacacgagaaaagaaaagcaaaaaatagagaaaaatatggttttcattgtaaataaaaaagcaaaaagatcatgttagaaaaatcttttagaaagaaatgcgtcatttctgaatggtttgagaaaatcgcgcaagaaaaaaacaccgttcgtaaaaaacaagccgctcattaaaatacaaacattgccattgacatgattatttatgaaaaacgtatattatcattagaattttttcacccgttgcaacgcacgggcatttttgctagtaaaaataaaaagaggaaaatagtagattgataatattgttcggcggggtcctttctgccgacgccttgactaactttaaagcgccgcaggccgcatcaacgatctccttttttctgctccgtgggcccatccttccttcctatccggactggtataccgcatgcaatcaatcaggttgataatcctctataatctcgtaccgttccatgattccatctgatcatccctgttgcttcatccaaaattccaaatcatgtgcacgctattagtgctgctctccattctgcaccatctgcctgtgatgtgctacaatagaaacctgctcagcggcatccgcatagtccacatacatatatacatatatatattcctagctatttgtttttaatgtataatttaaccgttataatttcatttagcccgcatagtgtctcagccaatttaaaacattggttgctgctatagcatttgcacgttgcactttgctttctcatactaaattagtaataacacaaataggaccaagcagaaataggaaaaatgaaggtaaatctggataagtacgatatcttatggtgaaaaccatattgatatcctgtatttctgtaaaataaataataatcgggaaaaactaaataacaaatatgaagtgaaagattcgatgagaatttgtaatactaagaaccgttttttcaaatatgcactttagtctataactttttggttaatgaaatcgcaacaattttgaggaaacataactttaaattttataatagaatatctaaggaaaaagtatgaattacccccctaaactatcgcggtcgaccgaattaccccctaaatctgaaaaccagacatcactcacctcgaactttcaataccggacgaattacccccactggcacaatccaaagcggttttatcctacgtgacgtacacgtggcaatccagtcagcatttcctttttttttaaaaaaatggtggggcccacctgtcatctcacctcctccttctcctcttcccctctctctctctctctctccccccttctctcggcgagcacggcagctcgcggctctacgccggcctcagctacgcctgctacgcgtcatcggccacctccccgtccaccaacggccacgttcgtcttctcccgcgcggcgccgccgccgacgacctgtacgccacgggctgcttcacctactgcgccgagctcacgccgacggcgcgccgtgcaccgggacgggttgttgccaggtccccatctcgccggacatcccctacctcggcgcggtgttccacaccggcaactggacgaacaccgcgggcggttcacactactacagatccgggcttcagtgacgggtcatctgtgacgggccaacgcaactcgtcaaagatgagtcatctctgacgggccgaaaaaatatcctcttcaatatatggctaccagggaggacccgtcacagatgtgaagtcatctgtgacggcttgcacttgtaacccgtcacagatcgtctgtgacgggtcacaaccatggctcgtcacacatgacatgtcatctgtgacgggtgtagtattatgaaccatcacaaaagagaccactcatctctgacgggtcttttaactaacacacgtcacagataacgttatctctgacgggtggtagttatgacccgtcagtgatgagtgaaaattcaaatttttaaattttgcaaaaaaacctcggattgaaacatgtcctatataaaagttgtagctcttaatgatatccacaactttataactaacaacatttctattagagatcatttacatccccgaacatgcattacaagtgatcagatctacttttaaaaacaaaattttgagttttttttcaaatgacatggatggatacatgccccgtatcaaagtcatagaactcaatcagatctacaacattataattgaaaatattttcatttcacaaaatttacatgttataaagtgagatatattttgaaaaatgaaattttgaattcttcaaacaacatcggatgaagatattttctatgtaaaagttataaaacacgatgagatctataactatttagttgataatattttcatttgaagtcatttagggtgttaaatatatgttaaatgattcagacaagcatagacaaaataataacattgggttagtagtcaatatgtgttaagtaggtgagttggtaagggagctctatatggaggttgaggtcttgagttcgaatctcacttgtagcatccaagttatattgcgtgaaaaattgtgaatttgtaggtagtgatgtgtaaccatgtataggatggctagtaaaattcaaaatatttttttgaggttttttgttgcgtttaaaattcaaaaattgtatttcttgctttgtcatcagtgacgggtcgtaagttacaacccgtcagagatgagtcatcagtgacggtcaggtagttacgacacgtcactgatgactcatctgtgacgggtgacaagttttaacccgtcagagatgacttatataccggtcagagatgggttatctgtgacgggtgtttcatccgtcacaggtgattttgtcatcagtgaccactaatcactgaccaagaccaaacccgtcaaaggtgagggtttgggcccgtcagagatgacctggtccggcgtagtgtcaacccgtgcttctaagccatcggcatgctcgtgtactacaacgagaccttggatgccggccgtggcatccccgtggacgtcgacgtgtgcgctcaggtcgccggcggcgagctagaggtcgtacaccatacggaggaggtgccgaagctcgtagttgtcggcgcgggtgagcacgccgatgagaaggcggaagtcgggcttccgcgacgccgtgtacgcccccggtgtcgccgggccgcacgagctcatcatgagcgcctggacggtgggaaggaggatcctgccgccatctcgctccacgtcccgccgccctcgccctctctgccgccgctgccatcggagccgaccgagcgctaccccgacgtctagtacgccgcgtcctcggctcctcgcccgccgcccacagccgcctccgcccccgcccaccgccggcctcggctccttgcccgccgctcgcagccgccttctgttcactgagagagagaggggcaaaggaggaggagagagaggggcagagaaggagagaaacaacaagcgctgaaaggtgggccccaccattgcttttgctgactgtattgtcatgagtgtgccatgtaggctgaaaaccggttcgaatcgatttagggttgtaatttatccggttttgagagtttgggatgttaaatgtctagtattatggtttagggggtaaatcgtactaccgcaatagttcgaggggtaattcgtactttccaatatggaaatatctaactatttgccaaactattggtcatcattaattacaatcttaatttggttgttctcataattctttggaaacagaaaattaaattccattaatatattactctgtatgtttcaaaatattactggtcattctcacatttaaaattattaatttagatcgtggtcttctatcttcacattttatcaatgccatgtacaactgttaatcaaagttaatattgcttttgagaacgattataatgtagttaataagcatagcagtgtaatttgcacatctcctagtttgatgtgaaattttgctagaatgacaaataatataaaatgagatatatgcaaatttaatatatattttgcagatgagccatattacaggctaaattaggcggcacgtcaacagggcgtgcagatcttctagtatctactaatctaaagctagcacttcttgtgccaacgggacatttaactatttaccactatttggtttgacaattatcaaatacccttcttatatttgcacatgcattggtagtgcataaacttgttagatgggtacaatttagtacataatcttgtaaaatgctcgtttcggtacacgaacttgtctagttttgtgcaaacgagggccaaaatagcttggcaatattaatcttacgaagttgatattgattagggtgtgacatgcatatgtatagtgcgtttgcataagactgcaattatttataaatttgatctctactttatccttcatcaaggaagtgatgatatttcatatctttcccaccctagcttatatcattgctctttttttaatctttttctacaatcacaaaaacaataagattatccatgtagtgttcttttcgccttcctccgcacgcacctgacaagttcatgcactagaacaagcgttttataagttcgtacactagattgctaccacctaacaagttcatgtacggcgatgcaatttactcttttttttttcaatccccttctccaaatcgaaccaactctagaaaggggagaaggagctgtcgtttacatggaatgacagaagtggatatcgatctccgtggtgccatggtgtgctatccacacgtttgatccgttgcatgatagcccttctacacagaactcttggataactattacagactttcccattgataagaattgttcggtatagtgaagcagggtttctagatgctttactggtcgaaaaaatggattagatatcgcagctctttttctccttgctagaaaaataatttctggtagccaatatccaaccccttccattttaatacatcaatatacactaccggagaattgatatttgtccggatgataaaaatcgcattagtctcgattcgaataggaacagagacataagaatgtgtttagtcccggttcaaaagaccaatagaattttttgattctttagttccagttggtaacatcaaccagaactagagatcattttttatgtcctggttcaaaaattgttaggcctcccactatctttagtcccggttgtctaaaccaaccggaacgaaaaattaaaaaaacagacgagccacatggggggggggggggggagagcagcgcgcgtcgtcgtccttatttctttctccccctcatccactaaccctttctctttctctctttctatctctccttttcctcctctctccgatctcctacacctcctctccgatcgtagccgggaccgataggcgttggcagagccctcccctccactggatccggcggagggggaggcggcggcggcagcacaaggggggaggcggtgacgatggcacgaggggggaggctgcagcggcggtggcaagagcggggtggtggtggcacaaggggtaggcggcggcactcgccgtcgcggtgcgtgacgacctaggcgcgcggacagtcgtcgctgggatccgcctctgcctcgcgggagaggagcgccgacggcgacgatccagctgccgaggtgtggtgacgggtggaattgggtgtggcagcagttgttgtggtggaggaggaggctgaggtgggagtcgtagtgctcgaagtccgcggatctgttttgatttgtgatggtagtataatttgtgatgatttttggggatctggatcactgatgatttgtggattagcgatgatttttgtggatctgtttttgtgatgatttctggatctgtgatcaatatgcaagcagcaaaaaaaacaatgaaaaaaggaaaaaaaaataatatttagtctcggttagtaacaccaacggagactaaagatatcctagatttgtggtgtcggtttgcaactcgggactaaagatcatttgtctagcagtgatattaagtggtatgatgttagtctaataaacctacatactcatctttactaatatatataaaaaggaggagttattctctttgctagatgcacctaggagaacctacacaaaacttcctatctcttttatcagccattcgatctattcatccaacggctagaaacggatgtagatatctttgtgataacaatgcgacagtgaaatcaccgattccccatccagccgagcggatgtgcgccgcgctatccccacgcaccgagcaataacaccggaccatgatgcgcctcacatcctcccctaagtagtggccaggtcatctcttccaccgtcgtgtgaaggcatgtctcagggaaggccactcgtggccatgagcatggagacaacagagtgctgtgacatggctgcggcctgcgggagaggagcctagggtttcacgagagcgtgtgctggtgtggtggagtcgaccggtggccgctctgttacattgcctgttggccgtcgtttcactcgtcattcgctaaattggaaggttgtggctgctattgatttgaaccgtgacaatggaggaagcctcggggcagttggcgaggtaaatatttgacgccgttgatttatttaaatatatttgaccgttcgtttctgttactacttaaaaaatttatgatgtttttgtcgtccgtctaacttaaaaaaaagagcgatcctgaaaagaaaaacgcggcaacagaaaaacaaaagcgaatcggaggtggaaaaaaatctcctccccatctcccgatctcttttttttctttttatttctaaaaaagtaaataaacaatctaaattcctaatcacaaaagggaacagatctagtctctaatccctaactttacttaaaaacttaaaaagttaaaaaagtttccgtcgtccgtatataataaaaaaccattatatggtacaaggggcggaaaaatccaattttctaattgtggtaactacaacgatccatataaacattatcattaatatggttatgcatgaaaagtgtatattgtcattggattctttttacccgttgcaacgcacgggcatttttgctagttatttaaaaaattgaagtaattcttaattattttttctatcattactcctagtgattaaaaatcaaacccacaggcacatctagctagctttatattattaccattaattaattctattagaatatacgacatgcatgcatggctagtggtgcttgcaatcaaaatcagaggcatgaagtagtacatattaattaggccccttattacagcttattaattattatggctgagagcctgtcagcctgagactgatggagagtggccggtggtcgccttagtggcagctgtccatctcttccatcacgcatgcaggggtcagattattccacccgcatttctttgcaatgtcctcgatgcagattggcggaaccaccaatccaggatagtggaatgcaatcagagatgtccagattttgtcgtcactaaggtcgtcatcccggcctgttaacacaatacaaacagaattaattagcgcatgcatgcacaagtaattaattaggaatagaagcgctaacacaatacaaacatgcacaagtaattactactaattaggaagagagaatcaagctcagctagattgtgagaaaacatgagatggatggatggatttacctccccgggtttcggtagcggaagtaatagttggacagataacaagaactaaaataagaacacctgctatcttcgtcatcttggtcgatttcatccgatcctttgctcctcctccgtataaataggctccagcccatgtgacgtgagtataataattaatataatgtatgcgaattttgctcaatatcctcttcaacgtcttactatgtttttggaatttggacgtgactacacggtaattaagtgtgcacatgacccgttcgcggcagcctccgacaacaagattttctccttccactagtaacgtgtactcctactccggccactaatcatgcatgagcggcatgacagaaatgtcacattcagagcagtgtgattaaagcgaatgcatgtctttctgtccacctgcttgtgcaagcaactgttagctaatcccctcctccactttactgtctgtgtgctcatgcagattggtttaaccctatagctaatataattaattaactaggcatgaaagtaaaaccaattaggaaacagcagagaaaatgtgacctggtgtaaacgtacatctatatctatctatcatatactaaaagttcattaaattaacttcctacaaaaactcccaagccgccatgtggtctcctacaaacgctcgtaaaccgccacatggtgttctaataaattaggaaaaaaaaatcggtggacctactaattttacccattagatctccatctcaaagaaaaaaaatcaggtatacccaccacgatactcccctccacatgtggaatcgtatgtcctcactaatccccacgtatacgagttctacatacaaaccactatccaccgatcgctaataagtcatattgcttacaagacatttcatgcacaatgtacctaatataagaatcagctgatatccaatgagcatgcatgcatgtcatctagcaccaaagataaagaacgatactccgcgagtaacatcaacaactgataggtaggtagagtatgccaccaagctacaaccaacagtagttgactacaagtaaactgagactattagtagtagtgttccgacaaaatacacctaagttgtcacgtgactctaataaattactccctccgttccaaaatataaggcacaaccaacattaacccaaagataaagaaatagttattatcatcttgtagtttggatcatcctaataaatataatgcatgcatccaatagaattagagaatgtgagagtgaattgtttaaaaaattaataatttaatgaagaagatgtcataattaattgaatgcatgccttatattatggaacatataaagaaagtggttgtacattatattatagaaccgagggagtaattgttctataaatataataaataaaataaaacaactgatcattggtttccacttaaatcgatggaccaagatatggttcgatcatcggaggcgttttagtttatatggttagggaattcatgttcatatatacatgttttagtttatctgcagctgggtagtaaaaggctagtggtagctaagcagcctagcagaagtgcagagaacaaatgtaatttgatcagtttcactctcatccagctgagaaccgaacgtctccgataaattaagaagacagttcaagtcaaaaggagcgaggaaattagggcaaaagttgatgctagtgaatctgaaatctgtttacacccaaatttgacacctatagacgaaataggggaaaattgccaaagtttggaaagtgacgggtttccttcacagggccggtcagaccacaggtgtgtgggcggtctgaccggctagtagggccggtctgaccgcaggtatgtgggcggtcagaccggcagggtccgagtccgagtctgttttcgtcgggtctcgggtttccttgctcgggaaggcatgtttcgtgtttcctttggtttctatcccgagttggacatggagaagggcctgtagagggcaagaccaacccctatttaagcgacaaggccggttcattgtaaaaccccccaaatacaatctacttgaatcgttcttttactatgtttttctattttactctagtttagtctatctttgtcggtttgcgccgtaaaccgtccgccgccgctgcgagagtgcgacacctctttttaggtttgtcctgaaaaccttccattttgcccacgagacgggtagttatcctcatatcgatctaaatcggcctagaggctgattttgatctctaaatcggctctgctagccggtttagttgcttttctacaaaacccatcttgatttggccctttggctagatcgaggtggttggcgactccatatcaccgcaaggcgtttaggtgttgcgatcgtgcttgtcgacttgtcacaaaaagttgccaacaaaatccacaaagagaaactattggttttcggatcatctacagtgatatgatcccgttgccatcatacgcatcagatcagccatcgcctgtttgcaatttgcaacgaggagcaatgtaacaggctagctagcaaccagggtttcatttaccgccggggccgcggttaccgcgccccggcggtaagcacggttaccgcacagtaaccgcggtaaccgtgacaaaccgcgacaaaccgtacaaaatttatcaaaaattcaaattattttttaaat

SEQ ID NO: 9616 - DNA, 27873 bp, Oryza sativa
gaccattcatcttattcaaaaaatttacgtaattataatttattttgttatgaggtgttttatcactcatagtactttaagtgtgatttatatcttatatatttgcataaattttttgaataagacgaatagtcaaacatgtgagaaaaagtcaacggcatcatctattaaaataatggaggtagtatatataaattgcaagcatcactagttctcctctattttggtaatattgacggtcgaaactgatcgataacgaccgtcaacaacagcaggcagcccagtgctgacggcagcggcgaccgggcggacggtcggtcatcgcgcgcgcgcgtgaaaatcgaacgacgcggccggattttgggtggcgtcggcaggaagcggcgagagagagagagagagtggtcacgcgcgacgcacgtgggagaggagatgcaggccaggccatggccggattcggcccaagcgaatatgagggaggtaaagtagacttttaccaggaaatcgctttaagggatttgggggcaattggtgcgggatttgaattcaaatcgaatatttgaactcggcaaaacatggggaagccaaagaggggattcgaagcgagaattcgatattcttggaacatatatataatcatggggaggcgacgctggcgaacttgttaatggtatttcttagatttagccgcttgtcaatgatatttgttggattatctcttattttattgttcgaaatggaagtgatcttcctattttgctgatgtagatgccacttattgatgtctacaacaatgaaagttagtaggggaccaccatgaatcatacgccaatgtcggaggagactagcagagaaggcctccgggacggtcgcggcgcgagaacgacgtagagggagaattgccggagtagcacgtagttgccggagaagagcgaagtgtagtcgaggaagatacggtgacactggcgatgaatcatgctggacgaagacgaaggcgaagtagtgggaccaacggcctggatggcgacgtcagtaaccatgtagaggtagctggaccaccggcctagagcggcgacggtggcagcttggagatgcggcgacgatgctcgaagtagacgaagaagaccctgagcggctgacgatgaccagtgcggatgacgagggtgtcgaagcgcgaacggcgatgaagacgacgaggggcaacatcgtgacccataggggcgacacaggtgcagcttgatgtcgatgcagcggcgagaactccactagtagggaggccatgctgaggagggcgcctctcagcgttccaacaacaagtggaggtggaccacgggcggtggcactgcggcccaagggggcgacgcagcggcaacccgaagcttaatggcgtagacgcatgctcgatgacgatcggttgcagaagtcgttgtagccgggagcctgaacgggtgatcaagccgaagatgcgtggggctgaacgatgaagtcaaagcagagtcgatgccgatgtcggagatgtgtagaagtcgacgaggcggtgggcgacgcaaacccgatctatgatcaggaaaaaaaaacagacacacacatgtacagcagcagcaacacggtaacaccacatctcttcctcaatggtgtcggtccatagaccaagtccagcaatctctctgcctcaacggtaccagcaccaatgacgcatgcacatctgtcctctccagacctccacagccagagccagccatccatgaaactccatgtctacacttctctctctcctcccttgcagtcaagcaagttcacagaagagaaaaaaaacaggacagggtgtcacgtgtcaggcccggcggtgctgacagccgacgtcaggagagggcgcaggtggtggagacgaaaggcggcggagtcggagggcgtggcggtgcagggatgcggccgggatgagtccggccggctgcagggccctggcgcgccgatggcgtccgtgtgtcgacggtgaagacggcacggcagagggagcccggcgacgccggctgtggacctcggcgcggtgaagagacggaggatgagccggcgaaccggctgagtggatctggaggtggtggaggctggcgacggctcgggatccggcggtcggcatggaccgagcggctcgggatccggccgtcggggccgcgccggcggaactcgggcgacggggctggagcagagacggacgccgtggcttccaagatcaccagatcgacgtagctgctgttgactcgacgaaaaacgagccccgccgaggagatcgatctactcggcggcgcgacttgacgaagacgacgtaatgacgaagacatgccgtccaagaagatcgagatcgatcatctcatgacgacgacgcagatgcgaatgacgaacggaaaaaaaaacgggtggccgccctcgttagaaacaatttttaaatcaacttttaaattttctaatatttaattactctcaaataactgttacgaactcagtttgtgctatcatccatcaaagggatcgggctgagttctttctccaattttcctaactcatctccctcatttttcacgcgcacgttttttaaattgctaaacggtatgttttttataaaaattttctatatgaaagttgctttaaaaaaatcatattaatcgatttttcaaaaaaatgctaatatttaattaatcatgtactagactgctccattttacgtgcgtggaacgaacacagcctagtccatagattttgggcaaatgagttactgacaagctggtacgtgcgtactttcacctctcctgaaggaatcgtaatctagcgtgcagtagtgctggtaaactatcacacatcatgcatcttaatgacgcccctaaaaccaattaattttctaacagaatctagctttgtggtaccatactagtttcttaatacagtagtatgcgtaatcgtgcacgaatttcacaggaacggtgagaattttcccgtgtttcatcaaaccaaacgtttgcattgtatatttccatgcatagcgttcatgctgaagaaagagatgcgtccttgaatctacgctcgattgcttacatgttttgttttcttaccgtgttaccgtttcactaaatgagtatctcgcgtaacgcttgtcatgtagtactaatgtgcaagatagtaactccactacttgaaatcaacaaactcactcgtacgttcggcaatggcttgcacaccaatttcaactttttcacggcacaactcttcacataggacaataaacttttcgcattgcaagctaatacaaaaaacacaagaactaaacagaagcagagtatgctagaagaaaagcaggggaacaaaatcagtgagagagttctgtacctgctaggatggaggcaaaaactgcaagtagcaacgccatgtcgagcatggaagcagctgaagacgccattctcaagctcgactcaacctgtgacatctgacctgttgttgcttcttgcagagcctaacggccacgagcagaagcgctactactcccggcttatataggaaggtgagaacaacgccaaaatgtgtttggctcatactggccaataggattgaattcttagtctgaattaactttgccatgttcaaccaattcatggatggatggacaacgatgacttcgacaagaaaaaataggcaggagatagtcgaaggtcacactctgttcggtacaggtaggcagtggcgaagacaggacaaaagtagagcaaagaccattagccaaaggtaacatgagattagtgagtcaaacacatctctaacactccgagagtttatatttggtacatctatatttgttcagtgtgaaaaaccatcttgcatcaaactgtttgtcatctatttccaaaactgggtctcttagacaatttaactatgtttttgtgctcatcaaaggaaagccaaggaaagcaggggcctgactcttctgaccaagttgttacatcgaccttgcaaagggtagagtgaagatctcgtcatgatctcatatcatcgtgcaaatatgtgatttcattttccatatgcatcagtgcttcattcttagagtataacggctatgtaatagttttgttctctccagattctgtaacaccactcgtacgaaattactcaccaatggctaacatataagccgtttgattcatatatattatatgtgccttcaactttattcagctttaatcttacaagaccagtagttcagcctaaaaacagcaaaataatctaattaatccatctatgtgcaggcggcgcgtcccaacctctagtctcctattaccaattgcagcagacttggactaatggaattgcttgaagtgaagaccagtgaacaaaaggctttacacaaaaagaattgttgacctctttcgggataaggcccggaagaagcagggattgaaccagggcttgttgacacagcagatatcaaaagcctatgttatctcattttcagggaccgagcaagggatgagcgccctctgatctaacgtccaaacaaacaactgcccttgttactagaaatatgaagcgtgctagcgcgcacttcctattaaccaattcaccaattttaagatttgtaaacaaagataataggagccgaagtcaatcccttaaaacactcctccccgaggggacgttatcggtcgcttcgttcccttgtttactgatctcttttcaggagataggtctaccgttgcaaactcatctgcttgtaaattcattgtgtaaaataactcgtaaattcattgtgccagaattgatcactgatcaggtgtgatcagtctcatccgtctaagagactgatccggtgcgatgagtctcatccgtgtaatattttggaattcctcttccaactcgtcccggaatgggcgttatggcaaagaacaagaagaaaaagaaagaaggaacttgtccaatagtaacaaatggtgcctccacaggttgacatctgatccaacctagtagtaagcaatccgccaaaagcaaccaaaatattccttggtgaatcggtcgaaaacttgaactacgcacatacatttctttaaaaaaaggtaaagccaagagatataaaaactggtgctattgcggctacacctggagtgagcccacaagagcttttactgtaccagttccgaatataagaaggggctcgcggattttaacaggttaggcttaatctacccaattggaaatctcttgcagtagcttttactagaaatccatttctcccacaaagctcctgtgacctaaccatctagatagaagcctcgcaaagagtatatgccgaaaatcctatgtttggagtgaccatgaacactgcttgagacccttctttcgtgagagttgtgattccgctttcatgttttggattgagctttaagtggattggaggcgggcattttcatttcaacgtagcagtagggaaagtgatttcggggggttagtacacatgggcagttgggacagttacaggtagttaagttcggtcttattcttatgggcaagtggtcctagaatctctctttccttctctaaagtatagctttatgaaactagaatatgagtaaatatagaaatagaataataagaatatcatatagccgtgtattggttttgatcccagttttatcctacatggcggctgagtcagcgtgggacccacgtggacccacatgtcagcatgccacgttatctcttctttcttcccttttcttctcttttctcttttattttcttctcttctcttgtgagggtaggcggaggcggaggcggaggcggtggcgcacgccgttcagaatgaccgcctccccgtgcgctccgtgctgcagatgctcttttccgagcacggcaagctcaaccgcctcgccgagctcagcggcggtgcctccttcggcgcgcccagcctggtattcgacctccccggcgcccgctgccctccaagcgcgaggtgctcgcccagcaccacgagctccgccgcctccgcgaggacttcgcccgcctccaggtacggtttcatcacggccatctccgccgccaccgttcatcaattcaaagctttgaggtgttcgtcattgtcttcgtcgcgacgtgcaggtccagtgcagcgcgctgcaggctcaggtggacaggctaagcatggagaggaggtggcacggtggcggtggcgggttcttcaagtggagcacgttctggttcggcggcatgagctccgacgtcgcgagggtggaggactccgagagcggcattgagcggcggacgccggcgagcgggaagaagggcaggggaggcgcacttgactagttgcagaaagaactctgcaaagctatgtatgcctcacttgagtactaactgttaggtttgtctattggattacctaggtttagatctagtcggtagaacactttggatggatgaacaacaatagatgaactaacaaagaggaagtgagagggtttagggatgtgaccggtcgatgttgaggaggaggaagtgaggccggccatcgtcgttgtcgttgtgcgcttgacgtgggcggcggcgacgatgctgcgcggcagtggcggtcgtaggcgattccggcgaggtcatggcgcgacgatggagtcttcccgtcactggctgtgcccccttgatcggttagggtttgtggggtggagtggcggtggcgacgaacctcgtgtcttgtgtcgtcccgtcctccacccctctttatatggcgcagggtgacggaggcccaccagccattgggctgggcgcccccgatcagggcgcgggtcaaggcccccttgagccgttgggctcaaggagagggagatccatctaacattctcccccttgatctcactatttcttttagctttttctattccatcacaggtttacatatagagcatgtttcatcgtcacggttaattaccgctggattcgacagccactatacacatctctattcagaaacagatactttaacttttgggccctatagtccaggattcataaggcttcccttaaacacatgcatgctacatgttccttgaacatgttgggaggtaggcctttcgtgagcggatccgcgagcatcctttctgttataatatgctcgagactgattgtttgatcccggactttgtctctcacaacatagtactttatgtcaatgtgtttggcagtaccacttgactgattgttgtgagagtacattactgcgggttcgttattgcagtataactttattggtttcacaatactgtcaaccacctttaaaccgggtatgaacttctttagccagttcacctgccccgttgcttcatagcatgctataaactcggcatacatagtagaccctgcagtgatagtctgttttgagcttttccatgaaatggctcctactaccagggtgaacacatatcccgatgttgactttgtattatcttttgcaaagtcagaatctgaataccccactatctggagcgattctgattttctgtgagacagcatgaggccttttgttccttgcaaatagcgcaagactttctttacaaattccaatgctctaggcctggattactttgaaatctgccaagtaacccggtaactaatgccacgttaggtcgtgtgcacacttgcgcattcatataaacaattttagccatttatatctggtattgatactgccatctatattcagggcatgtctcaacatattgccaattatcttgttatacacagagcttgaactgagataatgaagagatcgcaaaaatgtgtattcgtggtctattaaattctggccaatatcaaaatcttcaactgattttcctaaatataattttttaaccatcgcagttgtttcaatataattcccgggataatggatcctactccagatatgatggctaaaagacttgtaccgcaatataacatcgttactttaaagacactacaattatctgtctaaactgaagcctgaagaccatgaggttcgtctctttgaatgaactccagtatccaaataaatataggggcaaaaatagaggagcaacaaatcaataaaaaatcaaacagaggcaaatgcatgggaaggaacatactggcacattctcattccttggtaagaaataaaggaattatagaatatatagctttgcattgaccaagtggcttaggtataaaccaactggcctgttataaactaacaatattatctgaatatcatctaatacaatattcaaccatacttcagatttttaaggtaggaaaaatgtactgacctccctccttattcagggtgaacaccttattccaagtccatgtatagatcaagaatatagagaaaatacactgagaactacaatgtgaagaaggcaggaagaactgcccacctaatgatctatcatacatatatcaggaaagtgagctagtaaaaatggagatataaacaaatggtacttttggacttgccaaattggaacactggatgcaataatatgtcaagattgtcaggttcaccgagaatctttgatgtcatcagaaaatttaagctttgccgggtcatatgtaatacttccagattcaagtccatgtttagtgtcttctatttctttctgacagcgctgctcatttcccatttgcacacctgataagaagcacaaaagggaacttattaccaaggatgaaagctgaagaacttagtttaacatggcttgcatgttccatttggaaaataaaattggcttcacctttacactcactataacaacaaaaataaccggcatgtatcatggaactataataatgtacaccccagagaagactgtctagacctccaaacagaaaataacctcatgaatactttggatgggaaaaatattgttcagtaggtgccaacaaactaaaacggtgaaatgtaaaaggcttagaagttggtaatataaattacttccaataaccaaattgcacagtagataacagacctacaacatatttgtttggttcaaagcacattgtagtcaatatagcaaattttggttgtatcaaatattgagaaagcctatggaaacggaattcatggtactaataaacctgatatgcaaaatgtaagaactaaccaattcaaattacatatggatattttgtatccttagacaatgggtaattctaaagataaaatacagcattgcagttattattatagattaatgacaggcatatatgtcactcttgtgttcccaaccaaaaagtacatagagagctagaccatggcaacagttcgtattaatactgcaacactaatgtgcaaacaggtaaaactaatttgtatagacaaatgatctgttaaaactcatgctcaaagaatgaagaagggcatctaggagacaaaccgaatcataatatcaatacactcaattcatatacaacatatgcatgacagaaggagatgattaatttgatctgtacctgggtggtgatgtttaaacattagtactgaataatctagccttcactcccttttttctttccttcctaccaatcatgtgaaactcacaatgagcagcaaatcaagaatagagagcaggcgctagaacagatatgtatatatgcatataatagggagaatcaatgttttagcagtagtcatgttgaaagaatgaagaacatctaggagaaaaaccgaagcacaatgtcccaatttacttgcagccgtcgtcaccataccttgccatagtttgtgccttgctgccgtcgtcgccgtactttgccatagcccatgccttccgccgtcgtggctttggtgcccaagctgctgctcttgctctccccatcctggcaccgaggggaggtgagcggcatggagaacgggtgaggaagacagtggagagtagcgttgtactgccgaagagggccacgaccggatccacctggaaagtcgagggaatcggacttgggatcgcatcaggcatagaggatagggtgagggagagagaggctaacgtggagatgagatgaaagaggagaagaggagtgcagtggctcgcatccctctcgtccgggcaaccgacaatccaccagcgaggaggccgctgttgccggatctggaagccccgcctcctcactggtggacatgacggactcgcttgccggcgcgggagcgcgggcacagtaacaatggctggatgagggcacgagggaggcgaaggacgacgaagctacgacagcgacggcgcgcgcgaggaatgaagagaagagggcatggcggcgcgcgtgcgagaggaagcggcgacggcggtacggcgagatagctggagtaggttgaggccttgagggagtggaagaggagggagttgcggcagtgacgacgcacgggagtgaaggaggagggcgaggctgcggcgcgattggaggaggagggcgaggcggctagggtttgttcaggcttgcgaaatccacaccgtccgttagagatccgacgatcccacgggtgcggaagggccagcacagtgaggaacgtggacggccagatcgaccctacctcgagatcggacggcggatattagcggggaccggtgcgtaattaaccaaaagtgtagggttttttttgcaaaaattgctgatgtgctggtagtcttccaccgatcgcacggcttttaagtaaacctatattccatccttccataacgttcaatttaaaactcaatctctcaatctacaaattaagaatgtattctttcttataccttatagtttgaatttaaacatccgtgtttatatttattttgtagtttgcatttaaatttacatgtttatattttaatccatagttgtatcgagaagtatggacttactggttattagtagaactagatggtgatggtgctgcatgcaaagcgcaaagctttcggtacgtagctgacgactacacgagaacgaattatttggaggcgtcgaacagataaatattagtactatactagaaaatctcgcgccaaatggcgcgccccatttagcatgttcttatgcatgaacgtagaaatttcaaaagatttggtaggattaggccaacttcattaaattgttcatttaacatgtagatttattcaattaaagatcatcatattttaatctatttatggcatagctattaaaaagtgtttttttagtaagtctacattatttaaaatgtacttattttaaaaatattaattatcaagctttatcttcagctaaataagccatggtctttaaaaataagctttataaaatggactgtttttttatgtaagtctacattatttaaaatgtacttattttaaaaatattaattatcgagctttatattcagctaaataagccatggtctttaaaaataagctttacaaaatggacatttttaaataacgaccgtactcgttttttatatatataaaaaagaccaaatcgaatttatgataaaagaacatcttttcctcgttcaaaatataagcattcaaagtttatatcagaatatagcaattgagtatccagtcccttgtctcaaccaatcataatatttcttatttaatttttccacttacccacctagtttatatttggttaatatttcttatttaatttttccacttactcacctagtttatatttggttttcaactaagaactatgtaataatggctatagcttctattgaagtaaacactggattttatccattatctaaaaactcacctagtttattaatacctatacccaatttcaaataatgttttagaccttacaatgacggggcatttctcacgaaagtagaactaacaaaaaaaaaattctactccaaccctgaaaactttatttctagcaattctcatgcaaatttgtagtggcaagaaatatcctttgcgtccttatcaatttttaaattttaattaaatatgtatatataccttgatttgattggctaacagatgttcttataagggagtacgtaacatatcttttagtatttgattgttttttttacttgacacagcctattaaattttaatcgctctttattttgcaaaagttctataaatattgtataatactagcaaaatacccgtgcgttgcaccgggtaatgatatggtgactgaaatttgatttgaactatttatatgaagaaaatgaattgtaatttaatgaaatataaaattttctgcaatattaattacactcttttaaattatagcaaaagtgatattgcgttgcaacgaatagaaaaaacagataaagttgaattaaaacatattaaattctaattaaatgaaatataaattttctgaaatatttaggtattttttaagtaggtaggtatacaattaaattaatttataagtaaagtaagtgtaagaaataaaatgttgtggttggatttaacttttattaaattttctatattaattacactcattgaaattttattggaatttacctagcttaattgctaattttgataatacaaatatcatttcagcatttattgaaataaaaatctaaataaaaatccttttttctctatgggcctttttcaacccattttcttcttcagcccgcaagagaccaaagtctacttaatacccccatactcctttcatttagtggaccgcgggcccacgtgcggcccaaaccctcaatcgatctcagccgttagttttgatggacggctcagatcagattaaaattgatgaaaccctaaccctaaccctccccccagccgagccgagccggccgcctcttcctcccccgccccgacgccgcctctccccctccctctccccaccggcgtctctccccctccccccagccggccgactcccccgccaccggcgccgtccctcccttctcgccggcacggcgcggcgatggtggggtgcggcggtgtgtggcggcgccgccgccttcccccaaggcgagcggcggcggcggcgccctcctccccgcgagcggcggcggcggccactctctccacttcttcccctttctctttgtgtggcggcgggagggccggcgacgccctcccctccgctagatcggggggaggggatgtgcggcggagcgggagaggcggcggcctggacgacgtggagacaggcgtcggcgccggccgcctttttttttttttgcaattttattccatggctattgctaaccgaatcggattgtgtatggacgaaaattagatgtgacgaccggaaaaacacgaatatttatattagttatagattttacatgttaaatataactatatcttttgcatccatcaaaacatcacaaaaaagctgattccggctatcggttggcaaaagtgaagcacttattaactctctttattattttattggtcgatacttatcaactgcattagtgcaaagagataggtaaagtaatgggttttctagagattctgatgtgcaagggacatcacaagagcttatatctgattgacacgtggcaaaaattttggtgatgtttagctaatttttcaggctgccacgtggcccaataacattctagaatcatgaccctgatataggtagaagagattgctgataaagaaaaatggcattttgcaacacatttaacttgttcagtgttcaagctaacgttgaacctggtacaagtacaacatgctggcacgcatgtccacatctcgcgggtcgagggttcaagccgaatacaacacacggcatgttgcatttcatcataatttaaagtacttagcatcactttgaacaaggttttggtggtcacatgtatattcgcaaccttcttaaggtgtccgcaaaagacgtgcgcagcataatactttgcagacctatggttatcaacagcaacatgccactaggcacctgcacgaagaaaaacaagaaaatattactgtaaatttaaacaagtgaaattctattgaggtaccctaacaacttgacattacgatatattgctcaattaataatataggcgtcacagcaatgatttccacatgttcagtaactgtagactgaaacaaaactcacgacatacctttttgctcatgtctttagcaccttcgtgagcattctgaatgcagcagtactgtaccttctcgattcatgagtaccactcagttgctgaattcttcccaagaaactaatattatggttcagactcgaagactcgttactcactactgaattacggaactgtggacgatgaagcattgacttctcatctgctgctccattggatacagacagctgggcccctaatactgatctccagtaggggaaaaaatttctctttatgaatgttggatcccatcctttaagtgccttttttctcgcagcctgtcccataattaaatgaagattaagctttgtgaaacccaaaaaaaaattgttaaattccagcttgatcaaccaaagagcacttgattcacaatattttcatatatcctgggagaggtgttttacttgagcaacagaataaattgttttctggttatattcaagtgatgtcaacaaactgaattgcttaagcaaaagcagctgaaccagtaagcagctgcacggcagaaacataacaaccagaagcataacagacatctatcagcttgatttattaccatccaactacaaaaggactaatcatactgagttcgttcattctaacatcttaactaggtcatgatcaaatatcaaaacaaaccattgcacaccaaaaatctatcgcaagaccacacacacacagaaagggaggcagatcaaatctaaacacaatacttaaagcaaaacattctatctcattggagaaaatcaattattttcagattgttgacagtactataatctagaatgacgcactgctgtaaaaactgccgagcaaccttttaccaggatagagaagagaccagacatagagtttctacttttctagaatcccaactacaagataatgatctggcaggcactctggcttatatgcaccagccagtaagatggcaactaatagcaaacctaacttggaacctaagtaactgatcattagctgctgctgctccctgcatgctttggtacatcatactccccacgcattgttgcacaataattaacaaggtgaatataagaaatcatcattggtaacatcggaatacaattacctttttttctgcagcaggcagagaagtagacatttgtgcaacagccttggttacatctatatgaccataaaaaatttaataaaggctctttctgagaaattcagaaacagttacttaaataataaacacacacctttgtgaactatgtcgctgtaagaaatcttgttatatggacagcttcaataacaagtttaagaaataattaataaacaacaaacatttgcatagaaaaaaaatattatattgaatacaaaaagagcagtacaggatcatggtgtcaatgtattcttcgttagggcaaaacccgaattccttaagaatatatgaaacacgcgcaaggacctccacattgggcacctgaatgacattagaaccattatatcagatagtgaaaaatgtcagaaaatgaaacataaaaatagcatatattgataatatggtcatgtagtacaatgatatcattggtggcaaagaaatgacaaaaaagaatggtttagataaaatttaattataacagatgaactgaaagaaggtagaacagtttgcaatcacatcgaatacaagcttacttggtaaaataaagtgcatatattgataatatgatcatgtagtacaatgatatcattggtggcaaagaaatgacaaaaaagaatggtttagagaaaaattaattataacagatgaactgaaagaaggtagaacagtttgcaatcacatcgaatacaagtttacttggtaaaataaagtacatatacaaacatattcaaaattacgtaactatttctcttcgtttgccttaactatattcaggattaggaaccaaataatacgactagatggttcaaaaggtacaaggcatgaacattagtcattcaaatttcaacttggtaactgtaattgactataaattataaaaaggtaaaagtctattttttggcatttgaaatttccttctagtccatttttcaccctgaactttgaactgggcattatacatggtgcattaggcagatgaactaccttgggtggtgttctgttgctgttttagtgtaatttttttcaatattttttaatgtaatgtgtttgggcctaggctcatagtgctttcttgaagcatatgccctgaactaagaaactagttgttttttaccccaaatttataaactggacaaataacacactaaatcatatttcatggtggacaacatgatagtggttctcgctaacatgaacttcatcaggtcagtttcattgttgtggacctaatcatgcgacatatatactaccaaaatatgcaaaatatgagcctgcactagggaaaatcaccactaataccaatatatttttttaacttttccaacttgtttgtgtcaacaatatcaaaatatcctcagggaaatgtagtcagcttaagacaataacaaaacctattggttgccacttgccgccatgaaccaataattaatacgcaaagtatttcgttttttgccgttatgtgctgtgcatcaagaaaattcacaaggagataatagcacacaagtattcatgaaacatgcaaaagttgcaatggccaacatcactaaaatatatcaaaaagtgtacacagttactctgtatatgcctgcgctgtggttacaactacgattaaagaggcttgttgcatctctaataaaattgatataaattgacatttttatacaaagatttcgtatacatttctgtaaataatgttaaatcagttttggttacttgaagcaaaagcaaaaaacaactcacataatatccaatacaaagttgaattgaaatgcaataatatttccacgctataaatcactaacacaaaaggttgatacaaatgcatgaaaattttattactatttgagatttgtttcctaaatcatctccacaactcagatattagaatgcatatcagcatctgacaggaataccctaaagttgttcttttggaagggtgagccttcagaacctggctcccctaagaagctagtagttgttatgaactggtgagtaatgctataacaggacaaattgtaggggatatggtactagagttgggcgagggaggaaatttcacagggattacttgacaaatggcatgccccaaataatagtaccaatcaccagctagagtctgctacaggctctattcagatactatctcttacaatagataagacgacaaaaggttctgacattaatgcaccaaaacagtttttttgttatctttcttttcttttcttttatctatcctcatgcaacaaagtttccttttataaacgctaagagtcgatgttaagccgttgttaagcttaacaacgatgtttcaccctcctttcccctctcatccatgtcagcaaactttaccttgttaccaatgctaagagcctgctattagttgctgttgtatacatgccctaattcaaacctatctcaaatcaaccagaggatagtaatctaatttaatatgtttcaaggatagccatgactactcaaaataacccaaggtacagaagctcctgcaacatgctaaggtcacatccctaacaatagagggctccagcttctcaaagcagcggaggctcttacgtcataactcataagcttcattagacagcttactcttgtgatggttttaacacaatgttgaagatagataaaactggactgaccgttcactttatgctggatatgctaccctatagtacaagtaacggaaagtggccacggaaatcaacaaatcactagcattcttgttaggatcagggcatggagccatggaattacctattaaaatattaataccaatatgaaaaaatatacagtgagtaagagatcatatggtgctgtgattttacaccattaaaaaaacaatagtacctctgaatgtgcttgaatgtagttatccaaaacctcaccagcttgcgaaattatagtgacaatcagacatttacatttcaaaagtgctcttctttcctccagcagcttctgcccctctgcagtatcacctttatcacacactagggaatcatagtcctcatatatacgttgcgcgataatgtcgaacccatcaggtttgccctcacggatatgttttcgggctgccaggagtaaaactgcggattctacaagcttgtcattcttcatgtaattccagagctcatcagctagattatctgttttttcagcaagcagtctaactgtatccaaaaaaaccttctgcacaataaaaagaaggcaaaggaatgaaatctaaatgactttgagcatttgtatgcaagcaagcagtgaaaaattacttcctattacatctcgtttccactaattgtagcaaggatgaactaggatcaagcggaataaaacctactactccctccgtcccataatataacaacctaggaccggacgagacatttcatagtacaacgaatctggacatgcacatccggtcctagattgctatattataggacggagggagcatttagctatttcctctgttacaaattactagctttatccaaagtcaaatatttatatccttgaccatcaatttctataaattcgtgtgttttaacaacatgcaaattatatattatgaaagtatttctcatggtgaatataaaaacataaatcttaatgtgttaaactatatgaccagaaatagacggtcagatacagatagctcacttaggacaaaactacaatgactagaaaaggagggagtaatggaattttgaactgctgacttcttgcctctaaatttgaaataagaaaatgcctcagcacatgtgaaaatttttaaaagatgacaaacaggaacacattttgttgtcatgctgaaaagatgatactttggaaagagcgttaagtgaaacaaaccatctcaggtagacacagcagatgaatgagcttgtagatataatcctcatgatactgcacaggagatagattgtcctccagatatttatgcaagcaagtatttccaactgcaacatggagcgggagtagtccgggaatgccagcatcattgactgtgtgtaaattggctgaagcaccatggcagaacagcaacttgatcatgtcaacagagaaccgttcagcagctccatggagtggaaaaattccatatgggttaatgcagtttggattggcatgcatacaactgagctgaggtgccttgccctccaatacagttttcgcacatcgcaaggcattatgcctgacaatgcaggataaggtttctgaggtgatgttacacttaaatgccatggccgcagtacattccgcgaacaaacggaagaagcaccggacactgtcctttctcaagacggagtccaagcggggagatatatcaaagaaggcatcccgcaccacctaaattggtccgttcacaatcagaagagatgaaaagaaatcagctttcaatgtaataaagcaaaacataaagtctcattgacgtgcaccttcatgacaaaacatttcatttcagcaaagggcaccctttttttttgagaaaatggaagagacaacttacgtaaactaaaatgctgcaggattaaaaaaggacaaacgtaacaggatgatctagcaactgaattctgtacatgaagactagagagcaacctgaggggtagggtctgggatgattatatcatttgttaaggacttggccatccaagcatattttattttaacccactggaagagagaatgtcagcagccaggtaccaatggaagacagaaacctagaggaagagtgcagatgggctaccatacctcaccagccttatccaaatcagacttcttgataactagaaaagggcgggacgggtccatgttatctacggttgctccatcttctttacctttaccaacactttctcctatgaaagcatctggcagaaaatgatcgggaattttcaccactatatgtttgtctgtaacaaggaggattaatctctagttacattcaaaagaatatcataactttgtactgctagtaatataatataatatacaattggtaaacaatgatccttaagactgtgaagacaaaataaatgatatttaggacatggacacgatctacaaagtggcacttaggctagcaatatctatggaaacatgatatttcaagtaaagatgattaaatattatgagtattttccgtgatgaatatactgtcaatatgtgcagtactttatatactgatggtcaaagttaaaatagtttgactggtaggaaccataccctgcaacaacatatattttgaatcaaacggcacatgcatcactgaaattgatgaattcattgaatttccacccccacagctggatataataatattgggtgtaatagtatagaaacctatacttcattcttaaagaaggcagtggtggtggcagtgaatctgccaccacaccaactctgttgtatagattatttcttttaccaactactccttcgtgttttaatattacaaaatagtccttctacataatctacaagcacgaaactgtccccaaaacctcgcaattaatttgttccaagcaatattagcacgcgtttaatttattttaatccatcgcaaatcacagatatttatctagtatatgtgaaatgaacggtaaaaagaagtttttcacatactagttgaacgagtgatgtgtaaaacttatggaaatcgaacaaatcaaaaaataagattgatgtttctgttcaacaaaacaatacctcctgctgtactagatacgccgaaaagaaatcaaatcggtaattaggctctgaatgtttcagaagagatcagaattatagatttgacatttcgacatgaggaacagctccagatctgagggcgattcgcaaataattttggagatggaagagatatacaccgtagaagactccgagttgaagaagaagaagaagaatgggaaagaagtactgaaataacaaaaattggttgatgtaactattaccgagggccgattccgacatgacctccttgctatgataaagattggggctttcctggatgagtagaaccagatctccagatgagatgaagggctggcttataaaatagtggtgggatgtaggaaagggggcggtggagagttcgccggaggcgatggcggtggaatgagcacctagggtttctttatgggaagatatttgtgatggggaactggggatggtggacaaggaagaaaaggatatgatcaagggctcgaggcccggcctgagtgcctgacatgttgcgggctgtaattaagcgcctggccaggccgagaaggcccaaatgaacttctttcttttctttttcatttttttttaaaaagtccactttaggctatgaactatgtagttttatttgagtcccttaaccataaaatctgatataaaactcccttaattattaaaactagttggatgacccgcacaactacacggctatcatcaatttaaaattatctatttttacacataattttatttaaaattattattcatgctattctaataattttatagtttttaaaagcaacgccagtcgctaccctttactcctttgtcacatttttatttgcttacttgatctatcactacttctattcatcctcttgagaactttaaaagttaggccttatagtttttagagtaccttatcttattgggtttcgtttacataatttttagaagtatcgtcaaacatcgccaatttactactctacggccatctgttgccacctcaatttattgtcatcgggattttaaaaatcaaatataattattatttgtgttcctttttactttctataagtctcgccaatcgttagtggcttcaccaatatactcctctacagcaaacccgctgcttccccttcttattgccattgacattttaaacataaaatatgattatcattgtggtttttttaattatccataagtcccgccaaccgtcgtgaccatgctgcttaacggcatacctatcgtcactcctcttaatcatcattgtgattctatttggggttttgtttatagtttttgttgatatcccatcaaccaccaacactctactgctttacatgcctattgcttctcccctttttaatgctatttgtcatcgttgttttctagatggactttttttaaaaaaaattgcatatttttcattccgataatttttattcataaattatattcaaacttcaattcttataatttttttcctatttttgaaaattattttatttgttatttcgaactttagttaatctcatcatgtgttctagattgcctcttaattcaattgtctttatttttttcttacaaatttaagttatttataaattttattcaagttgagctcttatttttttctttttctatcttttgaatttattttattttttattttgaattttaattaatctcgtattgtgttctatatagactattctcttaatatttttttcttttttatttctaatttcaatggtttagttaagataaaatacactgtgggatttcgcttggatatatatatttttttagaaaatcatgagctgtagttaggagtccgatcgtctcaagttagcatgcgagttttttaaacatatttcttgcatgattctttcggtattaccaaaagcgaacgatcttaaaaaccgactcaaatacggatatgtatttccaaaagcaaacaaacttaaaaaccgactcatacacggatgacttaccaaaataccgataaaaacatggtcgttaacaaatttttataatagtagagaagagatatagattaatacaaaaaaaaaaccgactcaaacacggatgacgaaccgtggaaacatcttcaattttttataaccgactcaaacacagatgaccgactgtggaaacatcttcaatttttataatagtagatatttggattgtttcaatattctattcctacttgaaatctctttttattttttttctaattctggattttatttgttttttattttgaattttaattaatatcgtactggtttcttgtatggactcttctttcaatattgcttattttaaatttcaaactttagttatttttaaattgtatttctatacgaaatattcttttattttaattctaatttaggattttattttatttttattctgaattttaattaatctcgtattgggttcttatatggactcttctttcaatattccttatttttaattctgaatttcagttatttttaaattgtatttctacttgggctctttttttttctagtttctaattttattttatttttatttaaaattttattaatctcgtattgtgttcttatatggactcttctttcaatattgcttatttttaatttcgaatttcagctattttaaattgtatttctacttggactcttttttctttttctccgattaatgtgggaatttcttgcccccacagcgatacaattgtattcctaattgaaatcttatttttctttttctaattttggaattttttttttcaaattttaattaatatcgtattgtgttcttttaatatttttattttttattttcaatttcagttgtttcaaatttgtattcctacttgaactctcttttattttttctatttttggatattattttattttttattctgaattttaattattctcgtattgagttcttatgtggattcttctttcaatattgcttatttttaatttcgaattttagctaattttaaattgtattcctacttgaactcttttttttttgctaatttcggattttatttttatttttattcttaattttaatttatctcgtattgggttcttatatgtaaacttctttctatattgcttatttttaattccgaatttcatctatttttaaattgtatttctacttggactctgctttttttttctaattttggattttattttatttttattttgaattttgattaatctcgtactgggttcttatatgaaaacttatttcaatattacttatttttaattccgaattccagctatttttagattgtatttctacttggactctccttttatttttttttctttttctccgattaatgtgggaatttctagcccccacagcgaacgtggtgcctcctttcaaaactgttttaataatataatcgatagatagatatatagatatactagtgcaaatcgagtctcccagcggtttagttaggtggttttgtcccacgtgacaatggtaaatcgtaccatgaaaattgaaagaatttcgttgaatctacctcccatcctttctccttttcttcttcctcattcctctatctccccatctctctccaccgtgcacatgtgggtcagcgggcaatggagacaccgatctggtcggagagcaccctcagccatcgccgtcgcaagtggcaagaagagacggcgtcaccattttcctcgcttctcgttgtcatgttgattacgctatccttcacttagatccagaatacgccgatggctgaggactctggagcactgtctgtaattacattggtgatgttcttttcttctgaaaataaagatgaagatgaagaatacgttttttacataaaacaaggtggtattaacgtatgattgattgagttttaattattacaaacttgaaaaatagattaatatgatattttagagcaactttcatatataaatttttcgcatgaaacgtaccgttagcaatttgaaaagcgtgccacgaaaatcttaatcttcatccaacttttattggagaaaagaacgggaccattgcccccattcttgtgaacctcatcatgctccagaacttcttctccggcgcgctaccaaccgatagtgacgggtgattggctggtttggtggtcgtcggagatgtctcccttgattgttcgttcttggatgggtggtagtagtcgggttaagcaaaaaaaaaaattcaaagattgaattaaggtagttgttatcacaacttctttttgcttggatggatgctattgtcggtgtctccatttgttgcttggatggtgttgatggtccttaagtaccaaattcgatttatcaattcatgcataataacaattgaaagaatataaaatagaataccaaacttagaggtagtagtcttggtgaatatttatatataggtaaatatatggacaaaaatcatccgccatgtgaccaaatacacctccggacaatcggacacgattacacggtttggaggccccacgtgtcaatcaaaaccacctaaaattgagtccagccaaagtacaacatgttgggggcccaccaggcagcctcccaaccgaatgagtggccggtaggtgagccagaagttcggtcgaactgcctttgcatcccctcgccatctgccaacacgtggagcaagatactggagtcctaattgcggttatgtgtggtttctgagcttaaccaacccacaaaccatcattacaactaggggtggcaacggggagggtcggggctgggttggacgggaacgtgtcacaccctgatccggcaccgccgtacaacggcacctgacaggagcgtgtcgtaggaaaaacggcgcgaaccgcttcctacgaaaccgcgatcacagtaccagtcctaggacatagcgctggtacccacggtgacaaatatgaatcattgcaatccttaaaataaatagaggatttatttaccttgacttaggttgcagctcgggacaacccgagaatacaaccgacgacacggacgaggcaaacaccaacaacagcagcagcagtggaaccaacggtctaacacccaacaccacaggcaatactagggaactaggacgaaaccttaatcttcacttcacttcaacttcaccttcagagctggcagaactatatatatatagagcaagggtgagtacttatgtactcagcaagccagggggacttaggtggttaattcaagcttcaaggaaaggctgttattttagcaatcaaatttgttttcaagttttcaacaatctaagtgtgtgctttccacaaacagagcgagacaagtctcagcttggttgggggcgagacgtaaccaaatttgatttgcaagatttacacaactcccagagttggcctcaaagttggtttcccaaaccaaaccaattttccaatctttcagagttttggttgtctccaaacaaccagtcattctcagggactccctgtcccgctgtctccctgacatccgcttgctttatccaaacatcaggtttcccaaacctcaacatcttttcacaaagctgggtaaaacaaaaactacgctaaggaatcacctcacatccgcccatgaccgtgggcatggctgttcgaacagtttgttaacctctgcagagggggtacactttacctacatgacgttactagccttggtcacctagcccgtgcggatcaaacacgtctggtgacttggggctttcacgacaaggcatttccaaagccaacacagggttgccatatgccaacgagaggggtcccggaccaacaacaggttaggtcccagaccatactgtgccatgaagcccaggggtcctccccgacaccaccccggcgaatccacttgtctcttggcatcaaggcttccctggcctagcttgttactcagccaggggtgtcccattccacccatgtggtcgcacttgttatatgctcggatgtaattccaaaggaatcggtccttaaatgtgaccgcacaagcattccgcccaggaatggccttgtgtcgcgagttttatttttaaaactcattttctttcacaaggcaccgacccaggcgtcgggttttccaatcctttcgtaaaccaagttttacccaagatgtttctcagattttaagttttaaaggcgaccgtcgatactcgcacagagtgtatgaataccgaggcgcaaccaggtggttacaagggagcatgatatagcaattaacaatggaaggatcaaatgcaacaagttaggtaggcccaccaatctgcctcgcaggcggggcaaacatattaagtgcaatcctatcaatgaataatattttacaatcaatataattaagttcaaatataggctcaagatgttcaaaggtggcttgccttgctcagggtcttcacgaatcttcgagaaatccgcttgacgaaaaatatccggtaaccgcaactaggcgcatacaatcaaaaatctaaacaaggaccaaatagaaaaggatcctatttagactaaaataatagtgccattagatagatcacaattttacggaattactggaagtggaacgaggtcaatcggagtcacggatcgggagatatgaatttttggaggctttaaatgaatgtctggacaaggaaatgatttatttgattctttggagcggggaaaacaatttgtggaaattttgtggacaagggaggatatgtacttatccgatgggaataagagaaattatttacgaaggttgtttgaattttctgggaggaaggaaaatatttgtggaacaacggaaaaaggatttattgaattttctggattaaagaaatgatttattgaatttgtggaaaagaatattctttttagtca

SEQ ID NO: 9617 - DNA, 64788 bp, Oryza sativa
  unsure (1)..(64788): unsure at all n locations
cgctccctctcctcctccccatcccattctcggcgacgccggcgccctcggttagggcgggggagccggcggcatcgatggcggcggcagcattggcgggcgtcgtggctgcatcgccggcggcatcagcgagtgcggcgacgacatcggcgggcgccgcagcgacatcagcggtggcatcagagggcgttgcggcggcatcagcgagtgcggcggtggcgaccgtggggacggcggtggcgggcctcgggcaaggcagcgatgacgacggtggtggcggtgacatcgacgacgggcctcgggcaaggcagcgacgacggcggcggcggtgttaacggcggctaggttagggtttgcgggttgattttgttttttttttttggtttcggtttttaattttcccgtgcgtgcggcgcccgcacgcgaaaatcgattttcacgtgcgggtgtgtcacccgcacgaaaaaatcgggattttcacagacgcacacttccagacgggtagaagctccgcacgtaaaaatcaattccacctgcacgcaaaaatcattcatgtagtagtatatatactacctccgttttttaatagatgacgtcgttgactttttctcacatgtttgaccattcgtcttattcaaaaaatttacgtaattataatttattttgttatgaattgttttatcactcatagtattttatgtgtgatttatatcttatacatttacataaaatttttgaacaagacgaatggtcaaacatgtgagaaaaggtcaacggcgtcatttattaaaaaacggaggtagtatatacttacctttaggagtgaccgcaagtactccaaggaccagtgccagtgttaaaatggaagcaacaccatgctttgccatctttgtttgcaggcacaggtaggctttggatgcgccgcctctctcgatctagatacgacgcctctctcctctctagggttagcctctctcctttttagagttagccagttagtgatttagggacttgggttgggctgggaacttggggaggaattatggactatttggatgggcctttttaacttcagaaattccgacaaactttccggaatttttccgaccgattctgagttccgacggaaactgctattatcatattcaattccgtttccgaaaaattatttccgtttccgattccgtttctgagaaattccgaaaaaattccgaccggctgattccgtttccgaaaataggtccggaatctggaaaaattccaaaccattttcacccctacaggtagctatagctagttgttaaggagcctgctgaccactttgcatgccgatgcaatgtaacaaaagcattcacccctatttatacaagttcctagcacgtctatatttagcatgtattttttttcaaaaaatatatattttaataaatgacgttgacttttgaaataacgttggactgttcgcattatttaaataattagtgtgaatatgctaaagtataagtcatgcttaaatattctttaatgataaaatatgtcacaaacaaaataaacaatatttctataatttattttgaacagaacgaatgattaaacatcagatcaaagtcaatagtattatctattagaaaacagatgaagtttgtagcatgcagtttgcgaggtaatggtatataggtgattgctccggtccacattaccaggctgtcacgaaactttctttttattttgtatctatttcacaccaagtttgtttattgataaacttatagttccattctggtttggaactgataattttatactctatctgtttcatattataagtcgtttgactttttccttatcaaatttctttaagtttgattaagtttatagaaaaatatactagcattttcaatacaaaacaaatatattaccaaatatatttattgttaaatttaatgaaactaatttggtgttgtagatgttgctatttttttctataaagttggtcaaacctaaagaagtttgactaacaaaaaaaaaagtcaaatgacttataatacgaaatagggagagtatttcaaaggagtcttaaagggctctttgaaacgcaagattgaaaaaaaaagagaaatagaaataacttagtattttgttaagtgtaaaatatagattgcaaaatagattaaaaaataggaatgattgtttgagtagaccacacaaaaacccacgagtcggatgatagatattcaaatgaaatttctatgaggttgaagtttttttgctaacttttcttcaatatctttatagtatttttatttcataggaatttcaaataaaatggtgggagttaatgctttgttcaaaggcctttcttggaaattttcatgtaggatcaagatcctccaatatttcaatgtttgtcgtacaaatcaaagaggggataaatttcttatgtttttcctcttgaattgcaaggaaaagttcctatgtttctcgtttgctcattcatacgagtcaaagacatcaacactcaacagtgttatttcctataagattaaaattccttttttttccctttgcttttccttcattttaaagaggccctatagtatgtctggtaattggtgaagttataaaggaataagggataaaaatggctatgctccctttcaaacgcaggaatagtaaaatataggaatataaaaaaatggaatctccgtagggatgtatatgaaaacagaactacaaaacacagaaacaaagatatgtttggaacgctgaaaaacaaaacacaaaaatacaaaaaaaaaaaggaatgcggatgtacgtacaacaaatgagtagaaaagcacatgaagaagaatagatagttgggtgtttggaatacatgatttttctctctcccgctcctctcacttttcagcataggaagagaaaacattggttttccccgttttgggtgcaaactgcaaaggtacagattacaggaaacttctcctatattctgccttcctctgttccttagttccaaacgagcgattgacgtgaaccgttatcacgtgattatcacgtgcagtacctttttagtttttaaaactatagtatacgtcgcgataatcgtcaaatctggttgtgttcttaggtcctccgacacgaaaaacggagcaatggattaatacgtgattaattaattattagcttaaaatacttttaaaaatggaataatatgatttttaaaagcaacttttctatagaaattttttacaaaacacacaccgtttaacagtttgaaaagccttgggaacttggacttaagaacacaatataaaatggtttggtaaaccctgttaaccgctggattttttttttcttttgtttttcgaggatattggaacttcaacaggctgtgttcgtaatcaagggatgggaacaaatccctcacgtacggaaaacggaacggtccattaacgcgtgattaattaagtattagttatttttttcaaaaatggattaatttgatttttttaagcaactttcgtatacaatttttttaaaaaaatcacaccgtttagtagtttgaaaagcgtgcgcgcgaaaaaagagagtgattgggaacatgggattgcaaatacagcctggcgtgtatacgaagtctacgaagtacatctgcacgtgctgtttgtgctaattagctcagacaattacctcgtggctagtatcatatgggttttcataatgttaaccttgaggtttgcgtacgccacttgaacgaattcaccggtatctgggaaggatattattattcttgttagtcgcgacactcaccagcttcgattctcagcacctctccctagctagtcacgtttgtcacgaactcgcaatttagtattatccacggaccatgggccgttggatgaagcttctactgtccagatcgtctgaacgggtggcggtgtgctggtgttgggctgattaagggcatatttggtaaagctcaaactcttaaatctagctataggagttggagcaagcaaaacccagcttcaccttctttttttttcatttcatgacttggatctaaaataaagttatgaagcaggctaaacacgggcgtggctaattggcgcgcgcggctggcagcccctttttccctttttttttgcgattttttctctttttttcgctttcttatttttttccaaatattttcagtttcctttgtgccttttttctaattttttttaatctttagcagacttgttttcaaatgtttgagttgaaagtatttaaattttaagttgaaaattttcaaattgaaatttttcaatctcgagtcgagagttttcaaaactcgagttgaaagttttttaaatcttaaacttaaaaattttcaaatctcgagttgaaagttttcaaatctgagttgtaagtttttaaaatttgtcttataaatttaaatctcgagttgaaattttaaaagtttaagttgaaagtttctaaaatttgacttcaaagtttaaatcttaagtcaagagtttttaaatccaactcgaaagttttcaatcagttagtaaaaaaatctccagaaaaaatctactcttaatttcgtaattatccttagctaacttacttagtacgtcttaactcccccggaacgcacgctggcggcgcgtgcgcgagctagcttttccgggctacacctagctccaccttttttaaaattttgtgagagcgctccactcagttctgctatcattttacgtaaaactcttaggctgcactaaacaggtcctaacttcatgggtgattgctaattcgttttcaaatcttaacttataaattttcaaatctgaattcgaaaatttcaaatctcgagttaaaagtttttaaatccgaatagaaagttttcaaatcttggttgaaaaatttcaaacctgtgttgaaagttttcaaatctgagttgaaagttttcaagtttgagatgaaaacttgaaagttttcaaattttgacttaaaaaatttaaattttgagttaaaagttttcaaatctgggtttaaaattttcaaaatttgactttagatatatattttttcttttcaatttgttagtaaaaaaatctcgcggaaaaaagaaaaatcttatctactaccgtcattatctcaaactgttgttatctaagactaatactagtctaaccgccttatcccaacaaagcgctgcgtatgcgccaactagcgatccccaacttcgtgagcctgggctttaattcggtgtatgatgtgagccctgtctaatataatttgggcatgttcaggccgttcgatcaaatttcagcggtccagattgcttcgcgcggaggaaaacgtacatcctgatggaacgagagattgggaaaaaaaattaacgaagagagatggaaaaatgaaaaggacaaaaagaaaatataccgccaaaactccgaccccatttttttggcggggaaaacggcgatcctcattcggtgctcgtctgatctcaatgcagtatgtgtgtcatatggcaatcacaagcttggtgctcaagtttatatagattttgcattgttcttcatagagatatatgtttgtagttagctaagctacattgtcagataagattacttgagcatcacgtacggttgtgacatgaacatcatgattcattcaggtacaaaaaactgtctcaacgatgcatcaagtatcaaacatgtaaaagactgaaggaatctgccgtcgcaaggaatcatgcaaaagactgaagttcagtgagttgtccacctttatcttcatatgttttagttagctaagctacattgtcagataagattacttgagcatcacgtacggttgtgacatgaacatcatgattcaggtacaaaaaaaactgtctcaacgatgcatcaaagtatcaaacatgtaaaagaccgaaggaatctgccgtcgcaaggaatcatgcaaaagactgaagttcagtgagttgtccaccttatcttcacacctgcccttcccctntcctattcaccgcgtgggggcgccccccccccccccccccccttctctagatcctcatcctcccgaggtttctttggcacaactggttttgctttgactgcaaagaaataattttcattaaatttacatagcaagtcacaaaaaaactacgagaaaagctgaaaaaaagataaacaaacttactgttgcgaaaactcagaagtgtcttagcacttatttcttcgattccagcatctcttagcagcttaatctcagatgtcttcaccaaaacaactgtacagagatttttttggtggatatattcatccagtgccattgtcccaccaaacataaccaccaatcttttggtctctttctcttcagtgttaggagagtcatactccacaattgtgacactgccttctttactcatccaacacgtgtaaaacttttgagagagatccttaattaacttttgataatgaggagatttgtcttcaaagttgtcaaccacaataagcaagcgatgggctgaaaaagttttcataatttcaagaaaggaagcaatttcagcttcttcatcatcagccttaacccaacagattgaatcctcggattcatctgattccttaatttcatttgttgtgttagaaatttgttttccaccatcacgtttgtctggaaaaaaaagaagcaagagtacaaattaaatctgaaacaagcacaatctgaaacaacaatgttataacagaggaaaaaaagaaaacatgacaaattaaatacataaggagagacagagtaagcagcaaatgtgactataacccaaacaatgtaggatgtaaaaaactgaagtactgaaccactgatctgataattatcttatgaatgttctaactaccgaacattgaggcaatgcatttatacaaatcgcgctttacttgccagactaaaaatcaatctggaacgtgtcaaagggccaagacacttctggtgaatatgtgcatgtgagctgtaagtgttgactactacaatactcatctcatctgaaaccgagtattcttatgactccccagttaagatgcctatatatggagcattcatatctgtaggggctggagtgctggacggactaagagtctacagagcggcgtgtacaaaatagaaaaatataactgccaaaagagtaaaaaacacgagtttttggaactggcgcacccacaaaaacaaggcctttttgctagttagtcgcccgcattagtgtcgagcagagcaatttttattttatcatcagacaaggcaaaaaggaaacagagcataccaaaaattgaaaaatgcaagagtacaaattatatctgaaacacgcataatctgaaacaacatgttataacagggcaaaaaaaaggaaacagagcataccaaaaattgttcgcagatagctgctccatgatatcctgaactgcggctgactaagaattggaactgttttttccagtatactgagtaccaatctattccttgatatcagggggtcatcaaccatactaaccagacgatctgggatcagcagtagttctctgggtttccagaccggggtcaaggactcaaagcgacctctcaaactcctcagaaacagaaacagcgacctgttgggatcatcaacctttatctcatattcaccattcagcacattataacagaccttgttgtcggtccaaacagtccctcttaacaagttaaggtcaataagcttgaagaggagagctatgactgccaaagcctctgcctccacaacactcttgcaaggtacctcatggaaaacctcagcccagacaagtttaccctctttaaagatgacaaaggcaagttttgcctttccagtttgctcacagaatgaagcatcacactcccccttgaaagaatcactgcatgattcagcatcactcgagtggaggaaggtctgaacggtcccgtagcactttgtccaatcatctacaacaatgaccctatgtttaaagatgtgctcaaggaacaaagtccattcatcttccagcaggatttccttttctgtggtcacatctagggcactgaggtagcgtggagacttcttcaacaggttatttgttctttggttgaaagttttcatggatttatcaagaggctggtgaatgagtaaacactttgaaacaagtagtggacgaatgctgtcctcaaacacttgcttcaacgcagggatagcaaaggtcttacttgcatcacgaatgcctggaagtactttccgcagtaagtccgcagtgtccccagggccaacactcaactgttccaaagaaagattgggccttgtgctgaatccacgctcgccgggatctcgaaaaacacctgcatgcatacaaaagaacacataaaaacaccatcaccaaacagccaaaacgagcatgaaaataacagcacaaatcagcagcaggggataatctacgagttctaacaatagatcagcagcagaggataattcacgagatcaaacaataaaagatcagtagcagggataatctacaagatcaaacaacagatcagcagcagggtagataatccacaagaacaaatctaccaggggataatctacaagttctaacaatagatcagcagcagaggataattcacaagatcaaacaataatagatcagtagcaggggataatctctacaagatcaaacaacagctcagcagcaggggaataatccacaagaacaaatctaccggggggtaatctccaagatcgaacaatagagtaaaaaaaaaggactgctttgacattgcccccacctcccccagtctccacgccaagcaaatctaccagatctcaaacagactagagaaacaaatccccagtttccacgcccagtacaaatcagaggatttttttaatatatataaacgagagaaacaaattcgccaaattaatggaccatcacacaaattaatagggtttaatctgcaagatcaactaggaaacaaatccgagccaacccaacttaatagaccatcacatagatcaataaggttttaatctacaagatcagctagggaaacaaaacttagaccatccctagagacgagtggattgacctgagttatcctcggcttgcttgctgccgccggcggtcagcgcacggcacagcgtccatctccggcggccgaaccgaaaaagactcgacatctccgcagatctccctcccaattcctcgtcgccccttcctggccgcctcgtccaccagaagggagacggggaaaaggggtttccagagagtagaagggaaggggaaagtgaagcgagtgtacgacgaccaatagagatttttttttgccccttgttgagaaagtgcgaatagagactactgggccttcatgttcgactttgggagtttggggatccgcaaggcaggcaggaagttgaaggcttggtttgacatagctgaaacttttggcccggtttgagatagctgatttttttttggctcgacatactgtataatctatttttttcactgattgctagtatttgactgtacaaatgaaggaattaactaattcttattatggataatccaatttttatgataaatctagaaactcgggtaaagtgcatcaacaaataatcgcacagtcgtaaaaatgtttgaacaaaaccgtaggtattatatcaaagttatactactgtttcataaaaccacataattaaccaatttaatccaaatctaacatgtagggggggaggggagggggtggtttacgagttatttcatccaccatacttcactgagcatgtaaaagtttcatcccacatgtcagatcatataaaactatcatctcacgtcatatttaagtagaatttgtcaattgtgcgattttatgaaacactaccgtaatactcgtaatactcgtggttatgtgtcacatgccaaaacccatatggttttgtattacttagaccataatacctatggttacgtgcaatttactttacaaaagtgacagtacgcaatccgaactctagattgggatcatggatttatattactaacatgtactccatcgatcatggagtaagtattttggttccatcgatccaatttaatggagccatcaaagaaaagcaaacaaaacaaaatcgccctcgacatcacagccagcaaggaggggcaaaaatgacttgttaaggagtggcactactacaaaaacgatttttctgtacgggacccatgatttttgcaaacggaccgtaagttgtcgcgtctggaaaaatcgagcggcattttcgcatacggctctttaaggcgcccatatggaaaaatcgttttttttccatgtgggctcttaagaggtctgtatgtaaaaataagctcgtttttgcatgcgaatcacttaagagcccgcatggaaaaatgagttagcatttttacatgcggaccacttaagatacccgcaaacaaaaaaaatcacccctttttttcatctccctccactctcttttccctcccaccacttcaaattatttctatctcctctctctctctctattttagtctcccctctctctctctcttcctatcctcttctatctctcgttttcttatgtcctccccgctctctctccaagagcgggcagcgacgaccgggagcaggacgggtggcaatggcgtcggcgggcggcggatttggcggcgccaccctcaggaaggttggatccaccgccctagggagcggctgctgcgacggcgggcgcgcagcgggggcggcggatcaggcgagtaggcggcggcaccaccaccatcccctcctcactgtcgccgttggcggcggccggctccgtccccccccctccccgccgccgacaaggcggtggcggcaacggcgacagctcagcctcctccagcctagatctgttggcaggagcggttggcggcgacgcgtgggcgacttccacgacgacgctggtggtcgatgggagcaacggcggcgggcctcctcccgcctggatccgacggcgggaacgggcagcggtgggagcaaacggtgggagcagcgggatcccacgacgccgacgcgtggccggcatgattttttttgcgatttttagatttttatttttgcatgcggcccatgtaagcaaccgcatgctgttgccctagccgcatgcaaagatcgcgattttcgcagacctttctgtgcatgcggctggcccaaccgcatgcaaaaatgcttttcgcccttttgcagaaaaaccctttcgtagtagtgtgggtaaggcattttaagtaagttggtggtaaaaatcaccttttacaagtagtaggttctttttttaacaaaatattataacttcaagagtttttatattttaataaaacaaagggagtaatagtaaactataaaaaatataaatcactcatatatggccagctagacggcatgtagactgcatctataggtgcacctcatagggagtgctattactactgcctccatctcaaaataagtttattttagactacaatactcctactttataaaatcccaatgcaactattactcgctttatctactttcaatacaattattcactactttcgcatattccaatgcaatgattactttaaagatgaacttattttcagacaatttgaaggagcattgggaacttattttaggacaaattgaagatgttagtattatttattatggtccaagttacacaaaaccacataagttttagcactactgtttcataacaccaaataattgaccaatttaacccagatctgacacgtgggggattcatgagttctttcatccaccatatgaccatacttatgtgagcatatcagagtttcgtcccacatgtcagatcatataaaacatgtcatattttagtagaaattgtatattgtggcactagagctagagctcaacaaaacagtttcaactccacctaaaattggagacctaaaattggagtggagctgggtggagctctcacaaaatgatctagagaggtggagctgggtttaggtagctccacaactcccctctagacccaactcctaaagttaaatttaggagttagagctctactaagcaggctctatatataggtgcacctcatcgggagtactcccttcgtcccaaaaaaactcaacctaggttgattctttttgggacggacggagtattaatctacctagaaactggacgtttgcaggcgtacgggttccccatgggacgcaagatgtaaaaatcatcagcagaaacaatcaaacagtggagaaaagaacacagcaaaaacagagcaaatttatttaagagaagtagggatatattactgcctctgtaccatggtgtagtgctcatcaatacgagttgtaataccaatcataggcttcctccgtacacatttgcagggggagatcagtcgtcttttttgcacacaatgaactgaatctcctccatctcctatctgcaaaattttggcatcatgggtttcctttcctccgcaaataagtgacgccttgcccaccggcccctgcggcatgatagaagattcaaagtggtgtcacgtaatgggggatcaattaattttgatgcatgacagtacaatttaaacttagtttaactcttcacgtgaatggaagtggtcgttggttacccatccacagatataacatctctatttacatatttatgcggtggaactcagatagataaaattgttcagcatcgtaaaaacaacaaatcaaattgatacccgtctatgagcgagcgcaccgtaccatagtatggaattgtctgctgtaggacagcccacgaaaaatacaaggtttgatttgcaattatcacagcaaggaatgtgatactaagcccttatcacttttacatgttactagttgtataaaaaagcacccaacccgtgtggcatagatgcatagtagtacgtgcacacaatgcatcgcaatgctaatgcccttaaacagcaaaaacaagacgttccacctaatgaattttaaagccttagattgcgagctaaatgaaagaaatagtgataaaaatacactacaattagggccttaggcctgaaacattttggtctcacacaaaacattcaaattcaatttggtgaaatatcaacacatctgcagtgaatcaaaaatatctacacatctgcaatgaatcgaagacaaaataatgaaacaacattaaaatacttggtacaacatttcaatccaacaaaagaaacatcaaaaatgcattgactgaaacactggaaatttcacaaaatcaatgctggctaggtctggcttcttcctcctctccgttagttggatcaggcttccttcgacaacctcaagtgctgcaacgcgatgacccggtgatacgtacttcaacttccttagccacgatgggctgccccacgcctcctctttgccgctgctgcgggcgtcctctccatcgccatcttcggtggcggtgctacgcactactagaaaaaacatttttactgacggcctaaaaacatttgcacaggcgcgccagcaggtaaaggccagtgaaaatccttactttccacaagcggtcagaatactgtttgcgaaaattgaaaccaatgcgcggtgggtagttaggagcggtgggctgtgggtggtggggcaatgggatttatttttttttacgagcggtgctctaccgccacacttaagaggtccgcctaaaaaatagtgttattttttatgacgtacctcctaagtttccgctagcgaaaatcggttttcgctggcggctcatgagcgagaatcctcccatatgtttttactagcgtttgtttcattaatccgccggcaaaaataaaagggtgtcgtcatgaaaaatcgtttttttaagtagtgacggggacgctgcgccctcgtcctcacatcaaagccttggtgagagagagaaagagtaaagtagaggagagaaaacgagcaggaagataagttagagagatgagtgagatacgggagagagaaatgagtgaatgaatagctatgtggggcgcctgtttttgtcccccagattggacgccccatatggagcgtattcacaatccaattactgggtcaatacagtgcaatacagtgcaacacatgtactacaggagtagtagacatagcacaagagaagtaattcgtttaattaccttcatcttgttgaatctcgcgtacaaactaaggtacgtcacatcaaacggtaacatcatcacgcggtctgcaaaaaaaaaaaaattacgattaatgtaaagtaaagcatgtaaaacatactgctaaaagcgcactggctgtgtatgtaaaccaggggaaatataggttacaagtaaaaataggataatgataataataatccacagaccacagctcaatcaatccagccgaccaaccaatcagactgattgttgccatgcttggagtagtacttataataatgttgaatatgaatcggcaaatccatcggtccaactgagcaaccaaatgaaagcaaaaaaataaaaccgccgggcgagaagaaatagtagtagtattaaacactaacgatctgatactagggctgtgtttagtttcaaaatttttctttaaaatctcaactttttcgatcacatcaaaactttcctacacacatagacttacaactttcccgtcacatcgttccaatttcaaccaaactttcaattttgacgtgaactaaacacagcctagcagctagggtttgcaactagactgcatctgtaggtgcaccacatctggatcttgaaacgatgagaaatcatcaacacacccaatcaatcaaacaccagagaagaaatgaaagcagagcaaataggctactagtagtacttcactaatcatatgttggacttcatccgtactctgttgcaggaagggagaccccgtcctttttttcctcaaacagatatcctcctctctgcgaaattttggcttcgtaaggattccattcctatctctgcgaaattttggctccataaagattcctttcctccgcgcacacgcagcctgcagcaggagagaaaagattcatcagagatgacaacgaagtgggatggagtagggttgagaacgcgttggggaaagcagagctgactgctagggttgtagtacaacgtgtgcagtcttccacacccaccccgccggcccctttctcaagatctgatctgatctgacgatgtgaaatgtcaatcctacccatacctctatgcgaaattcctattgtagacataccccgggcgggttatccactaatctctaataattaaaacaatcgttgttgtttagggattaccaaattaagacgcatgcattgtttaggtactacagcagcgcaactactatactcatttgcatccaatataagatccttggtgttggtgatgggggtcgaaaaaactttaacagatgttaagaaaagaagaaggcacaggctgtgtttggaacggctggttcccatctctccacctcgtttttcacgcgcacgcttttcaaactgttaaacggtttgtttttttacaaatttaccactactccgaattgttattaaaaaactgccactagaaaattgcaaaaatgccattagtactatcattccagtgatatccttgcaatattaaaaaaaccagtggaaaatttacaaatgccctaaaaagtttctatatgaaagttatttaaaaaacatattgatctatattttttaaaaaattagctaatacttaattaatcacgcgctaatagattgttccgttttcgcgcgcgtacatgctgggaaccgattgttgcgacacatagacacagattaattgatatcaaaccagagacgtgtacgtacctcgatatcaaatgtagagttaaaccagttgtgagaactgggaatctcgctcggcgacagcccactaaaaaaccccaccaaccattgacggattgggcagcagctgctgattaagtatggcctcgtttagttcccaaatatttttcccaaaaataccggggctgcttggttggcggcttaggtggtgtttagatccagggacttaactttagtccctatctttagacactaatttagagtattaaatatagactacttacaaaactaattacataaataaaagctaattcacgagacaaattttttaagcctaattaatttataattagagaatgtttactgtagcatcacataggctaatcatggattaattaggctcattagattcgtctcgcaaattagtccaagattatggatgggttttattaatagtctacgtttaatatttataattaattttcaaacatccgatgtgatagggacttaaaagttttagtcccatctaaacagggcattagaatgccacgccacgtcgtggctcgccacaggtcctgtggcggacattttgttcgcctcagaaaatactgtagcgcggcgaaaatactgtagctatggcattcaatggctgggatccaaacacaccttcatatcgaatctttggacatatgcatggagtattaaatatagatttagaaaaaactaattgcacggttaggagaaaatcgcgagacaaatctttttagcctaatttgtccacgattagccatgagtgctacagtaacccacatgcgctaatgacagattaattagactcaaaagattcatctcgcagtttccaggcaagttatgaaattagtttttcattcgtgtctgaaaacaccttccgacatccggtcaaacatccgatgtaatagccaaaaattttcttttcgcgaactaaaaaggccctatgttgctgtcttcttcgtctccatcccacgcctcgcccatctactcgtactactccctatgtttcaggttacaagacgttttaactttggtcaaagtcaaactacattaaatttgatttaagtctatagaaaaaagtagtaatattttcaatttaagacaaatttattatcaatatatattcaactattgatttgatgaaaataatttagtattataaatattattatatttatctataaactcagttaaactttaaacagtttgaatttgactaaagtcaaaacgtcttataacctgaaacggagggagtatcaaatagtggatgatgatttgtctcactatttgttgtatgtacaaatgtgttccttcaagagtactactccctatgtcccatattaagcgtacttgtgggttttagtgtccaacgtttgaccgtctttcttatttaattttttttataatttgtatttttattgttattagatgataagatataaatagtaatttatgtgtgacttaatttttaaaacttttttataaattttttaaataagatggacggttagatattggataaaaaagttatggttgtatttaaaatagggagtacgctgctgcgtgaaagaagtaggaggtgtgaatctttatcttcggcctgactacaagtatttatatatggatgcatggatattgatgatgcatatccattccgtcaatattcacgcgaactaatggaaataaatttatcataatatatagtaaattatcccaagattgagccagtagtaaaaaaactaatacaacactctacttaggtggtgttcttttcttctgaagatgaagatggagatgaagattaagtttttttacgtaaaatgaggtggtattgatatatgagtgattgagttttaattattataaacttaaaaaatagattaatatgatattttagagcaactttcatatagaaagttctcgcatgaaacgtaccgtttagcagtttaaaaagcgtgtgccataaaaatcttaattttcatccaactccctggccggctcttggttcttgagcaaactcctccactgggatgctcatagatgaagaaaagagactttaggcaagtggttctggtagctcagttggttacagcaaaggttaatctttagaataaaatccagttagaaaagaaaatccaataagagttaagctgccatgagcatcatggcatagataggtcaaagggaaggaggcaagcccgacgggaccttggcctggtttagatggcaaaaatttttgttttggatgtcacattggatatatggacatatatttgaaggattaaacgttgtctaataataaaataaattacagattccgtcaggaaactgtgagacaaatttattatgcctaattaatttgtcattaacaaatatttactgtagcaccatattgtcaaatcatggtgcacttaggcttaaaagatttgtctcacaatttacacgtaaactatgtaattgatttttttatccacatttaatactccatgcatatttaatactttatgtatgtgtctaaacattcgatagaataggtgaaaagcttttgttttgaaaactaagcccaaaattagaagtttgaagaaattggaacgatgtgatggaaaagttgaaagtttatgggtgcaggaaagttcaatgtgatggaaaagttagaagtttgaagaaaaaaattggaatataaggagggcatatttggatgctatactaagtttgccactattcatcatactttttacgccacacttgtctaagttgtggcttaaaaaaaatgagccacgccttagctagcaagattggattgtgccatactttaatgagttgatgacatgtgggaccctaatagatgagaaagaatcttgctacaagcgtggctatgaaccaaataatatgctaatttagtcaaacttgtctaatataaagtgtggtaatctttgacaaattttgatagcaaaccaaataaccctttagtgcatgcatcatggaaacggtgcaaattaacgcagccccgcgcatacgatcggttggccgcgctgcatgcgggattgattaatttttttcttgaaattccatttgatttgatgttgattgatcgagaatgaaacgtggattatttaaataggagtactactagtagtgcgatcaaaatctgaaacccatcacagcatcacatcacatcgatcgatggaggggctgaaacccatgcacgcacgataatttataatttaatcgattccggccaggtgacccgcccagtatatattccccaccacaaaggttcggttgttggtttggtagcttgtactcccaccgttttctgtattactcgaaacttttaactttaactaatttatagttaaacctttttaagctttattaagttcattagaaaaattagcaacaactataacactaaattaatttcatcaaatataatatcaaatttatttatatagtatgttttttatttgaaaatgttgctacatttttttataaatttggtgaaacttatgtaatataaaacggatgggtggtattgtgctttgtcatcgatccatacatacatgcaaacgagggacttggtccaattcatttctaaaagaaaaatctcagcaaattttggtagtgttaattttgtggggtatcatacttaagagcaggtacaatagcaggctataagccagctgcaaacatattttaagcagataaatgaggagagagaaggtcaacaggctacagatttgtagccagctatagcacggactccaatacacaatgtgtgtatgacatgtgggaccagatattaatagtgtagtatgtaactattgtataaatgagctattagattggctataatgaattaaagctagtaattgacaatactatacttgctcaaagaaagatactgtgtactttttccccatagaaatttcttccggcccattagggataggctcgtgcagtgatgtcggccgccaagcgattgccggctgctgcgggcataggtgtatgctttacagatcgatgccaattgagctcacgtccaaggttctgcaccgttcaacaagcgtcgaactggtacttggcatggctaagttgcatggtcaaataacgttagtgttctcttccaatttgcttccatcgtctcgcatttgaaacctaaataaatggtaaactttatatttctgccactttgcctcatggctaaatgtcagtacaaagtaagatcgtcaaataaaaataattctaaaacaatggttggtcaccctcacgcaaaaggacaattattgtaactagtaatatgcccgtgctaaacgctacggtgcaattatattaatctttaataaaactctaaaatgaatttggatgtcgcaaatagaaaaaatatatagagtacaagaaaatatattttccacatgtcacgaattcggatgttcccataggccaattccattcatttttctaaattggcttatgtacttaaaaatattgatttttctattcatcacacatggcacacgctggtcgcagcccattaaggatagcatgagggcatgaatttataaacccaaataccagtttgatatgacacaaatgtcaaagtaatagtttgacaatgtttcacaatataagaattgttggttatctcgttaacgtcttctttcaatatttatatgaaacgactactaaaattagtcgatgacggaaatgcatatttagagagacacaagtgcatatttaatcatcttattaatcacacaatattccacctgaatggtgatggcgtgttgtacaaaacaagaggacattggtgagtaacattccagttagcaatttactattttctaaaataagtttctgaattaattttgatcacgcgaacctacatttgctcaccaatcatgaacgttttgatacatgatattctgttcttccctgtaggttcgacttctttctttggctttgccaaaatccttgttgtttgtcaagttgccttgacagacccctcgacaatgtgacaatgtgccaaaatcaatacgttatttacagagtaatttgacggatgaacaataagtaatgttaatgtaaaaacttcataatttacagtcccactccaaaaagccggtagccacttcccatcgtttctaaatgatcaaatacctatcaaacgtttcgtctcggttgatgtgattccttcaaaataagaaattatgcttgtttccagcaagaagtaattgagctctatagctattggacattcccctgtgtcatctatagttgcttccataaagtcatttttatacaatgaatcataaaatatttttatctatctcctaaagaatcataacttcctaaagactgacaatcaaagtgcatcatgtatatttttgttttctcaaccatttgtgttttacataaaaaattaagctcagtagtcttttagttagaactgtcactccaagcacggctcgatgatgggcggctccagaaacggctcaaagcgcgacgtgaaggggttcgccgccgatctggatacaagaaacaaattttctcaaatgaaattgtaataaacctaaaagaattcgaaatcggatgagcacacttaaggctaggggtaggcgttcggtcataaccgagacttcggtccggttagttcggtctttaaaaatttcggttatctagaattgacacccgaagttgctctcacaagaatcaagaccgacagttcggttagccgaaacttcggtctcggtcttcggttagaccgtacagaccgaacaggcatacagcatgtggcaattggcagccaacacaacaatcagaacatgattgcaaaacaaatcaagcgttgaaggattcaggctcatacgtacagtacattacaagattgtatggactccattgtgctgctctgttcgtcaccttcacttcaatggccccctcctcctccggctcggcgattggccccctcgctatctcagcagtcgggtagacagcagcacggctgcacggcagcaggcggtgcgcgccgcgacgggcgcacggaggggcagcacgccggcagcagcgcgcgggcagtgccgcggcggcgcggcaacgccgacgagccgacgagattggggtagtgggtaggccgagcggcggcgcttgaggcgaagcgacgagattctggttcgggacttaggtttgttgacttgtttgtctcgtggagaaatacactaatcactaatgggcttgccagccacccaacccatgagcccaacaccaacacatgcctatgtttgcctatgtttaactctgtttttatacagatcggttacatcgagtacccgagaagaatgaccgaactacccaaaaaaacttcggtcttctcgagtgcatgaccgaactaccgaccgatgaccgaaacttcgggtagttcgggttcggttttggtttgtttgggttcggtcttcggtctcggttttttctgcccacccctacttaagatcctggtctatcatttttacaaaaagtgtagaacacgatgggtcaaaattatgctcagaatagaaggattaaacactacatttccaatcgtatgcataattattgaaattatctcgaaaataatccttgtaccaatattgactcaattgttcgccatctgtacgtaaatagagcaggaaagcacatggttaccaattgctttcgagcatgagcaaattaatttcagcaactaatctctatgtactattctttaagatcctcagaaaataagggaataaaatcgatcagctttggctcactgcttgagtctgatacagttgatctttaaaaaaactaaagtacctgggcggcattgactgggattcacggcgagtcaaggacgtcggtcaccggcagaggggacaatggaggcgacgtccaacaggttagccttacttccaaagtattttttttgcaacgtggatataattggatttattttaaaattataccgctgaatgtgattttttttctgtgaagcttatatttattttttgttatttttagacattccaaacatgctcatagttggtgaaaaagggaagcaaacagttgaagattattaccagttgaagatgtaatccagaggtcaaacctgagaattaaaaaaatgaaaattaatatagcagtacaccactctaaagattattagtcaggttatattttacacaaatttccggtcaattgatgtgtataatgcatgaaattcaaaatatagccaaaggcgctttccagtttccaacagtaatgacaaattttgatgagtaaatgaaaataaggcagcagtgtacatataagcccatagaactttattttaatggcttgtgcattacatatcgtaatttgaatttgaactgtaatggttgaaggaaagtgatcgtgcaatgattaccgtgttcgcggagaggttgagactggagagggttccagtggtggcgtcgtcgatctggaggacatggagaaaaaatcataaacccttgacatcagttgttatgcatatggatatataattggcatcatggtttttcggtaattaagctcaactaaagggtagtaatatataaatcaacatgcagagcatgaatcaaacagtcttgatttatgaacatttccattgaatcgcacaaatagatagataatgcaattatctgaacctgaaatcgaaatcccatttacaactacaaattagttaaaaaattgatgcaaatatagaaataatatcccttaacaacaataatggactaaaatcatgtctatcaagagcatcagttatagccccacaccagtacaaattgagttatatttttcttgagctttatggtgtgcacaaggtacatcccccatgtttgtcaagtgcattagctgtgttccaatttctccaaacaacccttaaaaagattactacttccccattcctattcacgtcttacccaataggccaataccaaaacattccatgacagcagaaacttattcgcattcattcacaaatcacaaattggcaacctaagcttgagctacaagcctatgagcaatgaggcatgagctatcaaccactgaccttcaattgccaatcggagtcgccgagtaggagcctcggatgtagggatgtggaggcgtgtagtgacagagcaagagtaatcaggaattttagttgggtagtcctacttcagaggttcaaatcacatatcaaaattttggaacactgcaaatctcatacaagtacaagttagttaagatgtgattaaaatatatcaataatatcttataacatcaataatgaaaaaagcttcggtctccctgcagcaagggggaacttctgaaaaggaattaattgtacggagaagagatcacaacagatataatttatatgaaagttgaaaccatcctggagcaacaaattgtactgcttgttattccttgacaggtttgtgcagaacaatacacagcaagaggcgattccaaacagcctcaagaacagaacgggcttgcaactgtaaccatggtttgcgcatacacatgcttaaaaaacatttcatatttttagagaatggatcatatttaaatatgtttattaaaatctgtagaaatttcactgggagtaatatctcactgttgtacacaaaataaaccacccccatacagaaaatggagatgctgcataaatgtttggcaaacttgtgttagagcaacatagcagcataaaatccatgtgcttctacgctgttaccatcaaatttacaacacttaagatcactcatatttactttgatttttctttaataaagcaattcttagttgttaaagaccataagcttagcaaatggcaaagaaatgaattttgtttgcagagagccttttttaatacctttttcatgcaagcattactgaagctgtgagggagagtatgcagtacctgattatgcagtccctcctcttttctgaattttgtgggggagattccttgccaagcaagcctatcaaggagcaaaagaaggaaaaaaaattagcaagattaagagttggaaatgaccaacatctccgtaacgatcagcagactaattagatcagcataaaaggcaaaacatttgatatagtcactccatatagaagtcctctagggtgagaagatataatttgcagtgtatcccctgattcggtttgatcattccgtaaaaaagaaaaatacctgtagcctttaaatgcgatgaaacaatgtaattttctggtgtaatagaattaataactgatatacttgaccaaataagttccaattccgttatttcatctacatggttcagaaacgaacttaataaaactctctaaaaaatgtactgataccaccaagctagtagctgaactacttaataaaactctctacaatcgctaacatccagatgacaaccacctactggacaatatttgcaaaaactgaattatgctagtccagatcaaatcatccagtcatatatggaatatggatattatttatttaactaaaagttgctgtcacagggaacataattgagagctgcacgttgagccaagaacacgataaaaaaaacacaccatttttatgcaaacaggcagatagatagaggtcaaaacatcaaattattagttaaggaattaaattaagctaaggcaaatcctgctccaattcggcatgtctacctgatcgataatcgatcgttttgttctcgagcatttcccatcgagagctcacaaatccgtctccagtttacggtgcggcgattgcgccgacgatcgatggatcccaggctgctcagtgccgcgcgccgcggtgaccgcgagtggctggaggccgttcttggcggcgccgcaccggcgccggaccaaggcgccgttgacgtcgcggggccgccggacccgggacaacaagcgcccgctcagccgccaccgccatcaccctccgcggcggcgctgctcctggacgtggcgacgacgccgcggggggactccgcactgcacgtcgtggcgggctccggcgacagcgacgacttcctgcgctgcgcgcgcatgatctaccacggcgccgagggtctcctgggtcacaccaacgcgacaggcggtcgcgcggatgaggaggaggcgcggcgattgcggaagagaaggaggtgcgggagaggatgcgttgcggcagagaggtagatgcgggagaggatgcggagggaggtgggggacacgcgcgctgatataggacgttggatccaaattcttcagatgggtttcgaccgttggacgtgtgacatgatgaatgagtaaaaccatttgtttaagaaaaaagtctaaatacccccctaaactttagataaaagtccgtctagcaccctgaactttaaaaccagatatccaacccctaaactttgtaaaaccgttcatattacccactatggtggttttgtatagtggtttttatctaattcgtatataaattggatgagtttgatcacgtgacatacacatcagacatatatattaaaatctccacttaaatctttctttttaccactttttagctctcttacaaacaagtaccaacataataatagcacggtatcgctgtataagtataaattgatgacttacaactgatgatatgtaaatatgttatatatgttatttaaagttattcgtttaagcttttaaaatatgcaaaaccaccatccaaaaccaccttagggggtaatataaacggttttgcaaagtttagggggttgaatgtccggttttaatgtttagggtgctagatggacttccatccaaagtttaggggggtatttggactttttcctttgtttaactatagggtagaagatgaaagggctataataacgtatcacataggttcgtttatagtttatgagttacgctacacaatgcatacatttgattgcagaaagtatagtgcatacagaactcatttccaaagaatataactgtttcaacgttcaccaatgaccagacgatcatagcatgagacttcatgcatgaccatcaagtttgagcactgtcaaggtatatatcctttagttttgccacgttggacacagtctcgcatctcctacaagtttcaaccacaggatgtcagtcatacaccgccattgatatattgttgaactagcaagtacataactgtcgggtcccgaaactaatgattcgaaaaccgatatatttaactgtatcaagccctgaatcagtagattgatacaggttcaacaatctgaattttcattacatacatttgaatgtctctaaaggagattttattataacataatagggtatttacaagtttgtggctaactattattacaacagaagctatagaatgactcaactctaatgttttgctatagacttaaaccatctaactacgctagacttggaagttaagttggaatgaaactaacttatatgattaaactcccggctttggcaaaatctccaaaatgactctaaaaaggtggggttgaagcaagggtgagtacaatgtactcagcaagctattatattcaatattgaatgcatgaaatgataatatcttagtagagctagatttacttgcagaaagctgagaataaagagggacaaagcctatgatgtttgaaatgcatcaatatttaataaaatcttcaattaggtttctaaccaaataccatatgagtcccgatactcaagtccatgagcacggctattcgaatagttttaagaatattcatactgcagtagatgtacgctttacccgcagtccataacttgccaataatcattagcttagtcatggcccagtattaggttactaacaatagtggtacctgttccgtgaactctagtcctcatgcgctctgaacgtaacgttatcagcagcgagagtagttctggcgttctcgaggtttttcgagagaactagttgagagaccccccgtcatctcaatcaggttttcacaattcacacatacagctcgcgagataatcaagatatttacctgcgcctcggtaaatattacaatcgccctgctcggcgtaagtttgcctcctgcgcgagaacttaaataagaaccactacacagagataccacattattaattgacataataactaggtatatccccattctagaagctgcggtcatacctgttcgtttgacataagtatttggtgaacaattatatcgactgagacagcactagccacccggaaatcaaccaattcctacgtactgtcccaatctaagtttattatatttttatgcaatctaactaggcaaggctaagcaaaagctagcatatttggtttactatgttcaggttatgcatttgaaatcatgtatgactaatgcatagaataatagaggcatggaatatgggacaattatgctcaaaggagagggataataacttgccttgctccaacgtaaataaatccaatatagcagcctgattatcgattcttgaaataccataggttgccatccaaaagataatagactctacttgaaggaagagccaaattcaataaaagccataaaatagaaagagaacgataaatggttaaaagggctatggtttagggtatattctatttcctttatagggtatagggattattgggctagtatttgctggcggtaggtttaggtagtataaggtttagttgtttgctagtcgttgctagagttgggtagcataacgacttgatttggtatcttctttagccggtgtcaacagacagcatgacggttagaggaataggaagtttagcggtgtggaagtgttactccgacaaccgtgagtggcggcggagtggttaggatcacacagagctcaagaactaactgtgcggcgtgctgtaaaggtcgagggaatagtgagctccgaccgttgtacgcatcgaggcgtggagtgtcgagagcagcacttcgaccttgggtttgggttttgccgggctttacaaccaacggttcaacgtcggggatagtaaaccgcgaacgtccccatggaaggcgtaaagtttcaaccggcggctttttagtggcttaaggggtagtttgggataaaagaaaatatttgaaagacaaatataaattcaaacggtatttgaataaattcaaataaaatagcaaattgggtttcaaaatgaagcatttgaatttagatgaatttatgtccaagttttactggaatcggatctactgtttaggagatatgggcttctaaagaatatgatttgaattaaatctagaaatgtgaaaatgcactgtgtataggcccacctgtcagcctttctttttccttttcttcttcttcttttcgttctcttctttctgtctcacagtgagccgagagaagagagaggagaggccgagtggggcggcggtgctccagtggctgggaggctgcgacgtcggcggaggtttgtgttcccgagcgacgcgcacccggggagggtggtggatggaagagaggaagagggatgtggccggaacggcgagtagaagagcttatctccggtggtaaagagaggggtggtggtggcttgattcaaggggaaaaggaaggggagatgggcaaaatggattcgccggagtggagccagcatagtggcgcaagggaagaggaaggggaactacgaaggaggagatcggccgacggcggcgacggccggacatggatggagggagagagagagaaaagagcttcaagctcgatgtgaggaaatgatggggtattgccggctatttataggcgacgaagggcggtggtcaatggcggtttgcagaggggaagagggagttggccttggtggcggcgacgtgagaaggaaggcgacggcgccggctgtggcctgtgattggtcggcgacggcggcgcatacacgcggcggtcgcgggagggttggctggcggcagtggagtgcacggcacagcgacggcttgccgtggttggcaaggcagcggcggcggcaagcgtacgcgcgccacgcgcgcccatggcgccggcggcagcgcccacagaaaggaaaaaatacaccgaaggtccctcaacttgtcaccgagttacaaaatcatcgccttttgttttctccccttcagcggcctcgagcctcctttgcgccccctttctcatagaagccgctgggttgaccccgagagccgctgggttgacccagagggccgaattcaatggtagagaaggctttaataagaatttagccatgagtgacctttttaagtattgcaaaagaagaggcctgctgatagagctgggcgggaagcgatactagttatcaggttagagaaaggcctggcccgtaagctggcccccctttaaaagccattccttattaataaggatttgttacgcgcgatatgccgacgacttactactggaaatcgtgggtgccgtatttcttctcatagaaatacaaaaacgtatcacccacttcctacaatccggcccgaacctttgggtgagctccgcagaatcaacaaccatagctacacggagtacggtagaattcctcggtacggtcattcgggaagttcccccgaggacgactcccatacaattcctgcgagagctggagaagcgtctacgggtaaagcaccgtatctagaggtgagtgagcctacgaccaccaattgcttatcggcaaatattatgcggcgcatgaggggcgagcgagggggcatgccaagtcagcaaaaagctacagtcctacagtgcccggggtggttgttttgcgagaaagccctccggtttgttcgtaattccgagtaggtcccttccgaacagtgcccctgaggcgatattgtgcgtaaggacccttctaaaatcctgatattacatgcgcaggaggggagaaacgcgaaataggagctctatgtaaaaatataaagtctaggggctttttcgcaaaagtgccgcgcactgacccccttgccgcctctcctcgactcctcctccctctcgtcctgcgccatcatgacgccgccgcgtccgcctcccctcgcgccgccgccgccgccgcgttgacctccgccacggtggccgcatccagccctagccgccgccgccctcacgcactctcctccctctcgtctctccctctccctctccctctccccttcacgccgccgctgcctccgcctcgcgccgtcgccatcgtcgtccccgccgcctccgccttcccctcgctttctcccccaactctatcccccttcgcctcaccccctttgctttctccctcgacaggatgacagccgccggctgcggcgtcgcctcgctcgcctgaggtggaccgcgcatcgtctcctccgccagcaaaccactgctcttttccccctctcctttagctctcaccgcttccatttcttcctccccatcagtgttgtatcagccctgtggtctcgccccaaaccctagcgctgtcatggcggcggggtcgagcccccttgtgccaggtgccgagaaggcgctggggtagcggcctgtctcgtcccaatccgtagtgcggccatggccggcggggatgagctcctgtgcaccggtggcgtacaaggtgttggggcggcagtgagaggaaggtccagcttggaggagctgaggagggagacgcggtcacggaccggtggcggtggccttggatccaagcaacagtggcgcacatcgcaagcagaggagatgttggagccagggtcgagagggacggcaggggcattgcggaggtcggcgcgatggatttcggccacggcacggcgacaacgacggtgagctaatgccacatcgcatgttcctaacttggctatttgtttcaatctttcatggatgtgcagttcccagatgtatatgttgctgacaaagggatagcagcatgcgggttttcctcattatttatggattgcttcaagatcatggaaaatgtactggagaaacaagagtaagtccaggatctgttcctaattattttacctcacattattatttcctgttactttgctttggaagatcaaacatgcagtggttcaccccctatgtttcaatggcttgacagtgaccattctatttcatctggagttgcataagccttaccatggaaacgatatggccttatgttgaggcccagtattcaagtaaggtagttctatataaacacctctgcaactcaaagccaagttagtgaggcctaacaaaagggtcctcaactctattttttctattcctgcatctattttcatgtatctgtgtttgccccacattttgaggaagcgatcctgggtatactggtaagaatttgccctttcattagagggggggggggggggcatctaatgcaatgtgtggttttctccaaacctatgagactgacatatcattatttaatacaaatcatgatgccattggattttcccattcatgtgttcagatatgttgcacagacgttctccatgatatgttcagttcagcagctggaggcagagttgccactcgtggagaataactcttgtgatctttgcatacagactacctgtatgttgcttctaacaggggtatgtgcagcaccacataacacaaactcctctaaaagaaacatctttcacgtctacctgtttctgctaacaaaagcattttgtatttctctcattcacatggagagttgattggtttgtttgcaggaatttgttggcatttgaattcgaggttagacagtggggttgtgacaaaaggtgacacactcacacactttgtttcattatggactccatcaagcagtgtcatgggcctccaaaattgttcatacgtgacaagtatgatagcttaacctcttctattcatgtgtgagttaagcttgcatctactgaaaactaaagagaatgctggccttcatggatgtgatcatgcattttttcaggtatgacattaggggtgagggagcttgcttgaagagatacacagactcgtccttcaatactggttttgcatgttctaggatgctagagccaataactcaaagagtaagaagacctcttagagctatcgtaacgaaactgaaaataatagatttctttagctgattatttttgtggttgtggatgattcaatccactcagacatagaatcatacctgacctaaccttaaagatcgagtgcttggcatttcttttccatttcttctaggagattaggccgcccctgtagaatcctcagattttcagaccacctaatgcagccaacaatgtctccaagtacccccccctctctatatataatcatctcatactatccagtatcctttcgcttctattttcttcccagaaaaacaatatcttttttgtaggttggagatagatttgtctaggcaccgatgactggagtaccgacaactaagtggatctgtgtttcaaagcttcaaaccacatacgtagaatctgtacatgagaatcttcaccagatgagaacccctgctccatgaaccattcagaagtgtagatatctttcattgcctcacctgacacaaacactgtagaggacatcatgtagacactttcagtaccatgtacaacggcaagtaaaacaagtatgtgtcaatgatttttgctcatctcagcttagtgttatgagttttacatgtggaattttcagcagatgctgtagggcaaggtcttcctttagaagatttactgctcttaggtattttctagagctttaacttttagtcatttgtatcaacattacttagaaattgtatttgtatagcagctaacctgatatttcagttcatcgtcaattagtagataaatttcctaatttgtacaagctatcttctgttctaggttatagttgcgagctagattttggcattgtactgctgatttgcatgctctctaatgcaatcaagtatatacggtgctatccttcagacatatacaatgacaatacataatgattgtattgatatttcagttcgttgtcaattagtagggaaaaatgtggttatgatgttggaactactcacaaaaagaaaaaaattgtgacagtaacaatttcccctcaatggcagtgcctccgtggtgagatggatatgaatttttaatatgcccctgacaaaataattattctacatcattttcaacgtttattatactagagtacagtggtgccatcttagatatgcaatgccatcactctggatgttaaacaagaaatgaccgacgttgctcttggactttaaattactctaatgccagaatcatatgcatataactggagaacttcatcaatttcttgcagctacatagtttgcacctcagcatggaaatcttccaaacaaaaaaaaatggaagtttttaaacaaggcctagatttgtagtttatgcagacacaggaaatggcatgactaggtcactgttgcattcttattgtgagacgtagtctatgaaatgcagtatttgccattatcataggtcttcatctatttcaatgacacatgaaatttgctccatgttgatttgctcatttctaatggacaatcttatggaaacatcaaactttttgttgcacaggtcacaggcagtccttggttgtgtgcaccattctgcaggcgaataagaaaatttttagttcctaccatatgtattggggtatgccacaaaattggaatccatttaatcgaatcctaatgatactttgttagctatcactatgtaggaataatgataataataaatttcaggtttggtggctgatatggatattgagtttgagtgagaagtgcatgctttgattttgtattcagcgtttcgtttctttagttgtttactcgatcacctctgtcatcaatggactacttgtcttcatgcacctttatgccatacatgcaaatatgtagggtgtaggcctcagggataaaaatgcatttaacaatatggtgtatatgcaagcttaggcaaaattttcagctacgaacttactcctttagccttcacctaaaaattgcttactattattttcctggagttgtcctcaattttctcaacatcactcatattctagacgcgttagttacaacaaataatgtgattactgagcaggaagttcaagaatatcggcatatttgtaggaaaatgatgtcttcagtccaaactgagaaaatattatgggagtcttctcttaattgctgccccaggcagcaaggcatatggatatgccattaaccaactcaagaattgcactgtaaaatgtcaaaaactaaatggaaagtatttgtgttcttatcaaggtctttctgttgagttttaaggttcagagttatgatcccttgatggtccatttgtgttggtttggatcaacaacatgccatgggctgctgatagtatcatggcggctcttggggccaaggtaattgaattcttcgctgtaacaattgtttctccagtaatgttttgtccatatagtatactttgtatttcaaacctatcttctgaaatggggaaaaagatccatatttccacctagggaatatagtaggcatgttcatttctgatgacaaacctgtgattaggactagccattagccataagtatttactgaccagaatgtggacagaaatcctttttctatagttcttgaatttatacagatcaagaataaggatatttctatttcatcttgtagcaaggcaaactttatgatttgttcgttgtaaccactctatgaggtaagcatgatttcgttgaccgatgaagggggtaaaccctgttgtgatttgaagaaataaattggtatattgataatgctaaaagaacacttagttgtgcttgtactttgttatagggaactagattgaactaggtttatgttttgttttctggttcgttcatcactttttacaaccaaaataataactaaggttcttgctcaaattttttttttgttattctaataccagtcaatataacatctccattgttcgatatttcagttatatctattaaactacttctccgaagctaaattcaaactcagcatgtcaccctatcctatttaactggttttcttttttacagcgtgaaatatatgctattttgcccatgtaacgaagagtagttaatttggggatcactgatcagtgatcacataagcatctattttttctgctgaaaaaacaaaacaaacattttttgcgaaagcatttgctggataatctatctaattggtttatttgaaaaacaaaacttccattcatggtaaatttctatttaggaaaatgagcttatgtttcctccaaacagggactttacccaagtttttattgaaggtctttccatcaagtatacattttgaatgacaccatggtttgctagcccaactgcctttctagctgatatttgatcatgtatatcttacaattgctttacaaaaggcattattatcctctgtatccatgttataatttgaatcagtttcttctaaaacggattgagatgtttcagatttcaaaaaaagggtcctaaatcctatcatcaaaataatacttttgttggagagtgttgaatattttcagagttatttaatacgtattgcaatattatgtttttctgctatttcaatcagaattgagttgttggtgataaattttacccaaggctatcatttcattttctattctgatatttctacatagattttctttagaaatttgttcgattaatgctctttgctaccctcaaatttaatttttaatcttgtcataccaaatacatgaacatgcacctttcaagaattcggtgtattctaagccacacctctaccatgaagcagatgtcatacgaggagttttttgacctacatctggcacaatcacttaagaggtgcaaataaaaatatgctcactatatgatctttgttttctcctttctttcagcttttcagccttctcttttgattccttcaaatggatagacaaattcttcaactcttccgccttcaccatttgttcaacaattctttgagtaagatccttgttcttctcttttaaattcaagcactcttgtctgggatcctggagcaataatgacattttattatgttcctccttttttttttttatcttagaaccatgttttgtagatagcctgctcttcaagatttgtcagtaaaactttaagctgcaaaatgtcatcttcaattttcttgttgctatcaactgatactactatatcttcaaaattgagacttgctggtaccaactggagccaatttctctgtgtttctttttgtaagctcgtcaagtcctttagataagcttcgagtgtgtcatttctatcagcttattttgctttagttcacatgtgtactctaagtagcttatcacgtctttctcgttaacctgcaggtttttaaggtcatgtctgaagaaatcaagttacacattgatctcctcagtccatctcaaataacttagcttcagtttcagtgatgagtgtgtcctttagaacagttgctagctggtctctaatattggaaaggtgggactagagtcatatttttacagttgaggtacatctatatttgttcagtgtgaaaaaccatcttgcatcaaactgtttgtcatctatttccaaaactgggtctcttagacaatttaactatgtttttgtgctcatcaaaggaaagccaaggaaagcaggggcctgactcttctgaccaagttgttacatcgaccttgcaaagggtagagtgaagatctcgtcatgatctcatatcatcgtgcaaatatgtgatttcattttccatatgcatcagtgcttcattcttagagtataacggctatgtaatagttttgttctctccagattctgtaacaccactcgtacgaaattactcaccaatggctaacatataagccgtttgattcatatatattatatgtgccttcaactttattcagctttaatcttacaagaccagtagttcagcctaaaaacagcaaaataatctaattaatccatctatgtgcaggcggcgcgtcccaacctctagtctcctattaccaattgcagcagacttggactaatggaattgcttgaagtgaagaccagtgaacaaaaggctttacacaaaaagaattgttgacctctttcgggataaggcccggaagaagcagggattgaaccagggcttgttgacacagcagatatcaaaagcctatgttatctcattttcagggaccgagcaagggatgagcgccctctgatctaacgtccaaacaaacaactgcccttgttactagaaatatgaagcgtgctagcgcgcacttcctattaaccaattcaccaattttaagatttgtaaacaaagataataggagccgaagtcaatcccttaaaacactcctccccgaggggacgttatcggtcgcttcgttcccttgtttactgatctcttttcaggagataggtctaccgttgcaaactcatctgcttgtaaattcattgtgtaaaataactcgtaaattcattgtgccagaattgatcactgatcaggtgtgatcagtctcatccgtctaagagactgatccggtgcgatgagtctcatccgtgtaatattttggaattcctcttccaactcgtcccggaatgggcgttatggcaaagaacaagaagaaaaagaaagaaggaacttgtccaatagtaacaaatggtgcctccacaggttgacatctgatccaacctagtagtaagcaatccgccaaaagcaaccaaaatattccttggtgaatcggtcgaaaacttgaactacgcacatacatttctttaaaaaaaggtaaagccaagagatataaaaactggtgctattgcggctacacctggagtgagcccacaagagcttttactgtaccagttccgaatataagaaggggctcgcggattttaacaggttaggcttaatctacccaattggaaatctcttgcagtagcttttactagaaatccatttctcccacaaagctcctgtgacctaaccatctagatagaagcctcgcaaagagtatatgccgaaaatcctatgtttggagtgaccatgaacactgcttgagacccttctttcgtgagagttgtgattccgctttcatgttttggattgagctttaagtggattggaggcgggcattttcatttcaacgtagcagtagggaaagtgatttcggggggttagtacacatgggcagttgggacagttacaggtagttaagttcggtcttattcttatgggcaagtggtcctagaatctctctttccttctctaaagtatagctttatgaaactagaatatgagtaaatatagaaatagaataataagaatatcatatagccgtgtattggttttgatcccagttttatcctacatggcggctgagtcagcgtgggacccacgtggacccacatgtcagcatgccacgttatctcttctttcttcccttttcttctcttttctcttttattttcttctcttctcttgtgagggtaggcggaggcggaggcggaggcggtggcgcacgccgttcagaatgaccgcctccccgtgcgctccgtgctgcagatgctcttttccgagcacggcaagctcaaccgcctcgccgagctcagcggcggtgcctccttcggcgcgcccagcctggtattcgacctccccggcgcccgctgccctccaagcgcgaggtgctcgcccagcaccacgagctccgccgcctccgcgaggacttcgcccgcctccaggtacggtttcatcacggccatctccgccgccaccgttcatcaattcaaagctttgaggtgttcgtcattgtcttcgtcgcgacgtgcaggtccagtgcagcgcgctgcaggctcaggtggacaggctaagcatggagaggaggtggcacggtggcggtggcgggttcttcaagtggagcacgttctggttcggcggcatgagctccgacgtcgcgagggtggaggactccgagagcggcattgagcggcggacgccggcgagcgggaagaagggcaggggaggcgcacttgactagttgcagaaagaactctgcaaagctatgtatgcctcacttgagtactaactgttaggtttgtctattggattacctaggtttagatctagtcggtagaacactttggatggatgaacaacaatagatgaactaacaaagaggaagtgagagggtttagggatgtgaccggtcgatgttgaggaggaggaagtgaggccggccatcgtcgttgtcgttgtgcgcttgacgtgggcggcggcgacgatgctgcgcggcagtggcggtcgtaggcgattccggcgaggtcatggcgcgacgatggagtcttcccgtcactggctgtgcccccttgatcggttagggtttgtggggtggagtggcggtggcgacgaacctcgtgtcttgtgtcgacccgtcctccacccctctttatatggcgcagggtgacggaggcccaccagccattgggctgggcgcccccgatcagggcgcgggtcaaggcccccttgagccgttgggctcaaggagagggagatccatctaacattctcccccttgatctcactatttcttttagctttttctattccatcacaggtttacatatagagcatgtttcatcgtcacggttaattaccgctggattcgacagccactatacacatctctattcagaaacagatactttaacttttgggccctatagtccaggattcataaggcttcccttaaacacatgcatgctacatgttccttgaacatgttgggaggtaggcctttcgtgagcggatccgcgagcatcctttctgttataatatgctcgagactgattgtttgatcccggactttgtctctcacaacatagtactttatgtcaatgtgtttggcagtaccacttgactgattgttgtgagagtacattactgcgggttcgttattgcagtataactttattggtttcacaatactgtcaaccacctttaaaccgggtatgaacttctttagccagttcacctgccccgttgcttcatagcatgctataaactcggcatacatagtagaccctgcagtgatagtctgttttgagcttttccatgaaatggctcctactaccagggtgaacacatatcccgatgttgactttgtattatcttttgcaaagtcagaatctgaataccccactatctggagcgattctgattttctgtgagacagcatgaggccttttgttccttgcaaatagcgcaagactttctttacaaattccaatgctctaggcctggattactttgaaatctgccaagtaacccggtaactaatgccacgttaggtcgtgtgcacacttgcgcattcatataaacaattttagccatttatatctggtattgatactgccatctatattcagggcatgtctcaacatattgccaattatcttgttatacacagagcttgaactgagataatgaagagatcgcaaaaatgtgtattcgtggtctattaaattctggccaatatcaaaatcttcaactgattttcctaaatataattttttaaccatcgcagttgtttcaatataattcccgggataatggatcctactccagatatgatggctaaaagacttgtaccgcaatataacatcgttactttaaagacactacaattatctgtctaaactgaagcctgaagaccatgaggttcgtctctttgaatgaactccagtatccaaataaatataggggcaaaaatagaggagcaacaaatcaataaaaaatcaaacagaggcaaatgcatgggaaggaacatactggcacattctcattccttggtaagaaataaaggaattatagaatatatagctttgcattgaccaagtggcttaggtataaaccaactggcctgttataaactaacaatattatctgaatatcatctaatacaatattcaaccatacttcagatttttaaggtaggaaaaatgtactgacctccctccttattcagggtgaacaccttattccaagtccatgtatagatcaagaatatagagaaaatacactgagaactacaatgtgaagaaggcaggaagaactgcccacctaatgatctatcatacatatatcaggaaagtgagctagtaaaaatggagatataaacaaatggtacttttggacttgccaaattggaacactggatgcaataatatgtcaagattgtcaggttcaccgagaatctttgatgtcatcagaaaatttaagctttgccgggtcatatgtaatacttccagattcaagtccatgtttagtgtcttctatttctttctgacagcgctgctcatttcccatttgcacacctgataagaagcacaaaagggaacttattaccaaggatgaaagctgaagaacttagtttaacatggcttgcatgttccatttggaaaataaaattggcttcacctttacactcactataacaacaaaaataaccggcatgtatcatggaactataataatgtacaccccagagaagactgtctagacctccaaacagaaaataacctcatgaatactttggatgggaaaaatattgttcagtaggtgccaacaaactaaaacggtgaaatgtaaaaggcttagaagttggtaatataaattacttccaataaccaaattgcacagtagataacagacctacaacatatttgtttggttcaaagcacattgtagtcaatatagcaaattttggttgtatcaaatattgagaaagcctatggaaacggaattcatggtactaataaacctgatatgcaaaatgtaagaactaaccaattcaaattacatatggatattttgtatccttagacaatgggtaattctaaagataaaatacagcattgcagttattattatagattaatgacaggcatatatgtcactcttgtgttcccaaccaaaaagtacatagagagctagaccatggcaacagttcgtattaatactgcaacactaatgtgcaaacaggtaaaactaatttgtatagacaaatgatctgttaaaactcatgctcaaagaatgaagaagggcatctaggagacaaaccgaatcataatatcaatacactcaattcatatacaacatatgcatgacagaaggagatgattaatttgatctgtacctgggtggtgatgtttaaacattagtactgaataatctagccttcactcccttttttctttccttcctaccaatcatgtgaaactcacaatgagcagcaaatcaagaatagagagcaggcgctagaacagatatgtatatatgcatataatagggagaatcaatgttttagcagtagtcatgttgaaagaatgaagaacatctaggagaaaaaccgaagcacaatgtcccaatttacttgcagccgtcgtcaccataccttgccatagtttgtgccttgctgccgtcgtcgccgtactttgccatagcccatgccttccgccgtcgtggctttggtgcccaagctgctgctcttgctctccccatcctggcaccgaggggaggtgagcggcatggagaacgggtgaggaagacagtggagagtagcgttgtactgccgaagagggccacgaccggatccacctggaaagtcgagggaatcggacttgggatcgcatcaggcatagaggatagggtgagggagagagaggctaacgtggagatgagatgaaagaggagaagaggagtgcagtggctcgcatccctctcgtccgggcaaccgacaatccaccagcgaggaggccgctgttgccggatctggaagccccgcctcctcactggtggacatgacggactcgcttgccggcgcgggagcgcgggcacagtaacaatggctggatgagggcacgagggaggcgaaggacgacgaagctacgacagcgacggcgcgcgcgaggaatgaagagaagagggcatggcggcgcgcgtgcgagaggaagcggcgacggcggtacggcgagatagctggagtaggttgaggccttgagggagtggaagaggagggagttgcggcagtgacgacgcacgggagtgaaggaggagggcgaggctgcggcgcgattggaggaggagggcgaggcggctagggtttgttcaggcttgcgaaatccacaccgtccgttagagatccgacgatcccacgggtgcggaagggccagcacagtgaggaacgtggacggccagatcgaccctacctcgagatcggacggcggatattagcggggaccggtgcgtaattaaccaaaagtgtagggttttttttgcaaaaattgctgatgtgctggtagtcttccaccgatcgcacggcttttaagtaaacctatattccatccttccataacgttcaatttaaaactcaatctctcaatctacaaattaagaatgtattctttcttataccttatagtttgaatttaaacatccgtgtttatatttattttgtagtttgcatttaaatttacatgtttatattttaatccatagttgtatcgagaagtatggacttactggttattagtagaactagatggtgatggtgctgcatgcaaagcgcaaagctttcggtacgtagctgacgactacacgagaacgaattatttggaggcgtcgaacagataaatattagtactatactagaaaatctcgcgccaaatggcgcgccccatttagcatgttcttatgcatgaacgtagaaatttcaaaagatttggtaggattaggccaacttcattaaattgttcatttaacatgtagatttattcaattaaagatcatcatattttaatctatttatggcatagctattaaaaagtgtttttttagtaagtctacattatttaaaatgtacttattttaaaaatattaattatcaagctttatcttcagctaaataagccatggtctttaaaaataagctttataaaatggactgtttttttatgtaagtctacattatttaaaatgtacttattttaaaaatattaattatcgagctttatattcagctaaataagccatggtctttaaaaataagctttacaaaatggacatttttaaataacgaccgtactcgttttttatatatataaaaaagaccaaatcgaatttatgataaaagaacatcttttcctcgttcaaaatataagcattcaaagtttatatcagaatatagcaattgagtatccagtcccttgtctcaaccaatcataatatttcttatttaatttttccacttacccacctagtttatatttggttaatatttcttatttaatttttccacttactcacctagtttatatttggttttcaactaagaactatgtaataatggctatagcttctattgaagtaaacactggattttatccattatctaaaaactcacctagtttattaatacctatacccaatttcaaataatgttttagaccttacaatgacggggcatttctcacgaaagtagaactaacaaaaaaaaaattctactccaaccctgaaaactttatttctagcaattctcatgcaaatttgtagtggcaagaaatatcctttgcgtccttatcaatttttaaattttaattaaatatgtatatataccttgatttgattggctaacagatgttcttataagggagtacgtaacatatcttttagtatttgattgttttttttacttgacacagcctattaaattttaatcgctctttattttgcaaaagttctataaatattgtataatactagcaaaatacccgtgcgttgcaccgggtaatgatatggtgactgaaatttgatttgaactatttatatgaagaaaatgaattgtaatttaatgaaatataaaattttctgcaatattaattacactcttttaaattatagcaaaagtgatattgcgttgcaacgaatagaaaaaacagataaagttgaattaaaacatattaaattctaattaaatgaaatataaattttctgaaatatttaggtattttttaagtaggtaggtatacaattaaattaatttataagtaaagtaagtgtaagaaataaaatgttgtggttggatttaacttttattaaattttctatattaattacactcattgaaattttattggaatttacctagcttaattgctaattttgataatacaaatatcatttcagcatttattgaaataaaaatctaaataaaaatccttttttctctatgggcctttttcaacccattttcttcttcagcccgcaagagaccaaagtctacttaatacccccatactcctttcatttagtggaccgcgggcccacgtgcgggcccaaaccctcaatcgatctcagccgttagttttgatggacggctcagatcagattaaaattgatgaaaccctaaccctaaccctccccccagccgagccgagccggccgcctctttctcccccgccccgacgccgcctctccccctccctctccccaccggggtctctccccctccccccagccggccgactcccccgccaccggcgccgtccctcccttctcgccggcacggcgcggcgatggtggggtgcggcggtgtgtgccggcgcctccgccttcccccaaggcgagcggcggcggcggcgccctcctccccgcgagcggcggcggcggccactctctccacttcttcccctttctctttgtgtggcggcgggagggccggcgacgccctcccctccgctagatcggggggaggggatgtgcgccggagcggaagaggcgccggcctgaacgacgtggagacaggcgtcggcgccggccgcctttttttttttttgcaattttattccatggctattgctaaccgaatcggattgtgtatggacgaaaattagatgtgacgaccggaaaaacacgaatatttatattagttatagattttacatgttaaatataactatatcttttgcatccatcaaaacatcacaaaaaagctgattccggctatcggttggcaaaagtgaagcacttattaactctctttattattttattggtcgatacttatcaactgcattagtgcaaagagataggtaaagtaatgggttttctagagattctgatgtgcaagggacatcacaagagcttatatctgattgacacgtggcaaaaattttggtgatgtttagctaatttttcaggctgccacgtggcccaataacattctagaatcatgaccctgatataggtagaagagattgctgataaagaaaaatggcattttgcaacacatttaacttgttcagtgttcaagctaacgttgaacctggtacaagtacaacatgctggcacgcatgtccacatctcgcgggtcgagggttcaagccgaatacaacacacggcatgttgcatttcatcataatttaaagtacttagcatcactttgaacaaggttttggtggtcacatgtatattcgcaaccttcttaaggtgtccgcaaaagacgtgcgcagcataatactttgcagacctatggttatcaacagcaacatgccactaggcacctgcacgaagaaaaacaagaaaatattactgtaaatttaaacaagtgaaattctattgaggtaccctaacaacttgacattacgatatattgctcaattaataatataggcgtcacagcaatgatttccacatgttcagtaactgtagactgaaacaaaactcacgacatacctttttgctcatgtctttagcaccttcgtgagcattctgaatgcagcagtactgtaccttctcgattcatgagtaccactcagttgctgaattcttcccaagaaactaatattatggttcagactcgaagactcgttactcactactgaattacggaactgtggacgatgaagcattgacttctcatctgctgctccattggatacagacagctgggcccctaatactgatctccagtaggggaaaaaatttctctttatgaatgttggatcccatcctttaagtgccttttttctcgcagcctgtcccataattaaatgaagattaagctttgtgaaacccaaaaaaaaattgttaaattccagcttgatcaaccaaagagcacttgattcacaatattttcatatatcctgggagaggtgttttacttgagcaacagaataaattgttttctggttatattcaagtgatgtcaacaaactgaattgcttaagcaaaagcagctgaaccagtaagcagctgcacggcagaaacataacaaccagaagcataacagacatctatcagcttgatttattaccatccaactacaaaaggactaatcatactgagttcgttcattctaacatcttaactaggtcatgatcaaatatcaaaacaaaccattgcacaccaaaaatctatcgcaagaccacacacacacagaaagggaggcagatcaaatctaaacacaatacttaaagcaaaacattctatctcattggagaaaatcaattattttcagattgttgacagtactataatctagaatgacgcactgctgtaaaaactgccgagcaaccttttaccaggatagagaagagaccagacatagagtttctacttttctagaatcccaactacaagataatgatctggcaggcactctggcttatatgcaccagccagtaagatggcaactaatagcaaacctaacttggaacctaagtaactgatcattagctgctgctgctccctgcatgctttggtacatcatactccccacgcattgttgcacaataattaacaaggtgaatataagaaatcatcattggtaacatcggaatacaattacctttttttctgcagcaggcagagaagtagacatttgtgcaacagccttggttacatctatatgaccataaaaaatttaataaaggctctttctgagaaattcagaaacagttacttaaataataaacacacacctttgtgaactatgtcgctgtaagaaatcttgttatatggacagcttcaataacaagtttaagaaataattaataaacaacaaacatttgcatagaaaaaaaatattatattgaatacaaaaagagcagtacaggatcatggtgtcaatgtattcttcgttagggcaaaacccgaattccttaagaatatatgaaacacgcgcaaggacctccacattgggcacctgaatgacattagaaccattatatcagatagtgaaaaatgtcagaaaatgaaacataaaaatagcatatattgataatatggtcatgtagtacaatgatatcattggtggcaaagaaatgacaaaaaagaatggtttagataaaatttaattataacagatgaactgaaagaaggtagaacagtttgcaatcacatcgaatacaagcttacttggtaaaataaagtgcatatattgataatatgatcatgtagtacaatgatatcattggtggcaaagaaatgacaaaaaagaatggtttagagaaaaattaattataacagatgaactgaaagaaggtagaacagtttgcaatcacatcgaatacaagtttacttggtaaaataaagtacatatacaaacatattcaaaattacgtaactatttctcttcgtttgccttaactatattcaggattaggaaccaaataatacgactagatggttcaaaaggtacaaggcatgaacattagtcattcaaatttcaacttggtaactgtaattgactataaattataaaaaggtaaaagtctattttttggcatttgaaatttccttgtagtccatttttcaccctgaactttgaactgggcattatacatggtgcattaggcagatgaactaccttgggtggtgttctgttgctgttttagtgtaatttttttcaatattttttaatgtaatgtgtttgggcctaggctcatagtgctttcttgaagcatatgccctgaactaagaaactagttgttttttaccccaaatttataaactggacaaataacacactaaatcatatttcatggtggacaacatgatagtggttctcgctaacatgaacttcatcaggtcagtttcattgttgtggacctaatcatgcgacatatatactaccaaaatatgcaaaatatgagcctgcactagggaaaatcaccactaataccaatatattttttttaacttttccaacttgtttgtgtcaacaatatcaaaatatcctcagggaaatgtagtcagcttaagacaataacaaaacctattggttgccacttgccgccatgaaccaataattaatacgcaaagtatttcgttttttgccgttatgtgctgtgcatcaagaaaattcacaaggagataatagcacacaagtattcatgaaacatgcaaaagttgcaatggccaacatcactaaaatatatcaaaaagtgtacacagttactctgtatatgcctgcgctgtggttacaactacgattaaagaggcttgttgcatctctaataaaattgatataaattgacatttttatacaaagatttcgtatacatttctgtaaataatgttaaatcagttttggttacttgaagcaaaagcaaaaaacaactcacataatatccaatacaaagttgaattgaaatgcaataatatttccacgctataaatcactaacacaaaaggttgatacaaatgcatgaaaattttattactatttgagatttgtttcctaaatcatctccacaactcagatattagaatgcatatcagcatctgacaggaataccctaaagttgttcttttggaagggtgagccttcagaacctggctcccctaagaagctagtagttgttatgaactggtgagtaatgctataacaggacaaattgtaggggatatggtactagagttgggcgagggaggaaatttcacagggattacttgacaaatggcatgccccaaataatagtaccaatcaccagctagagtctgctacaggctctattcagatactatctcttacaatagataagacgacaaaaggttctgacattaatgcaccaaaacagtttttttgttatctttcttttcttttcttttatctatcctcatgcaacaaagtttccttttataaacgctaagagtcgatgttaagccgttgttaagcttaacaacgatgtttcaccctcctttcccctctcatccatgtcagcaaactttaccttgttaccaatgctaagagcctgctattagttgctgttgtatacatgccctaattcaaacctatctcaaatcaaccagaggatagtaatctaatttaatatgtttcaaggatagccatgactactcaaaataacccaaggtacagaagctcctgcaacatgctaaggtcacatccctaacaatagagggctccagcttctcaaagcagcggaggctcttacgtcataactcataagcttcattagacagcttactcttgtgatggttttaacacaatgttgaagatagataaaactggactgaccgttcactttatgctggatatgctaccctatagtacaagtaacggaaagtggccacggaaatcaacaaatcactagcattcttgttaggatcagggcatggagccatggaattacctattaaaatattaataccaatatgaaaaaatatacagtgagtaagagatcatatggtgctgtgattttacaccattaaaaaaacaatagtacctctgaatgtgcttgaatgtagttatccaaaacctcaccagcttgcgaaattatagtgacaatcagacatttacatttcaaaagtgctcttctttcctccagcagcttctgcccctctgcagtatcacctttatcacacactagggaatcatagtcctcatatatacgttgcgcgataatgtcgaacccatcaggtttgccctcacggatatgttttcgggctgccaggagtaaaactgcggattctacaagcttgtcattcttcatgtaattccagagctcatcagctagattatctgttttttcagcaagcagtctaactgtatccaaaaaaaccttctgcacaataaaaagaaggcaaaggaatgaaatctaaatgactttgagcatttgtatgcaagcaagcagtgaaaaattacttcctattacatctcgtttccactaattgtagcaaggatgaactaggatcaagcggaataaaacctactactccctccgtcccataatataacaacctaggaccggacgagacatttcatagtacaacgaatctggacatgcacatccggtcctagattgctatattataggacggagggagcatttagctatttcctctgttacaaattactagctttatccaaagtcaaatatttatatccttgaccatcaatttctataaattcgtgtgttttaacaacatgcaaattatatattatgaaagtatttctcatggtgaatataaaaacataaatcttaatgtgttaaactatatgaccagaaatagacggtcagatacagatagctcacttaggacaaaactacaatgactagaaaaggagggagtaatggaattttgaactgctgacttcttgcctctaaatttgaaataagaaaatgcctcagcacatgtgaaaatttttaaaagatgacaaacaggaacacattttgttgtcatgctgaaaagatgatactttggaaagagcgttaagtgaaacaaaccatctcaggtagacacagcagatgaatgagcttgtagatataatcctcatgatactgcacaggagatagattgtcctccagatatttatgcaagcaagtatttccaactgcaacatggagcgggagtagtccgggaatgccagcatcattgactgtgtgtaaattggctgaagcaccatggcagaacagcaacttgatcatgtcaacagagaaccgttcagcagcttcatggagtggaaaaattccatatgggttaatgcagtttggattggcatgcatacaactgagctgaggtgccttgccctccaatacagttttcgcacatcgcaaggcattatgcctgacaatgcaggataaggtttctgaggtgatgttacacttaaatgccatggccgcagtacattccgcgaacaaacggaagaagcaccggacactgtcctttctcaagacggagtccaagcggggagatatatcaaagaaggcatcccgcaccacctaaattggtccgttcacaatcagaagagatgaaaagaaatcagctttcaatgtaataaagcaaaacataaagtctcattgccgtgcaccttcatgacaaaacatttcatttcagcaaagggcaccctttttttttgagaaaatggaagagacaacttacgtaaactaaaatgctgcaggattaaaaaaggacaaacgtaacaggatgatctagcaactgaattctgtacatgaagactagagagcaacctgaggggtagggtctgggatgattatatcatttgttaaggacttggccatccaagcatattttattttaacccactggaagagagaatgtcagcagccaggtaccaatggaagacagaaacctagaggaagagtgcagatgggctaccatacctcatcagccttatccaaatcagacttcttgataactagaaaagggcgggacgggtccatgttatctacggttgctccatcttctttacctttaccaacactttctcctatgaaagcatctggcagaaaatgatcgggaattttcaccactatatgtttgtctgtaacaaggaggattaatctctagttacattcaaaagaatatcataactttgtactgctagtaatataatataatatacaattggtaaacaatgatccttaagactgtgaagacaaaataaatgatatttaggacatggacacgatctacaaagtggcacttaggctagcaatatctatggaaacatgatatttcaagtaaagatgattaaatattatgagtattttccgtgatgaatatactgtcaatatgtgcagtactttatatactgatggtcaaagttaaaatagtttgactggtaggaaccataccctgcaacaacatatattttgaatcaaacggcacatgcatcactgaaattgatgaattcattgaatttccacccccacagctggatataataatattgtgtgtaatagtatagaaacctatacttcattcttaaagaaggcagtggtggtggcagtgaatctgccaccacaccaactctgttgtatagattatttcttttaccaactactccttcgtgttttaatattacaaaatagtccttctacataatctacaagcacgaaactgtccccaaaacctcgcaattaatttgttccaagcaatattagcacgcgtttaatttattttaatccatcgcaaatcacagatatttatctagtatatgtgaaatgaacggtaaaaagaagtttttcacatactagttgaacgagtgatgtgtaaaacttatggaaatcgaacaaatcaaaaaataagattgatgtttctgttcaacaaaacaatacctcctgctgtactagatacgccgaaaagaaatcaaatcggtaattaggctctgaatgtttcagaagagatcagaattatagatttgacatttcgacatgaggaacagctccagatctgagggcgattcgcaaataattttggagatggaagagatatacaccgtagaagactccgagttgaagaagaagaagaagaatgggaaagaagtactgaaataacaaaaattggttgatgtaactattaccgagggccgattccgacatgacctccttgctatgataaagattggggctttcctggatgagtagaaccagatctccagatgagatgaagggctggcttataaaatagtggtgggatgtaggaaagggggcggtggagagttcgccggaggcgatggcggtggaatgagcacctagggtttctttatgggaagatatttgtgatggggaactggggatggtggacaaggaagaaaaggatatgatcaagggctcgaggcccggcctgagtgcctgacatgttgcgggctgtaattaagcgcctggccaggccgagaaggcccaaatgaacttctttcttttctttttcatttttttaaaaagtccactttaggctatgaactatgtagttttatttgagtcccttaaccataaaatctgatataaaactcccttaattattaaaactagttggatgacccgcacaactacacggctatcatcaatttaaaattatctatttttacacataattttatttaaaattattattcatgctattctaataattttatagtttttaaaagcaacgccagtcgctaccctttactcctttgtcacatttttatttgcttacttgatctatcactacttctattcatcctcttgagaactttaaaagttaggccttatagtttttagagtaccttatcttattgggtttcgtttacataatttttagaagtatcgtcaaacatcgccaatttactactctacggccatctgttgccacctcaatttattgtcatcgggattttaaaaatcaaatataattattatttgtgttcctttttactttctataagtctcgccaatcgttagtggcttcaccaatatactcctctacagcaaacccgctgcttccccttcttattgccattgacattttaaacataaaatatgattatcattgtggtttttttaattatccataagtcccgccaaccgtcgtgaccatgctgcttaacggcatacctatcgtcactcctcttaatcatcattgtgattctatttggggttttgtttatagtttttgttgatatcccatcaaccaccaacactctactcctttacatgcctattgcttctcccctttttaatgctatttgtcatcgttgttttctagatggactttttttaaaaaaaaattgcatatttttcattccgataatttttattcataaattatattcaaacttcaattcttataatttttttcctatttttgaaaattattttatttgttatttcgaactttagttaatctcatcatgtgttctagattgcctcttaattcaattgtctttatttttttcttacaaatttaagttatttataaattttattcaagttgagctcttatttttttctttttctatcttttgaatttattttattttttattttgaattttaattaatctcgtattgtgttctatatagactattctcttaatatttttttcttttttatttctaatttcaatggtttagttaagataaaatacactgtgggatttcgcttggatatatatatttttttagaaaatcatgagctgtagttaggagtccgatcgtctcaagttagcatgcgagttttttaaacatatttcttgcatgattctttcggtattaccaaaagcgaacgatcttaaaaaccgactcaaatacggatatgtatttccaaaagcaaacaaacttaaaaaccgactcatacacggatgacttaccaaaataccgataaaaacatggtcgttaacaaatttttataatagtagagaagagatatagatagattaatacaaaaaaaaaaccgactcaaacacggatgacgaaccgtggaaacatcttcaattttttataaccgactcaaacacagatgaccgactgtggaaacatcttcaatttttataatagtagatatttggattgtttcaatattctattcctacttgaaatctctttttattttttttctaattctggattttatttgttttttattttgaattttaattaatatcgtactggtttcttgtatggactcttctttcaatattgcttattttaaatttcaaactttagttatttttaaattgtatttctatacgaaatattcttttattttaattctaatttaggattttattttatttttattctgaattttaattaatctcgtattgggttcttatatggactcttctttcaatattccttatttttaattctgaatttcagttatttttaaattgtatttctacttgggctctttttttttctagtttctaattttattttatttttatttaaaattttattaatctcgtattgtgttcttatatggactcttctttcaatattgcttatttttaatttcgaatttcagctattttaaattgtatttctacttggactcttttttctttttctccgattaatgtgggaatttcttgcccccacagcgatacaattgtattcctaattgaaatcttatttttctttttctaattttggaattttttttttcaaattttaattaatatcgtattgtgttcttttaatatttttattttttattttcaatttcagttgtttcaaatttgtattcctacttgaactctcttttattttttctatttttggatattattttattttttattctgaattttaattattctcgtattgagttcttatgtggattcttctttcaatattgcttatttttaatttcgaattttagctaattttaaattgtattcctacttgaactcttttttttttgctaatttcggattttatttttatttttattcttaattttaatttatctcgtattgagttcttatatggactcttcttttaatattccatatttttaattcctaatttcatctattttaaaattttattcctacttggagtatcttttcttttctaattttggattttattttattttatttttttcaaattttgattaatctcgtattgggttcttatatgtaaacttctttctatattgcttatttttaattccgaatttcagctatttttaaattgtatttctacttggactctgcttttttttttctaattttggattttattttatttttattttgaattttgattaatctcgtactgggttcttatatgaaaacttatttcaatattacttatttttaattccgaattccagctatttttagattgtatttctacttggactctccttttatttttttttctttttctccgattaatgtgggaatttctagcccccacagcgaacgtggtgcctcctttcaaaactgttttaataatataatcgatagatagatatatagatatactagtgcaaatcgagtctcccagcggtttagttaggtggttttgtcccacgtgacaatggtaaatcgtaccatgaaaattgaaagaatttcgttgaatctacctcccatcctttctccttttcttcttcctcattcctctgtctccccatctctctccaccgtgcacatgtgggtcagcgggcaatggagacaccgatctggtcggagagcaccctcagccatcgccgtcgcaagtggcaagaagagacggcgtcaccattttcctcgcttctcgttgtcatgttgattacgctatccttcacttagatccagaatacgccgatggctgaggactctggagcactgtctgtaattacattggtgatgttcttttcttctgaaaataaagatgaagatgaagaatacgttttttacataaaacaaggtggtattaacgtatgattgattgagttttaattattacaaacttgaaaaatagattaatatgatattttagagcaactttcatatataaatttttcgcatgaaacgtaccgttagcaatttgaaaagcgtgccacgaaaatcttaatcttcatccaacttttattggagaaaagaacaggaccattgcccccattcttgtgaacctcatcatgctccagaacttcttctccggcgcgctaccaaccgatagtgacgggtgattggctggtttggtggtcgtcggagatgtctcccttgattgttcgttcttggatgggtggtagtagtcgggttaagcaaaaaaaaaaaattcaaagattgaattaaggtagttgttatcacaacttctttttgcttggatggatgctattgtcggtgtctccatttgttgcttggatggtgttgatggtccttaagtaccaaattcgatttatcaattcatgcataataacaattgaaagaatataaaatagaataccaaacttagaggtagtagtcttggtgaatatttatatataggtaaatatatggacaaaaatcatccgccatgtgaccaaatacacctccggacaatcggacacgattacacggtttggaggccccacgtgtcaatcaaaaccacctaaaattgagtccagccaaagtacaacatgttgggggcccaccaggcagcctcccaaccgaatgagtggccggtaggtgagccagaagttcggtcgaactgcctttgcatcccctcgccatctgccaacacgtggagcaagatactggagtcctaattgcggttatgtgtggtttctgagcttaaccaacccacaaaccatcattacaactaggggtggcaacggggagggtcggggctgggttggacgggaacgtgtcacaccctgatccggcaccgccgtacaacggcacctgacaggagcgtgtcgtaggaaaaacggcgcgaaccgcttcctacgaaaccgcgatcacagtaccagtcccaggacatagcgctggtacccacggtgacaaatatgaatcattgcaatccttaaaataaatagaggatttatttaccttgacttaggttgcagctcgggacaacccgagaatacaaccgacgacacggacgaggcaaacaccaacaacagcagcagcagtggaaccaacggtctaacacccaacaccacaggcaatactagggaactaggacgaaaccttaatcttcacttcacttcaacttcaccttcagagctggcagaactatatatatatagagcaagggtgagtacttatgtactcagcaagccagggggacttaggtggttaattcaagcttcaaggaaaggctgttattttagcaatcaaatttgttttcaagttttcaacaatctaagtgtgtgctttccacaaacagagcgagacaagtctcagcttggttgggggcgagacgtaaccaaatttgatttgcaagatttacacaactcccagagttggcctcaaagttggtttcccaaaccaaaccaattttccaatctttcagagttttggttgtctccaaacaaccagtcattctcagggactccctgtcccgctgtctccctgacatccgcttgctttatccaaacatcaggtttcccaaacctcaacatcttttcacaaagctgggtaaaacaaaaactacgctaaggaatcacctcacatccgcccatgaccgtgggcatggctgttcgaacagtttgttaacctctgcagagggggtacactttacctacatgacgttactagccttggtcacctagcccgtgcggatcaaacacgtctggtgacttggggctttcacgacaaggcatttccaaagccaacacagggttgccatatgccaacgagaggggtcccggaccaacaacaggttaggtcccagaccatactgtgccatgaagcccaggggtcctccccgacaccaccccggcgaatccacttgtctcttggcatcaaggcttccctggcctagcttgttactcagccaggggtgtcccattccacccatgtggtcgcacttgttatatgctcggatgtaattccaaaggaatcggtccttaaatgtgaccgcacaagcattccgcccaggaatggccttgtgtcgcgagttttatttttaaaactcattttctttcacaaggcaccgacccaggcgtcgggttttccaatcctttcgtaaaccaagttttacccaagatgtttctcagattttaagttttaaaggcgaccgtcgatactcgcacagagtgtatgaataccgaggcgcaaccaggtggttacaagggagcatgatatagcaattaacaatggaaggatcaaatgcaacaagttaggtaggcccaccaatctgcctcgcaggcggggcaaacatattaagtgcaatcctatcaatgaataatattttacaatcaatataattaagttcaaatataggctcaagatgttcaaaggtggcttgccttgctcagggtcttcacgaatcttcgagaaatccgcttgacgaaaaatatccggtaaccgcaactaggcgcatacaatcaaaaatctaaacaaggaccaaatagaaaaggatcctatttagactaaaataatagtgccattagatagatcacaattttacggaattactggaagtggaacgaggtcaatcggagtcacggatcgggagatatgaatttttggaggctttaaatgaatgtctggacaaggaaatgatttatttgattctttggagcggggaaaacaatttgtggaaattttgtggacaagggaggatatgtacttatccgatgggaataagagaaattatttacgaaggttgtttgaattttctgggaggaaggaaaatatttgtggaacaacggaaaaaggatttattgaattttctggattaaagaaatgatttattgaatttgtggaaaagaatattctttttagtcactcattgacgtgtggggccaacatatggtgagagaggagtgaatagggagggagcaattatggacttttggccactgtgtttggggaagggagtaaagatagactttccttgttttttaggccgaggaggaaggttggccaatgggccaagcccacgagcagggagagagaggagggggcggctgactgggcaccatggactgggtcaaacgccacatgggcagccacggtggcaaggcgagaggggaggaggaggcgcctggatcggacggctcacagcggcgcaacgccgccggcgagcggcggcaagccggaggggccggcaggcaccggaagcgagaggggctcaaggcggttccatccaccggctcggatgagggagaggcggcgcgatggcggccatgcggcggcgggatgggcggcacggcgcggacgcggccggcgaggcggccagccgtggcggcgtcccggggagattctctagggctcaagggggcgcgacgatacgaggggttcggtatgaggagaccgatggcggcgcatggccgagcgcggcgcaggcgtggcgagcggccgcggtgagaagaggaggaaagaaggggagcaagctggaggagaaagaggcagggacgaccaaccggcggtgacgcgcgactacgcgcggcggcgggagcagagcaggagggaaagggtgacgcggcgaccggggggaggaagaagaagccgacggcggttcttggcgcccgcggtggcaaaacagaagaggtgcgaggaactcaccgacgaacggaggcatgggcgcgaacgcacgccgaggaggcgtggcgctgagatggcgcggccggggaaggattcaacggcggcagcgagtgcggcattgggtaagggatgagaggagcgcggccatggcgaaaatggaagggaggagcgaggtgctcaccggcggcatggcatcgagtaggcacgacaaagagaggataagaaaggtgaacgaccggggcatgcggtggcgtccttggtcacggcggtggcgttcttggccgccgcgactaaggaggcggcggtgctccggggttggccgtgcgacggcgaccggagttgagggaggaagcggcatggcttcaccgtttgaggcacggagcaaggggagggaaaaagggggtcccggagtggaatttataggcggggagggcgggagcttgcgagcggcatagtcggtttagagggggagcatgcgagctggcgcttggctgccaaccacgggcgacatgaaaacgacgaacgacggggatgcgctcggtggtggaggcggtggatcgagcggtggaagtcgaatcactagggcaggagcagctgcacggcgtggtgaaagtggggacgtggctgagggctctgcctccatcctttggacgcatgcgcacaggagtaggggcggaaggatgacgccggcggtgatagcgtggatggtgcggcgtggagcggcgacaaggtggcagcacgcgatgcaggtgttggtattttttaacgatattactagaaatataatttctaacaatgacgcagaaatattcatggtatattatggttacagagtttatccgtaagctcacgcatataccattgtagtatttcacccaagggtatcgtatttattttatcccatgagaatatcatgtagagagaacttgactaataatttatatattacttgtgataatcatatcctgagcaggggttaagataatccaagggtagagtgacacacaagcaatagctactcattctcataatatattatctaagctaagtggaaagaaatgagaaagaaaatatattcctatacttctagtatacatacattctagttatctgatatactagctaatactctctatccgatgccctcctggtacttcgagaagccacccctaactgtcgagttccttatgacagcccgtcatgaccatacaatcggggctaaatacggaggaatatcctccccagggaattaacttaggatcatatacacgcgcggaggaatacccgtactgagctgtcaccatcagcggcccacctctcatccgcagcatataaccccaaataatgatatcacgtaatctagacaccacgtctaaacttccagatactactctaatatcatcatcatgacatagagtaaatgcataagtaaacattatacccgcaccaaagcatctcccagataagctagcagcatattcagtataacatgaacataatgtaaaattggcattcatactctcggaaagtattccaataccataaatgtataaagaagaatatttaataatactacaaagcttacaaaagaagataggaaagctactaaagccatacccgaactctttcgaagacttccggactcctaatttctactctattcctattccactagcttgatactactaaactaaacttgagagaatatgagagaactttacttgaggtgtgtgagtgaagtgggaatggcaactccttttatagccttccaatgacgttgtgaatgttggaatggtcggaaataccctctaaccgtcattgggggctaatccacaccttccaggcgaagccctggatcggatggcactgaggagggttcagccgaacctggggcctgcccaatctagcccaatttcggctggcggcctcctccgttgttcttctccacagacttgtgaattttggcccagtttgtcgtgtcaattccgagtcttggtccattcatatataagtctggttctcgacatcatccgattgatttatcgtctgtgttgatgtcgattctcctccactttatgattattctccgcacaaggttagtgaacctaatactagtggaatattattattctaacatactctcttcttttttaatagatgacgccgttgactttttctcacatgtttgaccattcatcttattcaaaaaatttacgtaattataatttattttgttatgaggtgttttatcactcatagtactttaagtgtgatttatatcttatata

SEQ ID NO: 9618 - DNA, 70423 bp, Oryza sativa
  unsure (1)..(70423): unsure at all n locations
gaggaactgcgcgatgggcaccatgaactgctgcaggtcgggtcggaacacgccgtgcgacggagggaacgagttggtgatcacgtccatcttcaccgccgtcgacaccttgatgctgttcgagaggccggcggacacgagcgcgttgtacaagttctgcatggccgggaggatggtccccatgtcgccggggccgagctcgttgccgacggcgatgtaccggatgaagacgctcggccagtaggcctggacgttgttccggacccagtcggcggcggcggaggggttgttggcgaggttggccaccgcgcccttgtcgccgacgtcgacgatgacggcgatgccgctgccgcggagcgcggcgagggcttcctggtccgggtagtagatgcgcatcgcgctgatgcctttcgacttgtacagctgcacgacctcgctccgcgacgggaggttgttgccgacaacgccatagcagacaccgtgggcacctgcatgattaaaaatctaaaattaatcgatgaagaaaaaatacagagagattgaattgcttgagaggaattaattgcttgttgattagcgaacacaattactagttgattagcaatagattaacgcagcatgcaagataagaggatcaaaagaaaaatgaaaactgaattaatgtacctcccatttgctcaaattactcagttgtcggagatgctcaaatctgaatatgtatgcttcaatgctcgcttgtgatcgtcgctagggaaagaatgggcctccttatatactgtgagatggtgcggcttttcgtatcagatgatctataaacaaccaggtggcacttcgaacggttagtacttagtagttagataggtttaattatatttatctctcgaaaagttgtaattgtatttgccgaggatttgcgcgcaaacctcacagttcagattaagcttgctcattactatttcttgcacatttgtttggataataactaaactatttcttacacatgtggcttgcagtattaggttaattaatctaacggttgattctccgttcatcattaagcttgacgaatgatagtgttgtggcctcatcgtggccacgtaagttcaaacacaatgtcaagccgcctcgttttgttttaagataagatgagctggccgtcatgactcgtacctatactgatgatcaggtcaaatatacatgcatgtgcgttctttgctactgacgactgacgagtagtgacgagaggcatgctcggttttgcttgcccgcgacaagttcttcgcgtggctatctgaagatcaccaacagcgacaccgtgaatgcatttctctgagtattcaatattagatatatttccaatattaatattaaccatcgacatcaacgaataagtagagggaactaatattattttagtgtagctagcttgcggtgtggttggtctctccctcttgctttcccacagtcttcgatgataatctgacatataaatatgaatgcatataaattgcgtgtcaagatgagcattagagaacactgtctaggggaatgtcgtcttgtcaaatctctatgttgaaacaattccgcatatgcaagttttatgccaagctggcaagctagatggcttgctgtgtttatatatctgagctggttaacttgatctgcagtatccgtgacccaacttaattgtcgaagaaacgggtggtcagacaaaattaagcttacaaggctgggcattcatggcatggggtgcaacgtgtttagttttgattggatcacgacgagcttgtggttatcttcttattgggacctcatagcctgagaaatatttcactgaacttgccttatattccgctgaataggagcacatggctgagttttggtacctcctaacctatgtaccaagagttactaaattaaaaaatagtacctcctcaagaaatataaaattgctcatataacaaacacattggcaattaagcctctatggaatatggtaatattcccccatgatatgctatgccattgatcatcaactcaatagtctaattgattgattatactcttaaaaaaaccagttgattgatcaagcaaaacgaagatgtccattccaagtgggatctgcattcttcttcttcttgacaattggcattttgtataagccgttttacctttttttttaagaacaatagccggcttacctagatgccattttacagattttttttatttttatttattaaaatattttaaaaataattttttatttacaaaactaatcgcccatcactctttgatagggcaacttttaaaaatcacccctccaaaggacaatttatccaacatggcagacagccgttggccatcgcctaatggccaaccaccgaggacgccgaaattttgcaggcggcccctttgacgctagggctgtcaacgagccgagctcaagcgagcttgcctgcctaggttcgagctcgagccgagctcgagccgagcctataaaatgttcgagctttcaaacaggctcggttcgagctcaatcaagctcgagctcgactaccaagctcgatttttaattagaacagtgtattttcaaaggataatttttttaaaactatttaatttatggtttatcatattagtagaagaggaaaagaataaaataaatatttgattccaatataagacatacaaataacatatttggtctactaatttattaaatagcaacaaaaaatcataaattactaggctcgttagaagctcgagcttggctcgcaaagctcgtgagctttgggacaggctcgggctcggctcgtttggaggtcgagcccgagctcgaatcgagcctaggatgagtcgagctcgagcagctcgcgagcctcgagcttttttgatagctctatttgccgccctcacagagggcggtttttggctctaggggggcgcctgcaaaagggctaggagggtggccagacttttttgcagatggcccccttgccgccctcacagaaggcgattttacactacgcaggggaccgcctgcttaaagggcggcaggagtttgccactccccttctgctccccctcactctccctcattttcttttttttttggattttgagtgaatataatgaaaaatcagagagggagaaggagttttatatcccgcaggggcataaaatcgccctcacagaggactgcaagggagccgcctacagaatgacaggccgtcctcgctgcccttttgcaggcggtaaggggactgcctgcaaaaatgctaggctgccctcgccgcccttttgcacgtggcccccgcatagtgaaaaaacgccctcccagagggcggcaaaggggccacctgcaaaatgcccctccctcggtggccggccatcaggtgaggggcaatggacgtctgccacgtcggataaatcgctctctgggagggtgatttttaaaaatcgatctccatcaagatagcgatggggcgactagttttctaaatttttcaaataattttttaaatattttaataaataaaattaaaaaaaatcccattttacgtgggcagcatagtactgatggccttgttttgggctaatccattcggcccatggatttgttatgaatgactttgttccgttcccataaacaggaagagttcatgacggattagtccaaagcaaggccctcagtgctgctatgctgcttatgtccctatgactgatgaacaatgtccgatatggtgtaattcgatctcgatatacagcttcagaatgcacaataatctcgtcatgatccaatcaaagcttaaacaccttgtacccatgaatgatctgccttctagcttttatctgaccaccggtctctgacgattaagccatggattctagatcaaagttaaccagctacttggagaaacatagcaggcaatcttggcataaaacttgcatacatggaattgttccaacatagagatttgacaaggcattcccctagatacttacacagtgttctagtgcgcatattgacacgcaatatataacataaatatgcatttccttctgaacttcagattgtcatcgacgactgcgggaaagcacgagggagaccggccggccaccacaagctagctacagactaaatcaattaatttcatctgcacttactcgttgatgtcgatggctaatattaattcgaaatatctaatatatgaagtactccacttgacaagatcagagaaatgcatgcacgatgtcgctgttcttgtcactgtcagatagccacgaagaacttgtcgcgggcaagcaaacaagcatggctctcgtcagtcgtcactactccctatatttcgtattataaagagtcaagtaccataaataaattaaaaactacatattcaatatttaacatgatgtacggtaaaaatacatatttaaaacttaatttatcgcagaacgataaatttaaagtataataatatcacaaaactatgatttagtaacagatttatcataaaattatagatttagtgtcaatttaatcataaaacttggatatttataatcaaacataacattgatgtcaaatatttaaatcataacattagtgttaattatttaaaccataaatatgtagtatttttttgcgaggataaatatgtagtattgtgataattttattgttaaatatgtagttatacgatacatcaccttaaatctgtaattttatgataatttagtcaaagtatatgtagttttgtaaaatttattctattataaatcgtttgattttttttctcaatcaaaattatttagatttgtccaaatttatagaaaaaattagcaacatttataacaccaaattagtttcattgaatttaccatcgaatatattttgataatatatttgttttgcattgaaaacattactatttattttttttgtaagctttagtttgactaagaaaaaaaattcaagtgagatatagtataaaacgaaaggagtagccagcacggtatatacttgatctggtacgagtcattatggccagctcatatattatcttaaaacaaaacgaggcggcttgacattgtgtttgaacttacgtgcccaagatgaggccacagcactatctactcgatccaaacacaagaagttccatgcatgttaatcgatcagtcgtcattcgtcaagcttaatgatgacaggaaaatcaactatatattgggttatccaaacaaaatgtgcaagaaaccttactggttaaccgattgaagtgtctcattgacaagaggaagaagtcacgccatcttgcagtatataaggggggacattctttcctagctacgatcacgagctagcgagcgcgagcatcgaggcgccattcataattccatctccagatactgatcaagcagatcagagctcgagttatcatagctatttgatcaaatgggaggtatattgagagcttatatttccgtttccttttctctttcatgctgagctgatctattgctaatcaattaactaaccctctcatatgcaattcgatctctctctctctttctctctctcttgctattttatttccttacacatcaattaaatcgtctgatttggtatcaacatgcactcctatgtttttgcaggtgtccacggtgtttgctatggcatgaacggcgacaacctcccgtcgcagagcgaggtcgtgcagctgtacaagtccaatggcatcggtgctatgcgcatctacagcccggatcagaaggccctcgacgcgctccgcggcagcggcatcgccgtcatcatcgacgtcggcggcatcggcgcggtggccaacctcgccaacaacccctccgccgccgccgactgggtgcgtgacaacgtccaggcctactggccgaacgtcatcatccggtacatcgccgtcggcaacgagctcggccccggcgacatggggaccatcctcccggccatgcagaacgtgtacgacgcgctcgtgtccgccggcctctcgaacagcatcaaggtgtcgacggcggtgaggatggacgcgatcaccgactcgttccctccgtcgcacggcgtgttccgcccggacctgcagcagttcatggtgcccatcgcgcagttcctcgccaacaccatgtcgccgctgctcgccaacgtgtacccctactttgcctacagggacaacccgcgcgacatcccgctcaactacgccacgttccagccgggcaccacggtgagggacaacgacagcggcctcacctacaccaacctcttcagcgccatggtggacgccgtgtacgccgcgctggagaaggccggcgagcccggcgtccgcgtcgtcgtgtcggagagcgggtggccgtcggcgggagggttcgcggcgaacgtggagaacgcgaggaatcacaaccagggcgtgatcgacaacgtcaagaacgggacgccgaagcggcccgggcagctggagacgtacgtgttcgccatgttcaacgagaaccagaagcccggggatgagaccgagaggcattttgggctcttctaccctgacaagacgccggtctacccgattacgtttcctccgaactagcggctgaccatgccagtgcaaataaggatttccagagacgaataatccatgattaaataatgttggttgaacgttaatgcatgtactctgtatggccctttttttttgtgacaatgctacatgaataaaaaattccaattttattttatttttttaaaaaaattcaggatctttttatcggttgatgacagcagcctgctgtgactatatatcggtaccatcttgtgccaaacagatggcacctataaacagatagacacaaacatttccagcttttcagttcctgaagagaggacacaaatgcagatcatgaacgcagaatactgctccaccagctcggattaattatggccactcaagctactcccgcttgctgctactaattcccttcgttaccgggtggatgatggccgagtacgagatcaccgatccccggtgctaccgccgcacaccgacgacggcgaggaggacgacttctgggtcctctgccctctgccaccaagatcttccagccaaagcagcacggcggcgcaagcccgccgccgcggatggccggccaggctgcgtgatccggacgacggtggaggcgaccagagttcgattcggacgcacgtgagatcacgaggtttgcctcgcttttgtattcgactccggttatacttttgctttggaattgtgttcctttgctttcttcctcctccagcatctgctcatactatacattccgtgtgatggaacactgcgaatcaaatgggacatttgagatgttgttgtactggtagcctgatgaattcattgtctctttctgacaagccgcatatggagtctgttaggtgtttcaagtcgcggtttggtttcctctcactttctctgcttcaatctccagattccagcgggcagcggcctcgcagaaacagatatcaactcgattaatacaaaaatgattcggtcgtagttatttcgcacgcggaggaaatggaatcttttagaagaaaaattgcagaacggagtaatttcactcagatcaattccacgttttcctaatcggtgtcggtgctctactactactaggatgaaaacgggaatacggcaaaggatatttatcaaatacgaaaacggaacgaatacgatttggaacgaatacggtaacggatacttatcggaatataaaaagcccttaaattgaacttttcaaattaagaaagagatgtagctcaatatttttttctaaaataacaaaccgatatttatttttttttaccaataataataataataactagttgtaccctttactttcttggagaaaaagaactatattcatctataactataattataagtagtatgacatggtctaataaaaatttaaaaagtaatcatgcaaacaaatctaaattactggaactaaaaatatttctatttaattaagcacatcaatactagtataaacctaaacattaaagagtagagaagaatgaaactaatcagttgtatatgagaaatactcccttttcgattctaagaaaaaaaaatttgaattcatttcttgaaaatttccgtcggattacggtttccaacgaatagcagccttatcatgtttgtttctgtttccgagaaaaaaattcagaattcggaattcgtttccgtttccaaatgtttcgaaaaaattctgaccgacacttcccgtttccaaaaacacgtccggaattcggaaactttccggactgttttcatccctatctactactgctcgagctcaaccagcatttccagcttgttctaaaacataacacagatagataataatgggcctatagatagcgtgacgaggaggggataacttgcggcccggctaaaagagatggggattaaaccaattgggccgaaagatatgtccaatttggccgacaagctggaatgctgttcgagcttgagctggagcagtaatagagcaccgacagcgattagctatcgcatcaagcagaaacaggatgatctgtaagaaattactccgttctgcattttttttaaaaaaattccattccttccgtgctcgataattactgttttaatcacgtgatttcggattcaccaaccgcgacttgaaactgaaacaccaaaaaaaactccatatgcggcttggcagaaagaggccatgaattcaatcacgctatcagtacaacaacaacatcttaaacgtcccatttgattcgcagtgttcatcacacggaatgtatgggcagatgctagaggaggaataaagcaaaggaacacaattccaaagcaaaagtataaccgaagtcgaatcccaacgcgaggcaaacctcgtgatctccgccgtcggccggatcacgcagcccggacatccgcggcggcggcggcggcgggcttgcgccgccgtgctggcttggctggagagatcttggcggcttggggcctcgagctcttcctgacatggcagagaacccagaagtcgtcctcctcgccgtcgtcggcgcggcggtagcaccgcgggtcggtgatctcgtactcggccatcatccacccggtgctccgctgctgccccatctcgccgcgcacgtagaagcagtagttgatcctgcaccaccgcaccaccacgccgaggtcggtcacggactgcccgttcttggtggagctgtgcatccacgcgccaccgccgccaccgccgccgccgcagcccgccacggtccgccgcaccgagggcttcctccgcgcgcgcgccgagaagaagaacccctcctcccgcctcccgtgccgcgccaggagctcccacggcgccgcgccgcaggggtcggcctccaccacggcgcccgccacgcgcggcgcgaacccgcgcagctgcggacggaggaagtggagcatcagctcgtcctccgtcggctcgaacccgacgccgccgccgccgtactcgtcttctcggatcagattcatctccttccccattccgagtagtagctagtctagtctccgctcgaagtcaacagcgagaagacaagatgtggagatgaacagagacgggtaggggtgtgtgtgttcctcgtgagttctttctccggaccaccagtatttatctcgccatcgaatggagcccatcgtaagtgcgatgagttcttcagtccggaatcttcatattctgtgggctgagcccagccgtgtcggctcaggcctgaccgtgcttgggccgtgccacttcgggcggcccatttgaccatctatacatctccatacttttttaggacattaaaattttcatttttaagtacaattcaaggaatttaacgctttttagataatcaaggataatgttgaggtacctcggaaagaaaacagtgagcgatgtgcaggatcagtgtaaaggacctgctatgcttgaattttgagcttttacgtttggatagatgcgtattgacactaatcagtaatcagagacacaccgtgatactgagaatcaaacacatttctaacaatatgagattatgataaccattattactgatatttccatttaatcaaaatgtgtatgaattaggtataaaagtatacagccatttacacccaaatctaaaactaataccttcatgactccttaattcatatcctccaatatatccatcagagtagatcatcaacccaaccaaggcagtgtgctaccaaacaatccaaactacgatctacaaacacaacacaaatcaagaacacattttgacctgacctgacacgattcacctcaagaacacgcagttcttgtgatctttcgtgtcattttcttgctgctgcttctgctcgttggccttccagccattgggcacccaccaaactcggatgctcttgtcgagccctccactgtacaccatgcagccattgctgaccctgcaccagctcgcctggatgcatttcacggggccctcatggcctctgatcacgcccaccctggcgagggcggcggcggcggcgccgtcgccgtcgccgctcgtctgccagcgccacagcccgatggtcttgtcggcggagcccgtgaagacaaggtcgccggcgacgcacaggcagagcacggccatgtcgtgcgccttcacgtcgcaggagaggctccagcggctgcccctgccgcctaccctgtcccacccgacgacgtgcccgtccgacccggcggcgtacacgcggcgagccccggcgtcggcgctcgccacgagggcgttccacgacacgccgtcccgggagatgaggatgccctggaggaagtgcgccgccttgcctttcccccacgccttgacgtggccgtcggcggaggcggagtagatggtgccgctgtcggcggcgacggcattgatggcgtcgtcgtgggcgtggatcgactcgaggcacttgaggtcggagatgcgccagaccttgagcgtcttgtcccaggagcccgagtagacgacgccgtcgtgcacggcgaggcaggagatgctgtcggcgtgctcgatccagaggcggcggtggttgcggcgtgtctgcacgtagctggcgtggcggaagatcttgcccaggtagtccctggtggtgggcagcgcggcgacgagcttgaacgcgttctccgaccgccgcgacacccgccagacgcggacgcggccgtcctggtgcgcggagaacaccctgccccccgcggcggcgagcgccttgacggacccctccccatgcccgaacctcgcgaagcggcggagatccggctgctgccacgcgacgatgtctgcgccggtggacgcgctgagcaagaactccccgcagagcgagagggacgacaccgagccctggtggtccctcagcacggcgagcgccttgaacgagtccctcgacatcggcaacgcctcgacgacatccgacgggacggccgggtcggagaacgacgacgaggtggaggagaacgaggcgacggacgaaaaggaggagaacgatgcggaggagacgaaggcggaacgcgggagcaacggcgcggacatagcagcgcggtctgttggatcccgcaatggcattgccatggccgcgtgcggggatgctttcttgaggcgagcggacgcggaggtggtggcgagaatagcagaggctgcgaggtgttcgtccgggacagagaggccgaggcgggtggtttgaggcgacgacgacgactcgaccgagctagcgcgnncngnnnnnntnttnnnccccccccccccccccccccccccctctttcgagaaaacgaaaaagttaatggcaggtggggcccatgaggcaggggcggttcaacggctactaggcgcgggctgctttgtcactacggttttacgttttctattcgtcaaaacggaaacagatttcgtttgtttattacggttaggtgagtaggtctgatcgtttcgagcgtttgccttcatttcgcacaagtttgctgatttcagtgtttttcttgctgtaaactacacggtgataattttgaatctgccatcttttctccaattcaatatattaagcggtgaatccatggaaaaatttgcgggactttacattatcaaaacaaaattaacgccgaccaactgattgcacatgctaccatgatggaaaatacgcatcatataatcagaaccatacaagcacaataggcagtaaagcaagaaattagaggtcacatgagcgcactaagcataacactttctgtttcttctccccttattcggacacttgtccatgtttaaacaggcttaatgatgttgatgcagtatccagcaatccagcatcatgaagcactctgaacagtaacaacctgctacaacaatgggattaatgaatcagatgcgcattataaaaaccaagacagaatcagacacgcgaattatcggtgagacgttgacagtctgaaactccgaaagaaaaaaaaaaggctggtgattcgggttgttctagaagcatttgacagggagcccaaaatgtttcagagctcattactgacgaacattttcaactcgtgtgtctgattgcattagaggttgaaccatttttctctcgttttttcttgtatatgatgcacttgaagcacaaggcaagtccatggtttaggtagagcaagctcttgtgtactgccatcgttttagttctctatggctggaggtgccttcaaggctagttcttgtgtactgaacaactactgctgaatatatatacagtctactaatactaacactactattaatccaccgaccaaagtcagcagacagcgttccatagtgctatattcatatactacagagtactccatctgtattttaatgtatgacgtcgttgactttttaataaacgtttgacctttcgtcttattcaaaaaatttatgtaattatcatttattttactgtgacttgatttatcatcaaatgttctttaagcatagcataagtatttttgtatttgcataaaaaattgaataagatgaatggtcaaacgttggttaaaaaatcaacggcgtcatacattaaaatacgaagggagtgttagatttaattgggtaattgatccatttaaatcaattaaaccaaataaattccaaggctcattatgctaggaattcatgtgaattcattcttttatgggatatcaatgggatgaagagttttgagaattaatctatttgattaaggaattggtaacttatatcaattagttctaattgatggatggttgatggttgtgtagtggaggatggttcatggctagttgatgacaattagttgctctattcctcttcctattccatgactcttactcttcatcttccattcctcttataaaatgagaatggatttgatctcccgcgagaagaggaagacacactttcatccattttccaaagctgttgctgctacggtaatcccatcccgacgagtgtgtgcacacgcgttgggagagtaggcctccgaaaccacgcgttgctgcgacgtttgcacagacgggcgggcgatcaggtttttggggagcgcaaggcgcgactactcactgttcgtcaacatctacttcattttcaccaacatgtcgaacactggagacaaggagaaggagactcccgtcaacaccaacggaggcaatactgcctcaaactccagcggaggaccattcttggggtataaccttattacattatttcaattagaagttttactgttaatgttcatcgcaatgtcaacattgtgtcattatgtgattgttgatgcttattcaacgttaagcatgctcatgttgattatattcaccactatcactggatcaaattccattgtaaatatcatgtttattatcttgttattttagattaaaatatgccgaattatgaccaaattttcaacagggagtatatgttaagcttctgaagcttctggcttcttctaatacatgcagtggaattagtactggtttattcgtagcttggcttgaagagaagatgcatcatgcatgtaatgtaagatgtgtaagctggcaagtttcttgcaaatctgttcacgtcttagctcagtagttcctttcgttgggacttggttttgaacagaagaaacactcatgccatggtgtaaaatagccaatggtgtttcataaaaagacatgtgcaattacagaagttttatagaaaagtagccaattacttagtgcgttgacagtacggacgggcagtcagagagcacccaatgggggtctgctgctatgaatttctgatactccgacgcacgggatcaatgaagaaaaggagaacgcacaacgccgctgctattgcggtaggtctaattcaaaaagttttcaaacatttttatatgtttccaagcaaaagttgcagtacggtagtagtatttgttcttgaggatatgtggctcacgctcaaagcaactgccgccctttggtcggagagagagcatgcaccttttgatcaaaaaggttggtcatatgttccatgacatgagtatacactaatcaatcttcataggagtaatttatttttgcttccaatgagagactagttgatcttccaatggagtagctacaaatcttatttttcttttttttcttatgttcagctcgagtagttgagaaaaataattcttatagtgctcacctatagagcctgtatcacaacgaggtacagaaaagctctgaaagtctgaattgctatgctttaagcaggcattgcggccataattcttccaaatttcgatgggcctaaccaactacctctatgttctctcgtatagtgtgtgataatgcgtatgactagtgcttgtttattttattttttttcacacgactgaaactctgaaactaaacaggccaagtcgccaagagatggagcagaaccgtaggagtacagagtacagacactaccattaaaaagtcaaaacgggccttggcaacgagatagatgggctcaaagaaattgggccctcttctctagcgtaggcccaccagagaattttcagccgggccggaagcctggaattcccctgaatttgggcccagagttgaaacagacaattcacaggggtcctactgcaaatatgttactacttcgtatcatatcatttgcaagagagaggaaaagaaaaaactcttaaaacaagggaaaggagaaatccaagccaatttgcgacgaaccctaaccgcccaccaaatcctctcctccttccccaacggcgagcgtccccggcgaatccgccttgacggaggcaccccggcgagctcaccttcccggaggaatcccagctcagcctcatcgtcttcggtgaggtacgcatccctttgtcccatcacttttcacccgtcaattgcagtccccgacctggtagaggaggggagcacacagccgacgccatagcagcagcaaatctgacgtgccgtccgcctccgctctgctgcgggcgtcgattctggtgaccgtgccatgtcgcgctcgatgtgctggccttccggacggccggcgccgccatctcatcccgtagattccgaatcagcgagaaacgtgtgttactcgtgtagggaggggaacgtgaggaggacgaacccctacacctacaccttaggagttttgtgcctcctcccgatgtgaggggaataggggatcgtgtttcctgggcggagaaagctcttattgttttctgattatacacaattctgagtagtaacacgtgtctactgtgtctgtgtcccttccgcattttccgcttagtgcttacagcccagttgaacccaaatcagattttgtactgagcaaaatccttgaaccaaacatcccctggaaaaacttgctccttatcttagtgagaaatgaaacatttatcataattacattggattatttttttcttacatgtgcattttctgtatggccacgtgccattgaacatgggaagtagatctatttttctttcaccatttagtttacattgcatagcaggattttatttatgcagacatagtatttatgttgcatcctggatagtaaagtaatactagttctacgagtatgaatatgaatttaattttcttaccaaaccatataaaccatcataccctagtgtgcttacttgacttcatgcgcaagaaacttataagtgtggattctcttcatatatctgtagggaaatatcttggtgattcttgggaaccttcagaaagaccacttaatagttttccttggcccagaaaggcttgaggcttgagagctgaaaagttctgctggagctagtgctataatggccacaaaacttgtggtaagtggacaatctttctctttttaggattctataaacgaatgtgtcctttcatagtttaatcattcatgaagaatgatgacatgagatttatttacttaggttcttggaatcccatgggatgtggacactgaaggattaagagagtacatgggcaagtttggacccctagatgattgcgtcgtcatgaaggtttgtagcaatttcatattcagaataagatattagatgccatattctttgtgtttattacatgccattaagatttgaggagaatatgtttcttgtctttttaaagttatttgggaaaccacagcctcacatgttgtactgttggtaatctattcctttcaataatgagtttgccttggaacagatatggctatgtgcttgtatttcgctttcagtatctgatttctatttagtcttcctttttctggggttgtccgccaaaattgagtcctgaatttctggatgcacatcttaaataacttcttcagtactgtattcatcaatttattagcctgatttggtaatttgtgtactgactgaccactatctttcttgtacgttaaaattataggagcgttcgtctggtcgatctcgtgggtttggttatgtaacgttctcatcagctgatgatgccaaggtagtaatcctgttctcccagatttgctgacttgatattacattgcatgactagtgttgtattttaaatcttttgttagagtttatatatcaactgtgaaatatcaaccttcgaattttttaagaggtgcttagtaaagtggtttactaattaatgtggtataataaagtggtttagtaatatcttgtttactaattaatgtggtataataacatggtttagtaataccctatcttctaacatatttggtactgctgcaatttattcgttctgaatcattctgcaacatttttttcagaatgttcttgagtgtgagcatgttctcggaaaccgaactctagaagtgaagatagccactcctaaggtaaataaaatacaaacatatattatatatgctagcagtatgttgtacagttgattcacatcaagctgtagttgactatggtgtatcttgtcattgaataggaagaaatgaaatcacagggatcaaaaaaggctactagaatatttgttgctcgaattccgcagtccgtggatgagtccatgtttcgtaggtaagctatagcttcagtccttttgttcagcactcagttcacttatcagttgaatatccgagcttgcataaagactctaatcagaacattttattgataggcattttgaagcctatggagaaatcactgatctttacatgccaaaggtgagcaaatttggaattatttttaaattgctaaaaatatttatgtattctctgtgatatcacaattaagtaccaatacaagtagatacactctttctatatagttacctagatttgcttatcactagtttaactagatttccttccgataaggacaaatatctaaactaatcctaatgctaggattgtctggactcctgtggccttcgctaattaggcatgcatcttataagagactggatatagaaggtgctgattgaatttaagttagcacaggcgaagcatttaaaatagcattcttcttgtttgtcacaatcagcattaagctcataagtggattttttttggtacgagtatttgttttggtgctacaattgattattgaaattatatggtaatgaatggagctacaatgctaaatatgataagattttactgaaatgagtcttccaccctcctgttttgtgtgtaggaacatggttcaaagggtcatcgtggaattgggttcatcacttttcagagtgcaggtacgtttgcagaaatcctccatcatttattcaggcgttcattttaatttgttgttggggaagaataattttagcatagatgagtcttcatttatataaaatggcatcttgacctgaaacctttacttcatgtctgtgttctttagggatgattgcttttttccccagtttgatctttaagcttgatatgcattttgtaattaccttattcaatgcaactgtaatgttacagaatctgtggacagtatcatgcaagattcacatgaactggatggcacaacagtagttgttgaccgcgccactcctaaggtacctttgctccaaagcacttgccattggtggctgcatccaatagtatcttatctttgagtaggctctgtagtaggacattctatttactgaagtagttatgtacttgttaccacctgaaatccatctgaaccaggatgaagaagtcagatatcctccaagcaggggggcatctcagggtggctatggtgcatataatgcatacatttcagcagctaccagatatgcagctttgggtgcacctactctgtatgaccatccagggtcagcttatggaagtaagtcttctgctacgaagatcacaggtttgacacaaagcaactttgttaactggttaaatgttttctatttgacttacattgactaggaggaggatactatggatcctcccaaggaatgggcaacaaaaagatatttgttggcaggcttccacaagaggcaaacacggaggacctaaggcattactttggcaaatttggccgaattgtggatgcatatatcccaaaggtaaggttaagactttctcattgtttgtaactgtactatgttaatctcaaccttttctaattgtattgaaggaccctaaaagaagtggacatcgaggttttggttttgtcacctttgctgatgagggtgtggcagatcgggtagctcgcagaagtcatgaaattctaggacatgaggtaaggctgttggtgtctccttgtctctgcttcccatgcctccaaagccaaagtgacaatgtcaaccttagcttttctttggggaaaagaaaaacactaatcataccattccaatgtttcaggttgcaatagacactgctgcaccacttgagggtgactctggtggtggttacatggaacccatggatctttatggggcttatggttcaatgcgaacttatggcaggttctgcagtggtatcgactatgatgtaagtgcacaaatacattattatgcttatgatgcacagtaggcttatatataagttaattggtccgagtacatttgtgataacagagctgtaggcttaatgttggttcgttgtgattgtcaccaattatctgttgaatctcatgcaaatcatctaacaaaaacttgttgatgtcccagtacggttatggtcacagcggaagtagcagtagcagatcaagggctgattggcgataccgaccttactgagcctgctgtcttgttactgttaatgatgttttagtttacctccaagggaactgtggaaacggagaaaagaacaactccataaagaatgccaggttgtactatgttaatcttaagcgggacgggacatacgtggaatctgtatttcagttcatcctgtaaatttttctttgccattagaacgcattaatgcggtttctgtgccaggatgccatgagatcgaggcagcagtgtagttatcattattgtggaagtaccatatgtaataacaatctttcttctacacatgtaaacggtggttctggtttttgagcctctcgtgcctgatcctgctttcttgtctgaatccatctactactgtattggtttacaattgctattgtgagtacagttctctatctttgtgtttcccacttctacttcctctgatggccaccgtcgccgtgttcttcccgctgccggtggcgaaggaagccttctacaacacgccggtcggccggtggccgtacgtcggcttcttgcggttgcgcgtaaggatttgtccatgagccacgtgatatactctctgtgtgtgtgtttgctttcttgggctgtatcgactatcattgtctgacatttctatggcccggtcactgttccatgcagaaaaacttaccagcagactgcggtgaattgcaagaccaatgggatgactgcggtgaattgcaagaccaatgggatggcttcgataaatgtcgatagcaatataaatcataaagtcaaaaatggcaaagtgtttgtgctgcagccgtgcatgatttccactccctcccttgactagttgtacgccaaacagagactttgcttcttctaggaagcttatattctgtactgagcaacgccagtacgccaccgatcatacaagtagtaaatcgcagagatactatatactccgtactactgtagcaactagcaagtagtaagcagagatcgacagcgatgtctcgctccgtcggagtgacaatggacgccgccggcgccgatgcagaccaagcccggctgcaccagctgggctaccggcaggagctcaagcgtggcctctcgtatgtgattcttctttcgttttttatgtttcttttcccatgcatttcatattgcgatcattttaaatttcaccgtagcttgtgagtgtaaacttaccatattgaatcctttgttagcctggtttccaacttcgccttctccttctccatcatctccgtgctgaccggcgtcacgacgacgtacggcacggggctgcgctacggcgggccggtgtccatgacgttgggatggctggtggtggcggcgttcaacggctgcgtcgccctgtccatggccgagatctgctcggcgtacccgacttccggcgggctatactactggagcgccaagcttgccggaaaggaatgggctcccctagcttcctgggtcactggctggtgtgctcttcgctaacatgttaatttatctctcatggtttaatcgttatcatgttttaaattttggaatttaataatatttccttattatgttttacaggttcaatattatgggacaggtatgaatatgtttctcacgggttcacaccaagtctaaatcatatatctctactattttaaaagcgaaattgttctacttacatgctctcatccgaatatgcataacgttttacaggttcaatattgtgggacaagtatgaatatgtttctcactggtccacactaagtctaaatcgtatatctctactattttaaaagcgaaattattctactttcatgctctcatccgaatatgcataacgcgtctgttcacgaaaagtaaccaccatccctccctaattatatggtgctggcccattaacgtataggcggctcatatccctaattatatgggtctaattcattataacatacatgcatataactagtaaaaagaagagttaattttacactctcgaactgttttcagaaagtgcagaaatcttttgagggaaaaaagtgcagaaatctgacactccaattgctcgttaactgatcctccagtgggcttgcacgacgagcgtggatttctcgctggcgcagcttctccaggtgatcatcttgcttgccacgggaggcgccaacggcggcggctacatggcgtccaagtacgtcgtgttggccatctactctgccatcctcatcctgcacggcctcatcaacagccttcccatacgatggctctcctggtttggccaacttggagctttctggaacgttgcaggtgctgttcgtcccggccatttttcagatattcagtgttgaatcccatatatacatcatctcattcttcggtttgtctgtttgaacaaacaattccaggtgccttttcgctgacgatcttgattccagcggttgccaaggagagggtgagccctgagttcatctttacccatttcaacgcagaaaacggcgcgggcatccacgacaaggcatacattctcgcagcggggttgctgatgagccagtactcccttatcggctacgatacatctgcacacatcgtaattctgaactttctgatagctgaacaatccttagtttctcgttgcatacatacaattcatccactaatcttctcctcgcatataaatattcagatagaagagaccaagaacgcggattggagtgggccaattgggatcatcacgtccgttgcactgtcaaccatgttcggatggatctacctgattgccctgacatcgatcatgaccgacataccttacctcctgaaccccagcaacgacgccggcgggtacgccatcgcgcaggccctgtacaccagcttccaccggaggtacggcaccggcgccggagcgctcgcctgcctgggtgtcatcgccgtcgccatcttcctctgcggatccgcgtgcatcaccagcaactcgaggatggggtacgcgttctcgagggacggcgcgatgccgctgtcgcgcgtgtggcaccgcgtggacagccgcgaggtgcccctcaacgtcgtctggctctccgtcgccgtggccttcgtcatggctctcacggtgagttgcacacgcgttgctgctgctgctgctgcaaatttctcgtgcgcgcgtacgtacgtgctggtctcatatagtgtacgtttttttggcacagtcgctggggagtcaggtggctttccaggcgatggtgtcgatcgcgacgctgggtttgttgatcgcgtgcgcgctgccggtgtttttccgcgtgacgacggcgcggagatcgttcgtgcgcgggccgttccacctcggcaagtacggggtcatcgtcggctgggtgggtgtggtgtgggtggccaccgtcacggtgctcttctcgctgccggtggcgtacccggtggccaaggagacgttcaactacacgccggtggccgtcggtggcgtgctgctgctcagcctcgtcgcgtgggtgcttcacgctcgcttctggttccaagggcctgtcaccaacgttgacacgtacaacgtaccctgaatttgtatccctggattagctagcgagcacaggtggatcagtaacttaaattttgtgcaattttctcttgagagggaaaaaagatgtgcatcttgttggttgtaatggggacaaagaccaaaataagcccaacgaagggtgctgcacatgtggctcctccatcgaacccaccaaaaagagcaattttatattctttgagaagatacatgaggtaccactttttttaattgtaaatttggtacattttagtacctaggtactacgaggtactaaattttacactaaaattttagtacctcatgatacctagtcaaatactgtaaaattgctccaccaaaaaaagttggccgtctatttggcccatcaccaaattgggtctctaccaatagtaggcaggatagcagatatggtttttgagaagagtagcttactgtgtcatcgattgtcatcttttatagatgtggtattgatagttaggaaaactagcgagaacatcacgcattgcagcgaaacctatctatgataaaacagaaaacaatggataaaaatatgtatttgatcggttgtatatatatatatatatatatatatatatatatatatatatatatatatatatatatatgtatgtatgtatgtatgtatgtatgtgtgtgtgtacataacttcaactttaggtgtttgctccattagagccaagtcgttagaaagaaaggtagttgccattcgtaagccataacacccatccgttagtaagtaagatagttgacatttatcactcttatgctaataaatttatacccactatgaaaaatataaaaattaaattatagttagtactcaacaattaactgaacaatcatagatgagtgaagaattatcatgatgaaaaaacccgttatgtaaacacttcccgaactgctaaacaatgtatttatgaaaatataaaaaaagttactttcaaaattcatattagtcatttttttttaaatttaagtagttaataatcaattaattatacgctaatggtttagcttgttttgtgtatctttccaatcctctctttttctctcctagaatcaaacacaccccagataacttcttgatcccataaggccataactactatcttcatactaattcaatctaatgataaaatattgttgatgatgtggctctatgtatatgttactttgtaggaattaatattttaataggtataaactatataggaaaaagatagatgcgtgcttgatgaattgaatagacttgtcgccgacataactcggtagttttttttttttgggaaaattcactgcggggcaagttttttgagttacatattaagagagcggaggaagagaagagggtctttcaggctgaaattacaaaacgatcatcaagtttaatttgctcagcctaaagggacgcatcttctatacattgcacatgactcggtagttattggagagatcaacgaaccaagagaacatgggcatcacaggttggcaaaagccagtgcttaatcagacaatcagtggcaattactaaggcatcatgtagtacagtagtagtatagaaattatgttgaacttttctcaatgatcaacaatttgcgcgtgctctaaggtacgtaggaatatgcatatccatgtatatattatatattccaagatagtatggtaaactgattattaaagtatgcgcgtatccacatggattattcctaaccgatcgtatggtcaactgatcattatatagtatgcacgtccacctggactatttccaacggaccatgtattcatatcaactgataattacggccctatgcatatccacatgggtcctgtttggatccggaatcttactatttatgagtattaaacgtagattaatgataaaatccattccataatccctaggctattttgcgagacgaatctaacgaggtatattaatccacgatttgctacagtgatgctacaataatcatccactaatcatagattaatatacctcgttactcgttagattcgtctcgcaaaatagactaggggttatggaatgggttctgtcagtaatatatgtttaatattcctaaatagcaagatttcggagggctatttaatagcccggaggatccaaacaaggccatggattattattgttcccagctgatcgacatatatatcggtttccataatctataaggtagtagtgtttaaattaggtagtgtctgttatgtatattgtctcttaattaacttgaggatgccccacacgttgctgcgggacttggttaatatcaatttgttagataggaggtacaatctcaagaagaaaggaagaaacaaatgactttcttagagaaattctttttagcaaccctgtccaaaatttgtagataatttaagtagcgcattcaaagcataagctacaaagaagcaaaatggtctgacgtaagttaacaaattgtaatgttaactgaatgggcattcggccatgaagctcttttatacggattgatgggtcggatacatgtagatgagtgtggagatgggttaatgtgttcatgtgggctacatttggcactaaggaggcgaagagactcacccggtgcttgatgggttgggctctatgttgcgttccatccaacgtctaagaagcaatctaatgcattcatccaatggttcataattgatgatgacgtggaagcatgaggtttgagcttttggcattaactttatgaaagaagggacgagtagcttaatctataaggatgactcatattccttgtgagcgatattcgcgatatgtctttaaatttggacggtagtgttacttagatccgtgatcttgtaaattacatatttagattcataatcatggtttaatataccagagcagataaaaacgcgtttcaagtgcccacttggttgaccaaggtagttgaaacattacattcaagacctctaaaaaccattgtggaaaaacaattacatatagccactgcaccctatagtacacacctaaaatgtccattcacctcccctcctccctacgcatagtcgatagggacggtggcgattagggcaacactgatgagtgatgattgtcaatgagccgaggcgctttgggcggagcagcaccattgttgacatgaaggcgagcgatggaccttaactttcagggcagcggcacacgatatgcaatccttttgccaaggtggctttcagagatgggcgaatgcaaactttcagctagcatggacaactacgttggcgccaagaccagtcacacatgcttaatttgggtgcaccgtgcacctactctctatgaccatcaagggtactattactatccgagatctatatgacccgatcgtttgtttgtttaatgcagtgcagagaaatgcaaggccaacaagaaatttcttcatgtggatggcatcatcttcattattcttaagagtaaattgtactttgcactatgtaaattgcatcgtgtttcacttgtttttacatggactcaattgctatgtggcaccgctcctgcggtaggaatcactgacatgtaggcccttgagcaagtggcaccatcgacatgtcaaaagtaatattgcagggggttgcttatactttcactttacaccaagttattttaaaataaatttcacttaacatcgggatgcatcatcaagcctataaaatttcataaaatcaaagaaaaacatgttgtgaaatatggtctaaatttaagaagctcagtatgttttactcatattttacaatcctcgtgttcaataataatgtaatatgatgcaaacctagtaaaatgaaaccagctatattactgccgtctcccggttcaaagggcaaagggcaatttactctgttttaatgcacggagaaatgcaagaccaaagaaagggatggctacgataaacgtcgatagcaatcaatcatgcaagtaataaaaaatggcgaagcatgcgaaagcgaagacgccggagtgctgcatccgagcatgatttccagtccctcccttgactcgctgtacaccaaagactttcttcatctaggaagcttatatatattcaattactgagcagcgcaaccgcggagatatcatagagaaaagtagtgagcagacaccgacggcgatgtctcgctccggcgtggtggccatggacgccgccggcgccgatgcagaccaagcccggctgcaccagctgggctacaggcaagagctcaagcgtggcctctcgtatgtgcttcttcttcccttcttttaccacacttcattgcgatcatttttcaccaaattaagcttgtgagtgttaatttggcatatattgcaatcctttgttagccttgtttccaacttcgccttctccttctccatcatctccgtgctgacgggcgtcacgacgacgtacggcacggggctgcgctacggcgggccagtgtccatgacgctgggttggctggtggtgtccgccttcaacggctgcgtcgccctgtccatggccgagatctgctccgcctacccgacctccggtggcctctactactggagcgccaagctggccggcaaggaatgggctcccttggcttcttgggtcactggctggtgtgttcttcgcgtcctagcttaatttatctctcatgctttaatttaatcgttaacatgttttaaatatggaatccgcttaatccttttgtcttctgttttacaggttcaatattgtcggacaggtacgtgcattcaaactccatgagttatgtagaagtttataaaaaaatatagtagtattttcagtacaaaacaaatctattataaaatatattaaatggtacatttagtgagattaatttgatttgtagacgttgctaaaattcttataaatttaaaagtttaacttagaaaatagacaaaacgattaataatatgaaatggaggaagtaattaatgagccatgatttttgaaagtgctttcaaatatgaatataattttattcctttttttttctcaatatacctttggactaattgttgttcaaacttcacgatttcttaaaaataaataaaaaaagtacattttgcactctcgaattgtttccagaaagcgcagaaatctctgacgctccaatcgctcgttaactgctcctccactcatcccagtgggcttgcacgacgagcgtggatttctcgctggcgcagcttctccaggtgatcatcttgcttgccacaggaggcgccaacggcggcggctacatggcgtccaagtacgtcgtgttggccatctactctgtcatcctcatcctgcacggtctcatcaacagccttcccatacactggctctcctggtttggtcaacttggagctttctggaatgttgcaggtacagtcgactcaacgtcccgaccgtttcttcagatattcagtctgaacatttacatcatcagatcatctgatcgtgatttgatctttgttctgtttgtctgtatcaacacacgatccaggtgtgtttgcgctgacgatcttgatcccatcggttgccaaggaaagggcgagcccagagttcatctttacccatttcaacacagaaaacggcatgggcatccaccagaaggcctacattctagctgtggggttgctgatgagccagtactctgtaatcggctacgatacatctgcacacatggtaataaatctgattgttgaatgtcctgaacaatcctactttctcttcgtatgcattcaactgatcgacgaatcactgaatctttttgtctgcacattcagatagaggagacgaagaacgcggattggagtgggccgatggggatcatcacgtccgtaggcctatcaaccatgttcgggtggatctacctgattgccctgacatcgatcatgaccgacataccttacctcctgaaccccagcaacgacgccggcgggtacgccatcgcgcaggccctgtacaccagcttccaccggaggtacggcaccggcgccggagcgctcgcctgcctgggtgtcatcgccgtcgccatcttcctctgcggatccgcgtgcatcaccagcaactcgaggatggggtacgcgttctcgagggacggcgcgatgccgctgtcgcgcgtgtggcaccgcgtggacagccgcgaggtgcccctcaacgtcgtctggctctccgtcgccgtggccttcgtcatggctctcacggtgaattctaagtccattgctgctgctgctgctgtaaatttctcgagctgctctgatttggttgttttctcatggcagtcgctggggagccaggtggcgttccaggcgatggtgtcggtcaccacgctggggctgtacatcgcgtacgcgctgccggtgtttttccgcgtgacgacggctcggaagtcgtttgttccggggcagtttcacctcgggcgatatgggctcatggtcggctggatggccgtggtctgggtggccaccgtcacggtgctcttctcgctgccggtggcgtacccggtggccaaggagacgttcaactacacgccggtggccgtcggtggcgtgctgctgctcagcctcgtcgcgtgggtgttccatgcccgcttctggttccaagggcctgtcaccaacgttgacgcgtaaaacgtaccctgaatttttgtaaatttgaacgcgcgtaccctgatttgataaatttcaatttgaagcgtatttgggtttgaccacgaattggatccgtaccgatccgttaaactcaaaatttgtgttccttttggaccgatataagcccaacgaaaggggctgtgtaggtggctttcctaccaagcccaggtaaaaagtgggcttgcatttggcccgttacggaatatgagcggtcaacatgggccggattggtttaacagcttgactttgggccaccgtgaaatgagtcgctaatcctaggataaagtacactgaaggtccctcaacttgtcgtcgagttacagaaacgtcctctgacaagatatatcacatccctcaacttaacaaaaccgtttacttcggtggttggttttatgtgacgtgacggttgagtcagcagacccacgtgtcagatgccacctcatcacttctctcttatttcgcctcttctttctctcgctgtgctcatctggccaggcggcagggtggccgacgggtggggactggggaggaggcccccgcgggggcggggaggcagaggtccggcggccggcgtccttcttcttcgcttctttccgctaggcggagtcgccagcggcggctttctccaccgcgcgcagccgggagggaggtgagaggaggaggtccggcggccggcgtcgcgccctccgcccgcatcctcgttgccgccgctgtggcggccttcttcttctcctctttccgctgagcagagtcgccggcgacggcttcctccatcgcgcgccgctcgacggggggatgccgatggcggcggggccgcgtctcgccatgtagcagccgtcgatgatcctcgcgccgttgaggagcatggcgaccaggagccggcggcgaacggagtcgaccaggctgcggcggcgaacggaggcaaccaggctgtggcggcaaacggccagccgccgaggtcgcccgctgcagcgctggtgaagttaggatgatgccttccagttttgctctgatatgagggaacaatgatgcctggaaaataccagctactgacaagcacaagggaaagaagaatatgaagcatgtaaaatgaacatatctgcagccaaaccatttcaagttttcaaccaggctattttgttaatgctttgcaccattgctctgcccgtcaggatatccaattatccattattcacaggcccaaaggagtagggtcagtttctaaacctcgcctaaatagagcagagaaaaactacttattgttacaaggcataccttcaaaacaacagctcccccagtggagtgaccaagaagaaaacagaggacccctggattctcaagcacaattttaccaagaagtacatcttgtttgaagataataatatatttcataagtaactgaatgaaggaataattgcaagactgcttgcttatattcagacttactgtatcttctacaacataatctagtgaaggcacatcaccatgtagaccatcgctgccaccatggcctgacattgtatatgagttagagttagcctgttaatgttcaaaataaaagcagaaccaaacagatgttgttgataaaaaaacaatgcaaactgcatggataaaatcaatgaaattgcctactgtattttgttagtaagtgtgcactgcagagtcaatttgtgctatgagtgaacagaatgtggtaacattacaatcatgagctattctgaataaaatttcatgcttttgtccataacaaacggtaatactttgttattttgattgcaagcaggccgccgaggtggcctgctgcagcggcgtctgcacgacctcatcgccacggacgccttccaccgcgaccaccaggcaccagcgccattgctcccgccaccccatgccgctcttcttctaccgtctcgaccactgggcctaccccgaccgcgtcgcgtccacctccgcggcgtcgacatcgccgcccgcgagtcccacccggtcattcgcttcgcccacgccgacgccaacctccgccgtctgccgcacgcccggtcatctgctgcacgcccgcgccccgtctgctccgccggccggccgctccccgcaccgtcgcctggtcctccggcaggcccgtgctgcgggtgcatctgccgcagccgctccgcccgccgcccgcccactccgcccgccgcgcgctgctcctccccccgccgcccgcccgcagctcctcccgtcgcccgccgccgcccgctccgcccgcagctcctcccgtcgcccgccgccgccatcactgcagccgcgtcgcccgcgtcgccatcaaattggagagaagtgagagatgaggaagggagagaagagggggagagagatgacctggcattatgacatgtgggactcacgtgggttccacgctgactcaacagccacgtcagataaaatcggggtcaaaaccaccggaggatctatagtgaacggttattagttgagggacgtccgatatctggttttgtggttgggggacgattttataactcgatgacaagttgagggaccttcggtgtactttttccctaatcctatcatgggattcgcttgagccgtcggatgtaaactgcgtggtccagatcgatgcggatgcacctgtcttacgatgtttgcgacggggacccacgataggaaaaggtacacccaaggtccctcaacttgtcatcgagttacaaaatcatcccccaacggtaaaaccagatatccagtgtccctcaacttataaaatcgtttaatttaagtcattcggtgattttaaccccggttttatccgacgtggcggctaagtcagcgtgagccccacatatcagtatgccatgtcatcccctcctctatctaacttcctcctctctctctctctctcacacacatttctcctctgtgctggctgccgacgggtcggaggaggtcgctgggcgaagacgggcggcggcagggggagaccggtggcacacggccggccgagggtcgcctgccgctgtcatcgccgcggccgttggacgccgacgccgacgtggaagcggtccctgagctcactgtcgtggaccccgacggtggtgaggtgagcaaggatgtgcggggtggtgggggcagccgtgtatgcagaggcaacagagacggcgggcggcggtcgacgtcgaccatctggaggcggaggcgcgccggtgccgctcttggatctcggccactacgcgggagtagatgaggttgggagcggaggaggcccgcgggcaccgagcggtgtgtcgtcggcgcgtcgccgccctcaccgacgacgtggagagcgccattccagagagagacagatgtgggtgatggccaacgacgcggcgctccaaaaagttgctcgtaaggtcgaagcagccggggcggctgccctggatcgaggcgctgcagatccatcgtcggcggaacgaacgagcagcagtagagggagcagtcaatcagtcatcacttccctcccttgagtattaagagtggttctcactcgattcacttgcacactctttcactccactgctccagtccagtgtgttcacatgctctgccccaacgcaattcaagcaagcagatgagatcgatgatgcgtctcatgatttgctgcctcctagtctctgcgggggccgggggaattgcaggcgagggcaacttggacgtggcgctcctcctgcagtgcgtgaagccagcgctgcggagggaaggcgggaacacgcagctggccacctggaccgcctccaccccgctctgcctgtggcgcggcctccgttggtccaccgccgccacgctatctccaccgaatcctaggaggccgctgcacaacccttgtcgccgtccttgctgccgcatcctaggcgcctcggcttgaggatgcccttccccttcatcatgctacagagccggtggccggcagaggagaagagcgacggtggcgctcggtggcgtagacaccagagtccgccgctgccgccgccctccccttctcccacgtcaccggcgacctcctcccgaccctgcgagagcagaaaagtgagggggaggggggggggggggagatactgaattatataccacttttagatgtggaaactaactggatccatatgttatagacatatgtggacccatatgtcattgagatagacgtgacaaatagttaattgacaaatctaaaagtggcaaatagttaaatacccgggggggaggggaggaagggaaaggagaggaaagagatgatgacgtggcaccctgatatgtgggtcctacgctgactcagccgtcacgttggataaaaccagggttaaaaaccactgaagaacccaaaacgaacggttttgtaagttgagagacgttgtatatctggttttgtggtttggggatgtttttgtaacccgatgacaagttgagggaccttgggtgtactttttccccaagatattcttgtggtgtttattgggcctaataggccgaggactcatcaatttcatgggcttttcctcggagtttttcctccgcgcccgccacacaggtgtgaacaaacagatcgatcagagacagcgagggatccggtatacatcgaagagctgaagaccaattaatgcacaagctgaaacaatccaaaaatatcaaagcaatttgcattattgtccggaaatgaaaggcgacggttaaattttgctactatcctacccaatcaaataatatccccatccacatcttgattcttccatcgtagagaagctactgcctaaaccagacactagtaccatgcactgagcctgtaaagtttttgcaaatctactgcaaaggaagcacgatacagatggcgctctctcgctccgtcgaggtggccgtgcccgccgatccggccggcgatggcgatcgagataaaattcggctgcggcagctcggctacaagcaagagctgaagcgcggcctctcgtaaggagcagcttatcttatgaatttaccatgcgaagcctcgcaaactactactgttcattggcatctttggttaattgtttttggccttcgtgagctagtgttctctccaacttcgccttctccttctccatcatctccgtgatggccggtgtgacgacgacgtacagcacggggctccgctacggcgggccggtgtccatgacgctcgggtggctcgtcgtgtccgccttcaacggctgcatggccctgtccatggccgagatctgctccgcctacccgacctccggtggcctctactactggagtgccaagctcgccggcaacgactgggctccctttgcttcttggatcactggctggtgagtacgtgtatgtattgtgaattgtccgtctctcatgaacttctcgttccaagaaatgaggaaagccttgcaaaaatttcatactccagcatcttttaggcttcgtttaaaataggatatttttataggattttcgcggaaattgatcgatcgtatataaaaatcttgtaaaactcgcacattccaaaagagacctttattttctcaaaaagaaaaaaagagagaaagacctttatctcttgttctgtttttcattccttgtgttctgctttgcaggtttaacatcacgggacaggtaggtacattcggatttctgggcccgggcttctcgctaattgatgggcctttttattgggccatgagtacagaaaggaataagttcactttgggtccctttatttgttgcccagtccgattttcgtcccttaatcacaaaaccgggtacgacggatcccctaacttacgaaaccgtttaaattccctcggcagtatttgactctggttttggctgaggtggcaccgacgtggcttcttttgactagatttttgtccaacgtgttattgacgtggcgctgatggggcaattagatcccaaaaaaataataaaacttatggggcccacatgtcagttgcacacacaaattaataaaaaaggtgggcccatgtggacccacacgtcatcctcacaacctcttctctctgtcccctctctctccctcttgtctctctcccgctcatgggcggcggagcgacgaggaggccggctggaacggcgcacggcggccgagcgacgaggaggctggctggagcgggcgacggcgtggcggcgctgggggggcgggggtggacggagcgggtgccccggcgcatggcgtagaacacctcctgctcgaacgccgggtcgccgtcggcgaggaggcggtggacgagcaccagcatcttgagcgtgacgcccaggcagcgtgacagcgacgcgacgcaggcgcgggagtggagcgtgagcgcaatcacctcccggacgtggtgctcatcggcggggaagccatggacggtgtgggagaggtcacgcttgacctcttgacacatggatactctcgtttaattatctcgttattacaaacatggttaattacaacttccaaataaagatcaaagcagacatattatgttaaacttgtgcctgcaaaagctgttttattcagttaggatagtactttccttttatgcacgttatgtgttttagccttttaggctagctaatattattacttgtagtactagaacacatgcaggaaatcttagccgattgcatgctactgagctactcgatcgctcatggattgactgagacgccagagctacaccttggtgtccgccttgccgctggtcgtcgagtcatcggcgctgccgccgtcggcgaccttgttgttcctcccctcggccatctccacgtcgtcgtcgccggcctgcttgccgcgattgccgcggcggcggcgaggaggaagacgaagatgctggcggcagcagcggcggcgaggaggaagacgaagatgccggcggtggcggcgcgctgggggtggtgtcggtgtgggggatgcgtcgccccgcctcgcctccttccccctgcgcacatgaagaagagaggacgatgaatatgagagagaagggagggggaagaagggaggagtagctgacatgtgggccaccattttaaaattattatttttagctgacatgcgggtcccatgttttttattattttttcgagatataattgccacgtaagcgccacgtcaatgccacgtgggacgaatatctagtcaaacaagccacgtagtcgccacatcagccaaaatcaccttcaaaaccgctgagggacctcgtctacacggtttttgtaagttgggggatgggtcatacccggttttgcggtcaagaacgaaaatcggactgagtgacaaatagagggactcaatgtgaacttattccgtacagaaaagcctaacagtgggctgacgctatatggatctcttgatgacatagtgggccgctaccacgagcgtggacttcgcgttggcgcagttggtccaggtgatcgtcttgctcagcaccggtggagccaacggcggtggctacatggcctccaactacgtcgtgctcgccatctacggcgccatgctcgtcatccacggcgctatcaacagcctcccgatccagtgcctctcttggttcggccagcttggagctttttggaatgcggcaggtaatgaaattatttttttttcctcctcttgcaatcgatctccttattaagtcaccatcgattccatcatcactctattgttcttcgtttgctaggtgtctttgtgctggtggccttgatcccggctgtcgccacggaaagggcgagcgttgagttcattttcactcacttcaacacagaaaacggcatggggatacgcgacaaggcttacattttactcatcgggttgttgatgagccagtacgcgatggccggctacgacacatctgctcatatggtacgttgcgatttcgcccctagacacagtagtccatatctaaactgcaaatactactgacactctgacagtatatcattctatgcatcagacagaggaaacgaagaatgcagattggagtggcccgatcgggatcgtaacctcggttgctctctcgaccgtgttcgggtggatctacatagtgtcactcacgtcggcggtgacggacattccctacctgttgagccccgacaacgacgccggcggcaacgcggttgctcaagctttctacaccactttccaccggagatacggcagcggcctgggagggatcctctgcttgggagtcgtcgctgtcgccgtcttcctctgcggcctcgcctgcatcactagcaactcgaggtcagatcgatcgatcagctgacgtgttcaggaatttagcttagcttaattagctacgtacatgttgataatttcctaggttaattagccactgcatgcaggatggcgtatgcgttctccagggacggagcaatgccgttctcgaaagtctggcaccgagtgaacaagcaagaggtgcctataaacgccgtatggctctctgtggtggtggcgttcatcatggctctgacagtgagttaattcgtaccactgctgattaattttcatgcttgattctcagttcagaataaccagaattatgctttatttttatgacagtcgctgggaagccaggtggcattccaagcaatggtgtccatcgcgacgatagggctctgcatctcctacgcgctgccgatcttcttccgggtgacgacggcgaggggatccttcgttccggggccgtttcaccttggcaagtacgggatcgtcgtcggctgggccgccgtgctctgggtggccgccgtcaccgtgctcttctcgctgccggtggcgtacccggtggcggaggagacgttcaactacacgccggtggccgtcggcggcgtgctgctgctcaccgtcggcgcgtgggctctccgtgcccgcttctggttccaagggcccattactaacactaatgacggcccgctgtgacggcccataactgtatgggccgatgcatgtgtgctacggcccatggagttctacggctgacaaggaagcccacgtacatgtagccttgttgggcggcccagtaagaggccgttctttattttgattcgtattcccatgtccttggatggaaattcaacggtctacgattcggctgattatgttagaaaaagacaggcatgaggtacagaactatactaaaaaagcagcatgcgtgcaataattcaagcatagtttaaacatgaaccaaaagtcctaaggtatacagttttttttttggaacgcataaggtatacagcgatatattgcatcttatccttcagttagtcaacggtagttggcaatactacaggaaaatcgtgacataagcgtatcaatcaatcatcagtggtatacaaaatttccaaccatttcgttgattatgaattatatataagagagaggtacgtacttggacatttcttttttgggaagttgactagtacagcgagcatgtaaactatactctgcaggattagtgagctatggaggtgatagcgtcaaaaatagctagcctcccaggaaacagcctacaggagatagagaactgatccacggccatgtctcgctccgtccaattagcgatggccgccggcgatcaggccgccgacgacccggacagcctccggcttctccagctcggctacaagcaggagctcaagcgtggcctctcgtatgcacacaacaagtttcagtttattcagacttagcatgcattcaccgtgctaattagttcattcttttcaaaactaagaccatcttgatcgattcatctggatatatatacacacaggaccctgtcgaatttcgccttctcgttcgccaacatctcggtgctgacgggcgtcacggcgacctacaacacggggctgcgctacggcgggccggtgtcgatgacgctggggtggctggtggtggcgctgttcaacggctgcgtcgccctgtccatggccgagatttgctcggcgtacccgacctccggtggcctctactactggagcgccaagctggccggcaaggaatgggcgtccctggcttcttgggtcactggctggtacgtgagacatgtatgagctagtctgcatcaatttcccctgtctttatgcactggaactaatccaaaatggttaggtgcaattgttttcttgatatccttgaaaaaaaattgttgtcttgagatggtgccttcttgaagattatgtttgatcattactattttgaatatttgttgctgtggattatgcatgtatgctgttgttcaacttaatttgcgagcctgaatttgttattgtgttgtgtgttcgacaggttcaatatcgttggacaggtatactaccattgtctggtggatctagatactgtttttagctccagcttataacttcatttttcgagaaaaaaatttgcattgttgccctgtccttgtcttcaactgttgtggcagtgggcagctattgcgagcgtagacttctcgctggcgcagctgctacaggtgatcatcttgcttagcacgggaggagccaatggcggcggctacatggcttcaaagtatgtcgtgttggtgatttgcgccgtcatcctaatccttcatggcgtcatcaacagcctccctatccagtggctatctctgtttggccaaatcggggccatctggaatgctgcaggtgcatggtacacatggaggcaataatcaccagtccttatgaattgtggttcttggcatctgaagtctgaatattgaaccctgaacgaaatttatctgtctgaacaatcaacaatgataggtgtctttgttctggtgatcctgatcccggcagtagcaaaggacaggccaagtgttgagttcgtgtttacccatctcaacacggacaacggcatggggatccatagcaaggcttacatcctagccgtgggattgctgatgagccagtactccgtgctcggctacgatacatccgctcacatggtaaacgagtcctctactcctgtcaggctgcagatatctgaatgagcataactgaatatggatagaacacagtgtcacagtgacgagctgatgatgcgtgtatgcaggttgaggagacaaagaatgcagatcggagcgggccaattgggatcatcacgtcggttgtttgcgcgacggtgttcgggtggatctacctgttggctctgacgactgccgtgacggacatcccgtacctgctcagccccggcaacgacgccggcggctacgccatcgcgcaagctctgtacaccgccttccaccggaggttcggcagcggcgctggcgggatcgcctgcctgggagctgtcgccgtcgccatcttcctctgcggcatcgcgtgcgtcaccagcaactcaaggtgacgggctcacatcgcgtcgatcgatctgatgattccacagctagctgttcatcgaatcatcgtgtcgagttggtgatttacatgtcgggtttctgtaggatggcgtatgctttctccagggatggcgcgatgccgttgtcgcgcgtgtggtacagggtgaacaagcacgaggtgcctctcaacgtcgtctggctcgccgtcgccgtggccttcttcatggctctcacggtgaattattatattccgagttgcacgcgttgctgcttctgttcctcctgcgtgcgctgctctgacacggtgcgctaattttgttgtttttttggcagtcgctggggagccaggtggcgttccaggcgttgggctcgatcgcgacgctggggatgtacatcgcgtacgcgctgcctgtgtttttccgcgtgacgacggcgcggagatcgttcgtgccagggccgttcaacctcggaaagtacggggttctcgtcggctgggtgggtgtggtgtgggtggccaccgtcacggtgctcttctcgctgccggtggcgtacccggtcgccaataaggagacgttcaactacactccggtggccgtcggcggcgtgttgctgctcagcgtcggcgcgtgggtgctccatgctcggttctggttccaagggcccattaccaacactagtgacggcccgatttgacggcctagaaaagtatgggcccgctgatgtgtagccttgcttggaggcccataagtgggcccaataagaggtcgttctttagggcttagtatttgttagagtctcaactcttaaatttaccattctgggtctaaagtatatctctaattcattttgtgagaatgttccaccagcttcactcacattttagatgaaattaaaacgttttggctgactctagctcttgccaaacataaccttcattggattcacatttttattggatgcaaatttgaaaacttcaacggtctaagatccggctgattttattagaaaaggacaggcgtggggacaaaaactgtactgaaaaaaaagcatgcatgcacccattcaagcatagtttaacatgaaccgtgattagaagtagtactaacgtgacgtatatatatcctatattttctgagtcaacattggcgtgtaatacgaaaggaaatcgtgacatgggcagatcagtgaatcagtggtacaaaatttccaaccattttgttgactcgcgaatcatacatgacagatacttggactattctctttcggaaacttgactagttacactgagctgtctgagcatgtaaactgcagcatagcgcgactagtgagcaacagaggtgaaagcttcttcccaaggtagaggatctagagatccaggccatgtctcgctccgtccaattggcggtggccgccggcgatcaagtcgatccggacagtctccggcttcaccagctcggctacaagcaggagctcaagcgtggcctctcgtatagacgcatatgcttgcttgtgtttaatttgttcagactagttcttgattagcaattaagcatgcattttggatcttccagtcacaagactcttttcacaactaatctgcgtacagggcactgtccaactttgccttctccttcgccaacatctccgtgatgatgggggtgacgacgacgtacaacaccgggctgcggtacggcgggccggtgtccatgacgttgggatggttggtggtggcggtgttcaactgctgcgtcgccctgtccatggccgagatctgctcggcgtacccgacttccggcgggctatactactggagcgccaagctggccggcaaacaatgggcttccttggcttcctgggtcactggctggtacgtgctaatgcaaaattgtcagatgcaattcttgccttgagatggtgcctacttgaattctgtcttttttttgtgttcgacaggttcaacgttgtgggacaggtacacttgccattgtcaacttggataatcttggggattgttttttttcagttgcagactataattgcatcgtcgttggccttgtacttgtcttcaattgttgtggcagtgggcagctattgcaagcgtagatttctcgttggcgcagctgctacaagtgatcatcttgcttagcacaggaggaggcaatggcggcggttacatggcttccaagtacaccgtgctggcgatttatgccttcatcctaatcttgcatggcatcatcaacagcctccctatcgagtggctatctctgtttggccatgtcggagccatctggaatgctgcaggtacacaatgaagtgagttctatcggttctaggcatctgaattctgaaccctgaatttatctgtctgaaacaatcaacaggtatctttgtgctgacgatcttgattccagcagtagcaaaggacaggccaaatattgagttcgtgtttacccatctcaacacggaaaacggcatggggatccatgacaaggcttacatcctagccgtgggcttgctgatgagccagtactctgttatcggctacgatacatctgctcacatggtaagttaatcctgctgtccctcaggttgcagatatctgaatgagcattgacagacggtagtgtggcagtgattaactgacgatgcatgcaggttgaggagacaaagaatgcagaccggagcggcccaattgggatcatcacctcggttcttttcgcgacggtgtttggttggatttacctgttggctctgacatctgtcgtgacggacatcccgtacctgctcagccccagcaacgacgccggcggctacgccatcgcgcaggctctgtacaccgccttccaccggagatacggcagcggagttggagggatcgtctgcttgggagccgtcgccgtcgccgtcttcctctgcggcatcgcgtgcgtcaccagcaattcgaggtgcgtgacagagctagcatcacgtcgccctgaatccctgatgatcgattgaattgctcaaagtgctatatacatactcgttgtttgtgcaggatggcgtacgccttctccagagacggggcgatgccgttgtcgcgcgtgtggtaccgggtgaacaagcacgaggtgcccctcaacgtcgtctggctcggcgtcgccgtggcgttcgtcatggctctcacggtgagttgcatttgcattcgcattgctgctccggtgattcacggtgagtgcgcgtgatgacgacgccttctctgccttttgccggtgcagtcgctggggagccaggtggcgttccaggcgatgggttcgatcgcgacgctggggatgtacatcgcgtacgcgctgcccgtgttcttccgcgtgacgacggctcggagatcgttcgtgccagggccgttccacctcgggcgatacggggtcgtcgtcggctgggcgggtgtggtgtgggtggccaccgtcacggtgctcttctcgctgccggtggcgtacccggtggccaacaaggagacattcaactacactccggtggccgtcggcggcgtgttattgctcagtgttggtgcgtgggtgctacgtgcccgcttctggttccaagggcccatcacgaatgttgacacgcattgttgacaagtatggtatcgtgttgttagtcagcgagtcagtggaaatatggaaccacacttttatattgtgtaatctatacgtgcaattgtagtcgttcagcagttatccaccattccggttttctttttttatcctttttattttgaaaaaaatgttttttttaaaaaaaacttttttgaacggttgaagagcgcagcaacgtgcgatgcgaggggcctgtctagggaaatttcagtagctgtagcttctgctataatcttcagctgccagaaactccatcaaacaatttagattttcacatatattttgaaaagttgtagttgtagaatctagaaaataaactcgaaatcagaaactgggtttgccagcttctctagattatcactaactgcttataagaagcttaggactctatcgtttctcttattgacggaataagcgaaatgacatatttgcaaacagaaaataatttgtaaataaaacttttatataagtgttcttagcaatataaacaaagtctgaaaaataaactttgatgaaaaaccccaaaatctatctattatattattaagatagctcgaaaagaaggcactacgttcgctgtggaggctagaaattcccatattaatcgaagaaaaagaaaaggagagtccaagtaaaaatacaatctaaaaaataactgaaattcggaattaaaaataagcaatattaaaagaggtgtccatataagaacccaatacgagattaataaaaccattgattacaattctaaattttaacggtctagatttgtaggagaaaagataagtccatagatctgtattgtgtacgttacatactaggagtctttgtcctttctgtttctttagcggtgtacacagtacacgtataatctaattcaattacaaacctacacgggcaagatttgtgctgccaaatatacaaaagcttgcactgctgcacatatatattctgtagatttcaagcagcaaagattgggcttgaacccaatggtagcgggagccaatcatagtaaaaagacatgatatttagatagacattagaataaatagatcaatacttgtagccggcaatgcatcaaacaccaaaagtttctttgatgtttatgaaagtacaaatgatatcgacatattgtaattagtgtatatttttcacaggagatggattaatgacagtcagattaaacggttagattatagtggattcacaatttaacgttcataatttaacgattgagatataacacgtatataggaatataggaattagagttgtagtgctaatacaggagtacaaagcggccctgctctgctcgacggataaattgagatccaatttcaaaactgttataggtttgattctaggtgggaaaaaaaagcaacaggaactaggtaggcagaaagccatatatatacgtgtgctcatgtaagtattattttttcagtctataatcacttcaaaactacttagaacatactttgaaatatttgttgccaataaaaaatgaagcgactgtctctttatctatttgatcctttttaatcaccaaatatacacccaacaattcagatgatttataaataactaaattcgaaagaaaataataaagactatgaaaagaaaaaagcatctataacacaacatgtgattaattaaaattaaaaaaaataaattacgaaattataaaaataaaaacaaaagtttaagaaagaatacaatttatgaataacaaaagttcaaaataaaaataaagaaatattaaaagaacaaccgtaccacaacaatggtaaatgacaacaaagaggaagggataacgggtgagccataaatgaataaggtgtagcggttgatgggatatttaaaaaacaataaaacaaaatcaaatgacgattaggttctattttaaaaatctcaacgacgattaaaagaaacaacagcgggcaagccgtcaaggagcgcaatcgtgacgtttgacggaacttctaaaaagtaaaaaaaaaaacaccaacgataatcataacatcatatttgactttttaaattccaatgacaattaagacgagacatcgggtggattgtagagcagtacaatggtgacatttcatgtaacttctaaaaatataaatatgcaactgacaagaaaatgaactacaaaaactataagatctaaatatgaaagttccaaataggatgaataaaagttgtgacatgtcggacaatcaaataaatgagcggcaaaaaagtaaggggtggcgacttattgactttcgaaaactaacccgatgataataagattcaatcttttaagatcggctagatggctatttaacaaaattaaataaaaccatgtttaaaaatagataattttggatgggtgttagccgtgcaacaaataaaggggtgacaaaggagtaaggatagcaacggatgtgaattttaaaaactatgaaattagaaacacatggatgataatgttcgatccttgaaagttctaagacagcgagatgaatattttaataaattttaagtagaatcgtgtgtaaaaatagataattttgtgggtactagccgcgcaattgcgcgggccacctagctagttagctctaaatctaagttcgaaaatttaaagttttacttactgaggacatatccggtgaaaatgagttaaatgttgaaaactcgtgaaaatcatacctaaaagtttcgtaaatttatgaaaaaaataatagagataagtgtagatataaaatacattctcaccaaatttcaactccaaacccaagttcgtttatgagaaaaaaaaagacaaatttcaggtgaacagtgtcctgttactattcacctgaaatttgtcttttttgttactcctaaacgaagttaagtttgaacttgagatttggtgagaatgtatttcatatctacacctatccctagtattttttttatgaatttacaaaacttttaggcatgattttcacgagtttttaatacttagctcatttttaccggatagtccccttacttatgataagcataaatataagccaagatgagactgttaagctctgcaaaacagggcccgtggactgggcgagcacggtgttttcctgttgggccgagccgtcatagagtaatgggccaccgttgcgaggcgacccaatagtgtagcgctgttcggcccagtttttattgccgccctcttctttcccctcgtccggagggcgcggcgggcggcggctatacgcgagtacgcgacggcgggttcttcccctcccgcttgcaacggcttcgcgtgtggcggcgcgttcgaatcctccaccaccggcggcgcctgctcccggcgcggcggcgcccccgcccccttcgcttgcgactgccccgccgcccagccgtgtgcgcttccctgcccagcctccatgcgagctctcgtagcctcctccgctctcctccggagatctgccgcccgtgccaacctctccggcgcgggcttctgtaatggcgcgcctcccgtgtcctctcctctccgccgctttcccctccaggtacgccctcgaatacttccccatctctaaggccctctttccagcttgagatagatttagaagagggggtatccaagtgtggtgttgattgattttgcgttttagactgaatttgtgggaatttgaaactcaggggattaaaaagagcgagggtattagcgtttcacttaggcggctccaggtttttgcccgtaagtaccgatgtgagtcagtgagtgggttgtgagtgtgtgaggagaaaatgagctctgcgcagtgtagtatggttctgccttttgtgttctgtcaagtgttccaacaaacgttggatttcattttttttcttccattctgacaataatacggaacacagatatgttcagctcaagttgttaatgaaaaaacacttataatgtatgtgatgtttggttcacagcttgccgctcttaaaacattaagatctggaacgctttatttttcttgaatttatgatatatgtgtcaaatatttgaactacgaagtaatgcagtccatctttacttccctgtgatttgctagaattggataaacgacagattttgttggttcttatcaaaaagttgttcgatgtcaacctcaggtatgctcaatgtttgtccacttattatcaatactcacagtttctgccgtacaaacatttcatttcttttttccttctaatgatatgattcttttcagttgatgtgcaattagactatgagactgatcccccactcgatggtgtaaaagttctcgagaaagagtcgacactaagtgtcgctgtctctcaactcgcaagtgattttgatagagaatctaatttatgtttggagcggttctcccgcacaaggcgcacacctgtgatctccactggttctcttaagcttgatattgctcttggcattggtggattaccaaaggtcatgatgtgctttcatattgtccagatctagaattctagatatttagtattccaatgatatcattactctttatcactatatcattccatatgatattaccttggtcctaaatcatatatttctgatataacacataaggatcaaagttcaaataagtcttctgcatggtgttattgttcagttagggtgtgtttagttcctgaaaaaagttggaagtttgaagaaagttgggagtttggaaaaaaagttggaagtttatgtgtgtaggaaagtttttgatgtggtatgatgtgatggaaagttgggaataggggggaaactaaacacggccttagttcactattttgttgcaatgggaactctaaaagtcaaatgtgtcatgtggggcttttcatcttttgatgtctaatttcccttttgtgttaatccaatgaaatctccatgatgtgttgaactagttaaattagtgccaaaagccctcttctttagttgtgaaaatactatttgttgatggcagtattttccttcttgctggacaacaaaaaattgcattttgtctatggtatttctgattaggaaatatatttataggtagaactgatgcccatatcttgcttagctttacttctgtcaaatgtgtccatatcatccatccttttttttttcttgatagcatatatgtttagagttaaaactgcaggcttaccttgattgatatgatcagtgagtgtagtggcatactgttttgaacactgcttttagttgtgctgtttgaaaattattgtagatatttaacagggtagaatggttgaattatttggaaaagaggcctctgggaagacaacactcgcccttcatgttgtcaaggaagcgcaaaagaaaggaggtctgtatttgtttatggtccttgctgttctttttggagtatacccttcttctaaattttacattatatgattggagttgtgactgggactatttgcaggctgctgtgcttatattgatgcagaaaatgcttttaacccttctgttgccgaagccattggtgtaaacgttgaaaagctcctgatagcccaacctgactctgctgaaaattctttgagcatagtgaacactcttgttggtggatcaattgatgttgttgttgtcgatagtgtatgtttcttccgcaatgtcagtttggattagttttttctcttctatttgattccttattggcttattaaaattttatgcattccctactatgacaggcctaatacttggataagtagttactaaatttgaaaattggactgctattcacttctgatgctctttagcactgtcatactgtcaggacatccatttttctaatatgtatttgatatcttgtgctttgctacatatttgtttaccttgcttttactggacttctgacaggttgcagcacttattcccagatgtgaacttgaaggtgaaatatatatgaattctgaagatgtgcagtcccgcttgatgactcgggcacttcgaaaaattcagcacacactaagtcgctctgaaacgctgattatttttgttaatcaggtttgggatgattgctttttttgcactaaccaggatggcatacttcaatatcgtttagtgttgatgctgcctaacttatttagagcttctgattgctaatgtttgcaggttagaacaaagttgagctcaaatcagactcctggaatcttcaaggaggtagcttgtggcggcaatgcattaggattctatgctgcagtcagaatgaggacttcaagaagggaattacgctacaatgaggcccaggtattgtacataacttttcatgcttctcatttcccttctccggttccctccttagaatactagcactagacaagagcgcgcattattctaggtaaagtgtacagcatttgtaaatatgcaattaagaaaattctgccatttcaggctactggcatcggtatatcagtgcagataatcaagaacaaattagctccagcaactctgaaggaagctggcattgacatcagatttgggaaggggatctgctacgaatcagagatcctggagctggcttcttcccttggggttattatgaaggatgattctgggtattggatcaatggtgagttccttccaaacaaggcagaagctgagaaattcctacgtgaaaatgctgctgtggcggatgaaatctgcggtaccatgaggagacaattctttgaaaggtgacaaactgaaggacttattctggttatcttgtatactagcaagcaggtgcgaaactcagaaggaaattacagtgtacagttggggcatcattgaagagtctaaaaatatcatttattacttgaagtgcagttaagggatcgacaaccaattagagaggctaatcttttgttagccttgtaatctcatcccaccatcaggcaaatagctcactactgttatgacatgaggtatggatgactgcccctatgagctttgtttgttcagtaagatcacagctgttgtatcatatatttacaggatatttttctgcaatgcaatttgttttcctcagcctgttgtaatttgacaaattttaagcacatcgagggccattccctcaaacaacgatacttcagtacaacatcgagggtcattccctcaactttaaactttcatgagcctcactgtactgagtactctatgccgtgatgtgccgggtagtcttggagttccaaattagcgtgtgtacgtgtgtggtcaagaaggattcagaggttggcattggtagattttttttttgaacaaagcattggaagattttagccagaaccgtccaacaagtagcggcttattttgacttgagctcttaagtctgcagaggtgtatctactctgcactcacccgtgtgcgacggggttggctaacccaggaggaaaggaaaaaaaaacacggagcttgtttatgtggtgacgaatgaacagtaaatgaacgtatgtcaatcccatttgtattgatcttgtccagtcttcgcctggaaattccgagcagcgtgactataaaagcaagcttgcagcgttgcattttcttacatccagatcgagttcaagtgcaacagatcaaactagtagcagcagaagatgtctatgcaaggcgttgttcctgtgcttgcagcggctttggccattgcagccttcgcctcctttccttcaggtacacatattgctaagcttcgttatatgtaggtcgtaagtactaagtttttttttaaagataatgtaaatgtattcctgcttgtgttttataaagttatagcttcccttaaaaaagaagttatagccacttattatataactggcttaaaagagagctcataaaacctaagacatgaagatgaaaaactaataatagcaacactaaagaagaaacttttattcaagtctatttgtaaatctccaactgtagttaacaaaattattcatagccgttgactctagattttggcgtgcagtatgcattagctcgtttttctcgtcacacctttgtaaatcgtaagtacttgtcctaaaattagtggacatcagtatgataatgtcaaatttacgatttaatttggatctggatgaattgagtgcttacccgaaaactagtcatctggccacatatgtcaagcctaccgtgcgatactgtgctcgttgtcactgaacccgtacgcttgtgcgtgcgtatgctgagatttggtgcagcatgcgatccatcggcgtgtgctacggcatgaacggcgacggcctcccgtcgcggagcaacgtcgtgcagctctacaagtccaacggcatcggcgccatgcgcatctactccgccgaccgcgaggccctcgacgccctgcgcggctcgggcatcgacctcgccctcgacgtcggcgaacggaacgacgtcggccagctcgcggccaacgcggactcctgggtccaggacaacgtgaaggcttactacccggacgtcaagatcaagtacatcgtcgtcggcaacgagctcaccggcaccggcgacgcggcgagcatcctcccggccatgcagaacgtccaggccgccctcgcgtccgcaggcctcgcggacagcatcaaggtgaccaccgccatcaagatggacacgctcgccgcctcatcgccgccgtccgccggcgtgttcaccaacccatccgtcatggagcccatcgtgaggttcctcaccggcaacggcgcgccgctcctggccaacgtgtacccctacttcgcgtacagggacagccaggacatcgacctcagctacgcgctcttccagccgagctcgaccacggtgagcgaccccaacggcggcgggctgagctacacgaacctcttcgacgccatggtcgacgccgtccgcgccgcggtggagaaggtgagcggcggcggaagcagcgtcgtcgacgtcgtggtgtcggagagcgggtggccgtcggacggcgggaagggggccaccgtggagaacgcgcgggcgtacaaccagaatctgatcgaccacgtcgcccaaggcacgccgaagaagcccgggcagatggaggtgtacgtgttcgccttgttcaacgagaaccggaaggaaggcgacgccacggagaagaagtttgggctgttcaatccaagacaagacaccggtttacccaatcactttctgaaaaattactccaatacggaatatgtactacgtcgtacagtatatatcatgtgcttaatctggtgcttacgaatcaaaatctgttagaatttgtatgtgccagatgttgaacatgaacagtcgttgaacactcacccaccacatgtgcacatatgtacttttaaacaagctcatgtttcaattgtaacatttggttaacgaatattttggttggatttggaaaggtaggaatgcacggtaacttttggaacagactaatttgcacatggtcgatctatataatatttgtacgttacatctagataacacataaacaagttgtcgtatttagctgtctcaaataaattcgtgtaatgaataatttgattctatatactacatgtactctctccgtccctaaatataagggattttgaatgaatgtgacacttcctagtactatgaatctgaatagggagcatgtccagattcataggactatgtgtcccatccgtctaaaaatcacttatattttgggatggagggagtacgatggtataaacggtatatattaatgaccggaggaggtatttccttttcctccacatcattaaaccattgttgtactatagtatttttggataaaatgataaatggaagtaatattatctgacaaaggcaaaaagggaatgaaaaaacttaaaacaatttgattgtgtcacgctgcctttgtgacaacctgcttcttcttcttctttgaagttgggggctttcattaaacaatttgaaccatgacatgaggtccgattgaaggtgctctctcgtacaacactttttataaaaaaatatgttctttgtcgtacatttaatatgaatttagacaagtttttgtctatgttcatagctaaaaatagctctattttgagatgaaaaaaagtatgtcgaatgacgattgtgactagaaaggtctatacaagatattcgtcccaaagacttagctcaagaagcaacatctttaacagggagccgatgaagaaatttcaacgttgtcggaatactagattagggttttcacccccaaagaacatcaccacaatctgttgttcacccccaaagaacatcaccacaatctgttgttcgaacgtcgatccaattttccgaccaaaatgaggatgacccacaaactctatttcaaagtggcaactttcctggagccacatataacaagattagttcgccagccaccacataagcaaggagataaaggaaaaaatgaaaataaaataattacaccagtcaaataaagcaatagaggatttgctaatcaaattcatcatgaacattggttggattccttgagaggtcagattcatcatcccgtatttatgtcttgacatttggaattttgattttctggcactatggtttgcagcttatcgggaacctattcagtctcatctgcatgctgagtgtttatagtttatccggaacaattcacacattcatctgcttgctgagtaccagtataaatcaagctgctctgctttgaactctgtaaattacatccagaaaccaagtgaactataggtggtctaggtacagaatacgccacatttgttacatctctctaggtttgagaccacaagagatggtgaatatacgaggtttctccctggtttttgcagctgcattgctgcttcttggagtttttatctcaatccctgtaggtacgtgattcgcctgtactattgaatattgatatatgtattgttgatattaatctatctgattgaattttttaaattttttataactatttagatgacatgtagacaatgagggtatgtctcgtcaaaagtttaaaatagtttcccattgtttgaaacataagaattttgaaaaaaaaattataaggactgaactatttccgacgaaatttctgcaaaaactttgtacttgtccaaagagatcttaggtccatttgggtaggtagaaacaaattaaagatcagagcttgtactgatgctttctgtctgaatgaaatacatgtggtgcaggcgtgcaatccgttggtgtgtgctacggcatgatcggcaacgatctcccgtcgaagagcgacgtcgtgcagctctacaaatccaatggcatcacagacatgcgcatctacttgcccgacgtcgaggccatgaacgccctgcgcggcacaggcatcggcctcatcgtcggcgtcgccaacgacatcctcatcgacctcgccgccaacccggcgtccgccgcgtcctgggtcgacgcgaacgtcaagccgttcgtcccggcggtgaacatcaagtacatcgcagtcggcaacgagatctccggcgagcccacgcagaacatcctcccggtcatgcagaacatcaacgccgccctggccgcggcgagcatcaccggcgtcaaggcgtccacggcggtgaagctagacgtcgtcaccaacacgttcccgccctcggccggcgtgttcgcggcgccctacatgacggccgtggccaagctcctggcgagcaccggcgcgccgctgctcgccaacatctacccctacttcgcctacatcggcaacaagaaggacatcagcctcaactacgccacgttccaggccggcacgacggtgcccgaccccaacaccggcctggtctacaccaacctgttcgacgccatggtcgactccgtctacgccgcgctggacaaggccggcgcggcgggcgtcagcatcgtcgtgtcggagagcgggtggccgtcggccggcggggactcggccacgatcgacatcgcgcggacctacgtgcagaacctgattaagcatgcgaagaaggggacgccgaagcggcccggggtgatcgagacgtacgtgttcgccatgttcaacgagaaccagaagcccggggaagccacggagcaaaactttggagccttctaccctaacaagacagcagtctaccctatcaatttccagtgaaatcgttcatcatcagcgccagttgtcaaattcacgcgattgcttgcgctgtaatagcgtattgtattcggatgggaaactgtatttatatctcgagaggatgctctctcctttgtttaaaaaatatataaatagttataaagaaattctaaaaaaatgggatatattcatataacatacatgtatcagtacacaaaattttagacccaaactcaatttatacattaagatataaaaaatacaacttcaacatataaatagtagtgtggtggtgtgttattattcgggatattaactatttgtcattctcagttgtggcaactaacaatttaccacctggacctatatgtcatatacacatgaggtctcatatgtcattggcacatgtgtgacaaatagttaaacaacaaatctaagagtggcaaatagttaaatactctgtactattcatagctgaatttatctctttttttctcatcgtgtaggtcgaatttgaacttgctttttggtgcagtgatagatgtactgtacctacaattgttagtttttttaagatttttttatgactatttatattaaattcggaagaaaaaggtatacgagataatattctgtggagggattagaacccgtttctatattaggatacaaatgatttaatgatttcctatatataataatatttttttcttttcaggtatttcccatatctgatctcaaaaacttaattagtgccaggtcatacagattccagataattccataggtttaattcgtggtacgtccatgctgaagaaattctatgagatgcgtgtgtatagtaactgatgtggatcaggtattcaggtgagttctcaaccgatggaaaggtagtgttgtgctgctaacctgacaaaagaacaatgaacacacgtcaggaagtcactccggtacaagccaccattccattcagttagcaccccaaacctgaaattccacgtactggtcaagaatatacgtaagaattcaatgcaaaatcggatatacggttggaaaaacaaactagtgtggtattagtagtgatcttccgcgactctgtgtactgctgatgagggaagaattccatgaagcggaagaatacatgctgtgtctaagtacgccaagaaaacagaggcgagtttccacgtttcgtggaattttttagctccaacaagccgctgtttctgtggaaaaaatgggaggaagatggctagttaggctgcaaatgcaacgtagcagctagctgtaagcacgcacttgggccgtggatgtgaggaaattaatgtgcctaactggctagacactgaaacttgtatataaaggggtgtgcattggcacatagcatgcataacattcaggttcaggagcagcagttgggagtagctagctgggacaacaatggccaggagacagggagttgcttctatgcttacaattgctctgatcattggagcatttgcttctgctccaacaagtactgatcagattctctctatgtttctagcaaatagcaattctctgttttgcttgcaatgccctgagcacgtactgtaagtgtttagtggctagtcagagatttgaggggaacaaaattctgaagagcaccacaatgttctttatagaataaaccacattttatctatatgcatcttgttgtcttttcataactatggaatttccccacgtaattttacacgggtcagttgaattgaatttgatatagaactcttagttcctatttccatatatgcaatattttctacacaatacattacaattgcaatagtactttgtatacaaatattgctatatactccctccgtttcaaaatgtttgacaccgttgactttttaagtacatgtttgaccgttcgtcttattcaaaaaaaattgtgaaatatgtaaaattatatgtgtacatgaaagtttatttaacaatgaatcaaatgatatgaaaagaataaataattacttaaattttttgaataagacaaatggtcaaacacgtactaaaaagtcaacggtgtcaaacattttgaaacggaaggagtattaatctacaccgttaatttggtcctagatgatgtaattagcttagatcttattattttattaatatgataatgtataggtatacatagcgaatatggtgacttcgtttcaagttatcattatgttactatacaatatatatataatagatcatgtctggtctagataatataatagataatatatagatagatatatggaagatagataaatagatagatgaaactaaataaaatgtccggaccagatagacactatagctttgggttaattctttttgggcaaacaaagtttcacttgaaattcaactaggcatgctctgataattcgaaggtgcacgttcattgtgtactctgctatggtttattggaaaacctaactttatgctgtcggtgtccattatcctgtcgtgcatatgcagctgtgcaatccatcggcgtgtgctatggcgttctcggcaacaacctcccgtcgcggagcgaggtggtgcagctgtacaagtccaagggcatcaacggcatgcgcatctactaccccgacaaggaggcgctcaacgccctgcgcaactccggcatcgccctcatcctcgacgtcggcgaccagttgtccaacctcgccgccagctcctccaacgcggccgcgtgggtccgcgacaacgtcaggccctactacccggccgtcaacatcaagtacatcgccgtcggcaacgaggtggaaggcggcgccacgagtagcatcctcccggccatccgcaacgtcaactccgccctggcctcgtcgggcctcggcgccatcaaggcgtccaccgcggtgaagttcgacgtcatctccaactcctacccaccctccgccggcgtcttcagggacgcctacatgaaggacatcgcgcgctacctggcgagcaccggcgcgccgctgctcgccaacgtgtacccgtacttcgcctacagggggaacccgcgcgacatcagcctcaactacgccacgttccggccgggcaccacggtgagggacccaaacaacgggctcacctacaccaacctgttcgacgccatgatggacgccgtgtacgccgcgctggagaaggccggcgccgggaacgtgagggtggtggtgtcggagagcgggtggccgtcggcgggagggttcggggcgagcgtggacaatgcgagggcgtacaaccaggggctgatcgaccatgtcgggcgtggcacgcccaagaggccgggggcactggaggcgtacatattcgccatgttcaatgagaaccagaagaacggggatcccaccgagagaaactttgggctcttctaccctaacaagtcgcccgtgtatcccatccggttctaagtcagatgctgcatcggatcgacatagcagctactgaaagctcttgctcgtatgcatccttaaaattaactgtaaactaaaaataagctagcttcaagcagagcagtagaaataatcaatcagtaataaagtgtgcagcacgtatggtgtgcctgcgattctcaaattccagaattaatagtgtattatgccatgagtaaagtgaagaaaatgtttttttccctaatcgacaatgaatcagtgcatgaacaattgagcgcgacttatatgttcatgaggagactattttgatcctcgagaggatgtcacatccttatttgcattctactcaaatgattataaaaaaaataagaagatgtattaacatgtgatatatcactacacaaacatgcaagttcaaattcaacttctatatctcgcaacgaaaaaaagaagtcctctattttgcttgaaggttcatttacggcgcggtgtgataactgcaaggaccatggtatctttgaggtttatttttaaacatggtacaaacgcatacgttcacaaacagtgaagagaaggaatgcaattaaattcgagggtacaaaaatttcaaggtgtaatcatgaagaacaaaatatgagccaccaatgcaatttacagtaccactggtattctagcgaagcaagtttatgcgattgtagatatgcaattttctcaagttgggtgtactgttaaatactactaatggataagaatttccatgcagcggcagaacacaaatggatgtcccgttcttttctccaacaagagttggatgaagattaagattctcgttgcaattttcgtgcgaaaactttctatatgaaagtttctctaaaatatcatattaatctatgtttcaagtttgtaataattaaaattcaatcaatcatacgttaataccatatcgttttgcgtaaaaaaacttaatcttcatcttcaagagaaaagaacaccacaccaggaaaacataggtgagtttccatgtttcgtggaatattttagctccagcaaggcgttgtttgtgtagaaaaaatgggaggaagacgacgagttagggcaactacaagtagtaagcttgcgttggatttttatacctaggtggtagaaagagaagtatgagagagaaacgtcgtcgattaatttgtcgacggtcatgcacgggcaccaatgctcctatcgctggcttggcgccttcctatcgacgatatcgtcgactgataaagaaattagcatgaacgggcttccctgattggcttggatgaaagagaaaaggggaataggtgagagacaaaataattaagcgatgatgatataaatgctgtaggcctgtagtggataactattgtatttagagtaaatttcacaaaactatagatactatgaccaaactatcacagaactacagatttaaggagttgtattataaaactacacatttagcaccaaatttatcacaaaactacacatttaagatgaagtgtcacaaaactacacgtttagtaactaaattataataaaactacaggtttagaaccaatttaattacaaagtaataatgtttatagctccaccataacaatagtgctagggatttaaactctaaaagttgtagttttgtgataagttcaatattaaatatgcatttttgtgatacttaacctaaaatttgtagttttgtgataaatttggtgctaaatgtgtagttttgtgatacaactccttaaatctgtagttttgtgataatttggtcaaaatacctgtagttttgtgaaatttactcaatggattaatataatttttaaagcaattttcgtatagaaaatttttacaaagaacacaccgtttaatagttcaggaagtgtgcgtggggaaatcgaaacaaactcactcacaatctctgctgccgaaggctaaggttgcgggatataggaattggactgaggcaattgagtgagttcaattagacttttaccacggcatagcgatggctactatccaaattctaatgggcccaattatgatggcccaatgttagtttacgatttgtgggcctaatcggatcgttgcgtttgtccgggaatcggtttatctggaccgtaaacttcaaatccaacggttcacagaaacccgacgggatagggtcgttacaatgtccgcaagttggcgcgcagctcacctcctctcgctccttgcgcttttcgggccgccggcggcggccggagctagctacaccacgtgtgaaggttatttttactctgagaaggtagagagattctacctattgcattaatgatgggtcaaaatgatacaaacattcctaagtaggctgccaaacggtgaaaaggtagacaaatactgaaaaatagaagtgtaacgaaaaggtaagaaaagatagaaaaaaaaggaaaaggaataagtgaataacagagaaaacggagagaaatcttagagaaatcaataaaaaactggttctcttgtctcagtttagcttgttaatccagtggcggattcgcacacgatggcttgctttggacacgaaaacccccatcctaccgaaaaccacctccaaactatcaacttaactacggcgacgagagggagacggccgggcttccgccatcagacggagctggtattatttccttctcgatcgatctcgcatgtcgagctgacgaaagaaccggaagcgactaccgtcgggtgcctcgtggagaggaggtaaaatcgggtgctgacgtcagcatacgtgtaaaaacaatttaaactattttttctcttaaattatttatcatgatttaatcaaaatcatgatctgattgcacaattaaattcgttgcaattaaatcttcaaaacaaaaccacacatggatatattccaacggatttttttatcttattattgaattattttcaaattgtcgacagtgggtacccgtagaccggatatagagggtattggggtacgctggtacgaggatctacgtagtacgacatcaagcaaacagaaaacaagaattatactggtttagaccccttagcaggtaatagccctaatccaattggtatgggattatataatggaaaccacagattacagaaggaatagcggaactcgataataccgacgagatcgtagtcgagttggttcgactagatcacacggcgacttggctcctgtaggctccggcttcgtaggctgtggtggatgtgttggcggtgtgattcgatgccttacgtcctgccgaggggtcccttttatatcgcgggtcagttgatctccaagtaggactcggagatatcagacccctcacgatatggcaaatacccaatcttgtctgagtaggactccttccatctgtggattccgcttctatctcgtgatagatttctttaacgcatacaaggactatccgtatacgcgcgggtatgccatatcaatatacaacgcatatctaaggatagagggtataccttatccgtaaccctgacagtagcccccaacttctgcttaaatgaactcatgtaaccaatcgtgacttctgatgtcggaatcgttgtcgttctcatctgatcgatctcggtgtgagaaccgtagagacgaagagttatcgacaatgccgtatgaagttcaatggtcatgaatgaatttaaattgaagtctaaaaactaccacacgtaacggacccagaattttccggcggcaatctctctcctttccttggaatacgcaccgtcggtagtgcggttatttaaagggattttggggatccattttgaagtccgtttgccaaagaactctcaagtcttcaagcgcccttcgtcatctccgctcctgcagagaaaaccctagcctgcttctttcgctttactctccggcgatcctccggcagcgatggatctcgacaagtccacctccaccaccgcgtccctgaagaagttgcaagatgacggcgccttcctggtcgcgggaccatgcagagggagttaggaggtattgaacccgaacccatcttgggccgtatggttgcggtcgaagattacatttcttgcggttttcttcctccgccttccaaatttcttcttcttgtcttgaacttttatggcctttctttgcttcacctgaaccccaactccatcgcattccttagtattttctcctatctttgcgaggcctatattggggtagagcccttccttgatcttttccgtttttactatgagttgcgctggatggaatccaatagggtatccggatgtgttggattccgactttgggatcgcctgaagtcgcgttacatccccttccagtgcccctcttctcgtagcaaatggcgggcgagatggttctatcttcagatagaaaactcggatcccgtccttgttgtcccggaagaacaaccagacaaaatcccagagtggaccgccaaacctgccctgactccctcccttcagtctttcatcaacatcatcgataacctccgaactcgagggttgtcggggtatgaagtcgctgccgacttcataagtagacggatccaaccgctccaggcccccgcccatccggcctttgattactcggggccagaggacacgacccgggtctctcctcggggtattttttttcttgtatttcggattttgtcctggatatgtctgtttctcccgacttatcgagtttctgttctcgatctacaggtctggacagtgacaccatgaaccgccgcgtcggccaggtgatgatcagcgctgcctcgacggcgagcgacatcccgatccccctttgcgagaagggtccggctgaacacgaggctgcgatcaacgtgagtgtactcgatgtatcctttacatcttcctccccaggatcgcgtcgtgacttcatgttatgcaggctctccctctgacggacgtcatcgggccacttatggaccactaagcggcagcgtccttgaaggagggcgtcaccaaggaggcgtccgacattgctgctgctaccatgagtggcagcaatgttccgaagaaggggaggaaattctcctctgtactcgggacctatcggaaggcgccaagcccggtggtaagcctctcttgttctttagcatgtagtcggaatgatttagcctcacatcatcctatctcacttaggcctcggacgcgtctcctccacctcagcgaaggcagaggcttgtgacgatcggcaagaagtaagtggatattttttgaagttttttcattcacaaagtcctgattaactagcttcatgaaagagaggaaactcttcgcagggcggcacgggcgaagccggcgcaaggcgggactggttcgacttccagcacgtcccctgcagcgacttcgacagatgtcgtggtcgctactaaggaccgggaggtgacgccgagtagcctcgccgtcggccttgtgcctgctcggggcccgcctgccgatgccctcacctggggggagctccaagcagagatggagtgcatcctccaggccggtgctcgcagcgtaggctgcgagatcgaggaggccaaggcagcggcgtcgtcggcgaaccaacgcgccgacaagctagcgcgtgaactggcggaggcccgcgaggacctcctgaagatgagggggctggtggccggcaacgaaaggtagcgacaagggctcgagcaccggatgtcggagctcgagaacaacttgtcagagatccgcggctcgctacgggtatcttacaccggcctacaccagctcgccgggtagtgcggcgtcacgaccaccatcccggcgaaccctgacgagttctcgctgatgtcctcgctcgcggagctagctacggcaatggaggagatcccctccaagcatgcggctaggatcggtgaggagacgtccaacgggatctacaccagggcgtgccacgtcctcgcgtgcgtaaggccggcgcatcccgacttggacctgaggagggctctggaccaggaggccgccgatgacgcgtgcaagggcgtgatggaggaagtcggagatttgggggagtctgtcctcccccttttgaatagtaggattttattttccttgtactccttaattaacatgctgtaaaaactctcaatgggcttgaactgcttctatccatacagtcatctttccttgtcttcttagcatgtaattccgagtattttattgtcgttatagggatgttcatgttgagaatgtccagcagcgcgggcaccttgactaaacaagcttaccacatcatgcttaaattaaatgacagatagcctatccaaaacatgcaagtgttacgtatatatacgtaacagtttattcgatcaaatccaaacatgcaactggaacttacgtactccctccgtcccacaatataagggattttaagtttttccttacaacatttgaccactcgtcttatttaaatttttttggcaaatataaaaaacgaaaagttctgcttaaagtactatagataataaagtaagtcacaaataaaataaataataatttcaaaaaattttgaataagacgagtgatcaaacgttacaaacaaaaactcaaaatcccttatattataggacagagggagtactatatagtcgttgctttcctcatcgatgtccttaattgtatggagcctgtaagtgctgttctctttagaaattaatggtgtaggccggcgactgatccgggttgaagaggccgaagtgcttctcggtgtcggcgcctttcttgtcgtactcgttgaacattggcgggaactgttttaacagctcaatcgagtggacgtccacccgtttattgtatgtcatgtaaatggttatgaaaaaattaaaaaaatatgaacaagatagataaatatgtaatatatcactccacaaacatgcaagttaaaaatcaacttctacaaattctaacaaatataacaaacaagactcaaattaatatatgtatatttacagttaaatttttttatttttggtacaacttgtagaagttgaatttgaatttgcatgtttgtgaagtgatatattacatactgatctatcttgtcaatttttttaaaaatatttcgtaaccatttagttgacatgcagtaaacgggtggacgtccactcaagctattagaatccatctccgaaaatgtagatctcgattctcccggccctcttgggcgtcccctgcccgacgtgtttgatcaggttctggttgtacgtctgcgcgttgctggcgctcgccgccgtgccgccggccgacggccacccgctctccgacaccacgatcgggacgctcccggcgccggcgctctccagcgcggagtagaacgtgtcgacgatggcgtcgaactggttctggtaagccttgctgccgtccggcaccaccgtgcccggcgacgtgaagagcgcgtagttgatgtcgtcgatctgggcccgcaggttgcccacgtaggcgaagtaggggtagacgttggccatcagcggcgcgccggtgctcgccaggtacttcgcgatgggcgtcatgtacgaggtcgcttcgggggagaacatgccattggacggcgggtacccggcgagcacgcccttctgggacaccgacacggacaccttgatgttgctgaggccggcagcggagagcgcgctgttcatgttctgcatggccgggaggacgttctgcgtgttgccgctctcaacctcgttgccgacggcgatgtagcggaagttgacgcccgggtagacctggacgttctgcttgacccaattggccacggcggaggggtcggaggcgaacgcggagaggttctcgttggcgacgcccatggtgagggcgatgtttgagccggttagtgcctggaggatgtcgctcctcgggaagtagatgcgcatggagtcgatccccttcgactggtagagcttcacgacgtcgctcggcgacggcaggttgttgccgttcacgccgtagcacacgccaatggattgcaccactgttgattagtagaacgaacaatatatacgttacacgcactcctaactcttaaaaacaacttctataaacgaatggacagctatttatccaaattcatccatgaaagttgcttcttattgggaatggagggtgtaggccctaatacacgtgatatatatacttacctttaggagtgaccgcaagtactccaaggaccaatgccagtgttaaaatgaaagcaacaccatgctttgccatatctttgtttgcaggcacaagtagctatagctagttgttagaagcctggtggactttgcatgcagttgcaatgtaacaaaagcattcacccctatttatacaagttcctagcaggtctataattagcatgcatttttttttgaaaaaaaaatatattttaataaatgacgttgttgacttttgaaacaacgttggactgtttgtattattccaaaaattagtgtgaatatgctaaagtataagtcatgcttaaagtttctttaatgataaatatgtcacaacaaaaataaataatattactataagttagtaatggtgttatctattacaaaacaaagggaggaattatgtagcatgcaatttgcgaggacgtgtaaaaactttcttgcggataaacagagtaaaaatgcggatcagactaatcctttgtttcagagagaggacgtgtaaaaatatgttcatggtttggggcacaaactgaagctacacatcttcaaagatcttgaaattgatctagaggtgattcggagcgatgaaatgtacgtgtaaaactagcaaaaacacatcggagtcagtgataaaaaatattttttttgaataaacatgaaattttgaagttgtccattaaaaatggaatcggttgaactaaaaaaaatgttaagtgggcatgcataagtagggtgcagttgctttctctcgtacgtttactttccttttcagtgcacgaacttatcccaaactgaaacgattttcaattgaagagcatgcaggtatgtcattgctgtgctcaacgcctactgaactagctgttcattgcatgcactgatgcacgtggaccggggaatgcaatggtaaacttacaatattgatattaaggagttgactcaagtattaaataacatccctttcacatttaatttcggcattaacaagcaagtaatcgcagatttttatccaattggtgcagtcttatgcaacttgatagcaccacattgagtcgatccaattagcaaacgaagggcacaactgcacagcatgtatcatcagtaactaattctcgctcaaaatcggtgggcttgactggcgtcattgcatgggaaacccgttggttcccccggatttacgatttcaattaggttagctactcatcttcaaatctagaggaaaaccaaaattgaaccgaaagaaataaggtgcctatttgattttgagttcgcctggctacttgaggcttgactcttcagcaagtatggcacttttggcccaggaggatttcgcgtgaggcttgcggggttggatacttgtgggctctaagtggatgatcgctcatcttcgatccagtcccaaccaggatgaagtgagaaggctttttgtttcggccatctgggttacatggccatcgtttcggccgtgagggctttgtgtaagcaaaaagtccaatttaagtccccaatttatagttcgaatcgaattcatacctgtcgacgtttgatgtctcgactacggtatttggacagtatggggatcgtcggtgctagggtatacgcgctgaggtaaaagagatggagacgaggatttttatacaggttcaggcccctgagctatcaggtaatagccctacatcatgttggccggagccgatgttgctttttattcaccataatcacaccagtagaatatgtggggtagcctatctaactgttg

SEQ ID NO: 9619 - DNA, 128629 bp, Oryza sativa
  unsure (1)..(128629): unsure at all n locations
ggcaaggcggtttcggtgcagtgtatcggggctacctcagagagcttggcctcgccgtcgccataaagaggtttgccaaaaattcctctaagcaagggaggaaggagtacaagtcagagatcaaggtaataagccggctacgccaccgcaatctggtgcagctcattggctggtgccatggccgcaccgagctgctcctcgtctacgagctattccccaaccgtagcctcgacgtccatctccacggcaatggcaccttcctcacatggccaatgaggtttattaattaactcattgatttagtaattttcgttatgtgcaatcgacacctttgaaattcaactgatcagctgacttggatgttgccacaggatcaatattgttcatggactcggatctgcactactctacctacatgaggagtgggatcaatgtgtagtgcaccgtgacatcaagccgagcaacgtcatgctagatgaatccttcaacgcgaagctaggcgatttcggccttgcaaggcttattgaccatgctgttgggatacaaacaatgacccatccctcagggacgccaggctatcttgatcctgaatgcgtgatcaccggcaaagcaagcgccgagtccgatgtttatagttttggcattgttctattggaagtggcatgcgggagaagaccaattagcttacaggacacccaaaacaattgcctcttccgactggtggaatgggtgtgggatctgtacggccaaggagccgttctcaaggcagccgacgagcggctcaacaatgaatacgacacaactagcatggagtgtgtcatggccgttggactttggtgtgcacatccagaccgatgtgcacgtccgtctatcagagctgtcatggcagttctccaatccaatggaccactacccgtgttaccagctaagatgcccgtgccaacatatgcaccgccgatggcctcagcggaggggcagccctcatcatcgacacgaatgtcgtcctcaagtttgacactaacatccatcacacctcgctaggtttgcaagttttctcactcataggatttatatagcgagacaattattgtcatatatagatttttatccatacccacaagttggtttgaaggactcatcttcgttaattgctccatacaggagtattagtcatgtttagttcattttacttgttctacatttacaaattgacgcttgaatgggatatgtacagctcgtgaggcaattggtttgctctttagagagctgcctaattggcaatgtgagcaatgtgtttagtttacatgacgctttcagttttccaagcatttatttattttgtccagaaaacttttcctacacctctccaacaatccaatcaaacagtccatatctctaactgatatttgttacatacttttcttgttttcagtcgatatcctagtccttatagagggcctggaattgttggagttgtaagaaactcagaaatattaacaaaacagaaatgatcgaaggcaccaacagaagagacctcttgcatgacatgtgttcattgttgatagatctcatatgatattcagctaatgctgtccaatgactgcatagattactactgaaacattgttttgtcctaattcatccccatctctggctgagatctagaatggttagttcagtctagaagatctaaatgtgtataacatgatcacaataatcatataagtatactaaaattcagaacaatagatctcaatttgcagaatactttggatacattgctgctatgctctcgttttgtcaagcaaccagcgtaacaaagataggtgaatttgaactttcagtgcagtttcgaactggtccccttctccaatcttcattaccccgtggaagaacaaagtcttaaagtgtagttcaaagcaaaaaaggaaaggtacaagaaagcgactaggttctctacacctagtaggtgtcatgacacccaacatttacatgtgacttaaatagttattatagaaaaaattaaaaaaatttagtaacatcaattatgatgatataagtctatacacaaacatgcaagtttctatctaatctacaagtaaaaaaataaaaataataaaatttgttaattttgtttcttcatgtgtctgctggggaactcatctttagtcctggtttacaacccctttaatcacaggttacaacccgggactaaagatgcccatcattagtcccgcttgaaataacccgggactaaaaattgtagcactaccatctttagtcccggttggtgttaccaaccgggactaaagttttttttcttttttttcagtgttttttgctgtttgcatattggccttttttttcattgttttttcacagatttaatgaacatcacaaatttatagatcgaatgaacatactcaaattcacatagtgaacatcacagatcaaatggacaccacaaattcacaaaaacatctgaaaaaatgttcatctaattatttttctattttcgaaatttattttatttgttattcgaaattttaattgatcccgtcatgtgttctaaatggtcttttcttttaatagttttaattttttattatgaatttttaaattgttttcctaactgaactcttatttttcttttttttaattaaatattttattttattttttatttagaattttaattcatctcggttggtgttaccggactaaaaattgcagcgctatcccggttggtgttaccaaccgggactaaagttttttttcttttttttcattgttttttgctgtttgcatattggcctttttttcattagttttcacagattgaatgaacatcacagatcaaatggacatcacaaattcacaaaaacatctgaaaaaaatgttcatctaattatttttctattttcggaatttattttatttgttattcgaaattttaattgatctcgtcatgtgttctaaatggtctcttcttttaatagttttaattttttattactatttttaaattgtattcctaactgaactcttatttttctttttctaatttcatattttattttattttctatttagaattttaattaatctcgttttgtgttctatatggactattattttcatattccttatttatttttttcaattttagttgtttcaaaattatatcctacttgaactctcttttttatttttctaatttcagattttattttatttttagtacaaattttaattaatcacaatgtgtttttatatggacttttctttcaatattacttattttaaatcaaatttcagttatttttacattctagcccanctaactgccattaccgtgttgcttaacgacttgcccgttgttcctccccttaatcgtcgttgggattctaaaaattgaacctaatcatcttttcggttttgttaatagttttcaccagatgtcccgttaaccgtcaccaccctattgctttataggtctgttgttcctcttctctttattgtcatttgctattattgtattttttaatggactgttcttttaaaattttgtatttttttcattccttttttttgttatttgaaaattttatttctatctgaactcttatttttatttttttattctttggaacttattttattttttctgaattttagttaattaacctcatattctattctacatctactgttctctcaataatcatttttattttaaatttctgttatttctaaattgtattcttactctaactctcatttctatttatctactttcagaatttattttaatttttattccaaatttcaattaatctcatgttgtgttctagatggtctcttctttcaacaattcttattttttatactgatttttttgttatttttaaatcgtattcttacttgaactcttattttattttttataattttcaaatgtattttattttttattcttaattataattaatctcgtattatgttctaggggattactcttttagaattttttattctaaattttagttatttgtaaattttattgttacttgagctttttttttataattttgaaatttattttatttttaattcttaattataattattctcgtattatgttatgcatggactattctttcattattccttatttttttattctaaattttagttatttctaaattatatttttcaaattttagaatttattttatttttattccgaattttaattaatatctaattatgttctatatggactctttttcagtattccttattttattttgaattttagttatttttaaatatatttctacttgacccttttttctttttatctaatccacagtgagcgtggtgccttctttcgagatttgcttttatagttttgtataatacagtagacaggtagaccgtagattcaagatttgatctaatactaacaaaaacatgatcaatatttaatgagatatttttagttattatcttttctcatctatgtatgtacgtggctaccaaaaatcaggagcattcagtctgtttgtttcctagtcctttccttgcatatggccatatacgtcagttggacttgatttttttttattacccgacgataatcaagccatgcaatccggttcagagagcacttggagttggaacagaagtatatgtaagatttctttctttgtcagtccaagcaagattagtctatagtatttttccttctcttatacatacatatatccgatcaatctcgactgttaaaatctgaagctatcatgatccgatggtgtagatttctctttttcttcgattaatgtggcaatttctagccttcaaagcgaacttggtgtcttctttcaagactgtttttaataatataacttgggtttcgtttttataatttttagaagtcccatcaaacgctgtcattatactcctctacgactcgtccgctgtctcatctctttattgtcattgggattttaaaactcgaacataattatcgtttgggttcattttttttactatctagaagtcctgctaaaccatcagcggcttttccattgtacttctctacagctcgcccgctgcctcacctgttactgtcattaagatttaatcaaacataattattattggggtttactttttactttttagaagtcctgccaaccgctgtgcccgtattgcttaactgcatgttcattgtcgctattaggattctatttggggttttcttaatagtttttggatttcccatcaaccatcaccaatctactcctttatacgcatgttgcttctctcatttttactatcatttatcatttgtgttctatataaaattttttgtttgaaaattccatatttttcattccactattttttttataaattatattcctacttgaactcttataactatatttctatttttgggaatttcttttattttttatttagaattttaattaatatcgccatgcgttctagatggtcgtttctttcattagtctttatgttctattatgaattttagttatttataaattgtattcctagttgaactcttattcttttctttttctaattttagaagtcattttattttttattttaaattttaattaatcttgtattgcgttctatatggattatttttttaatatttcttattttttatttctaattttagttgttttaaaattatattcttacttgaactctcttttttatttttctaatttcgaaatttattttatgttttattccaaattttaattaatatcgtattgtgttcttgtacgaactcctttcaatatttctatattgcttatttttaattccgaattttagatatctctaaattgtattcctacatggactctctttttctttttttcgattaatgtgggaatttctagcacccacagcgaacttggtgcctcttttcaagactgttttaataatataactagttaggcggcccgcgcaattgcgtggctagcatcaatttaaaattatctattttttacacatgattttatttaaagttatcattcccgtgattctaataattttatagtttttaaaagccacaccagtctttatccattacttccttgtcacctttttatttgcttacttgatctaccactacctttactcatcttctttagaacttttaaaattagtccttatagtttttagagttcattgttttgttgggtttcgttttcataatttttagaagtatcttccaacatcgccagtttactactctacggcccgtccgctaccacctctctttattgttattgggattttaaaaatcgaacataattattgtttgtgttctttttttacattttataagtctcgccaaatcattagtgacttcgccactatactcctctacagctcacctgctccctcccatccttattgtcattgagatcttaaaaatcggatatgattattattggggtatattttcactctccttaagtcctgtcaaccgtcgtgaccatgctgcttaacggcatgcccatcgtcactcctcttaatcatcattgtgattctgtttgggattttgtttatagtttttagatatcccatcaaccgctagtactctacctattgcttctcccctttttattgtcatttgtcatcgttgtgttctagatggactttttttttaaattgcatatttttcattctgataatttttattcataaattatattcctacttgaactcttataattatttttctacttttgaaatttattttatttgttattttgaactttaattaatctcgtcatgtattctagattgtgtcttatttcaatagtatttatttttattacaaattttagtatttataaattgtattatagttgagatcttatttttctttttctatttttctgaatttattttattttttatttcgaattttaattattcttgtattgtgttatatatagactatctttttaatagttttattttccaatttcaattgtttcaaaattatattcctacttgaactctcttttttattttgatttttaattaatatcgtattggtttattatatggactcttctttcaatattgcttatttttaatttcgaatttcagttaattttaaattttattcctacgtgaactcttcttttatttttttttctaatttcggattttattttatttttattctgaattttaattaatctcgtattgagttcttatatgtactcttttttcgatattccttatttttaattccgaatttcagttatttttaaattgtattactacttggactcttctctttttttttctaatttcggattttattttatttttattccgaattttgattaatcttgtattgggtgcttatatggattcttctttcaatattgcttatttttattccaaattgtatttctacttagactcttcttttatttttttcgattaatgtgggaatttatagccccccacagcgaacgtggcgtcgccttttaaagttgttttaataatataatcgatagatagatagatttgagatcgtcaatggtaatctatagaactggctccttgtcaatgataaaaaggtaagagtttctctaaaatcattggattgttacctattttctcctttttactttacgacagttcttgaccatctatctatctcaaaacaaagtacttgacgaattatttttgaatctcacaacggtgctttctaatggtagtaaaaataaatctagctaaaccgtagattcttttctattcaagggatcagacctattcgtactaccaccatatttaatggtagtagaaacgtgcatgggaggataattttgtaaatttgcatgttagttggaaacgctcggatttttgggtcttgctgggctgagcatgcggggtagcgttacagagcgaggagtggaggtggctggtgtgctgccggcagctgatcagcagcgatagatgcgagtagtttatttctttggttggccgtctcctgcctgcggaaagaattaggactaaacattataaaatttactacaagagataaagataaaagtctgaacttgacgtgctaaactgctactgttttttaatcagcatatcagagcgaagcttctgttctcttgctcatctgcttcaattgaatcccactctaaactatgggacctctaatagagtctacactgttataattcagagaatgtgctttatgatttacatgttaatcagcgactatactacagtctgcagtgcaacagtttttatcttctacttctctgttcatatttgaaaccggacaatgaattgaaaagaaaagggaacataacggccttgtgaacgcggccaccggagccgccggcgcccggcaggacgatttgccgaccggcaacggaaggatgtgccgtcgagtagccaagcgatagatctaaatgtacaaaaactttttttttaatgaagagtggataatatcctaaataccaaccttacctttaatcactaagttagtaaagtactaaaatgtccttatgaatcaacggtttaaatcaattctactagttgtataatactacgatatagagtaccggagcatcgctctttattttttgggaatgctatggatctggaatcgcagattaggtttcatttagagcaagtttaatagtgtagccaactgctgactctaaatcatctatagtcaacttaatagtcaattcatacaatagttacctataaacatatactacacaattaatatctagtcccacctgtcatacacacatgcattttggagtccgtgctgcagctggctacaaatctgtagcccgctactcttctctcttatcttttatctcctcgaaatgtgtttatagttagcttataggctgctattgtacctgctcttatacatctatagtcaaattcatctacacacacaaaaaaaccgaccgtaaaaattatgattgaattcccagttagatttgctatatactcctacctatccatatagattttttttagagaaaaggtcacaaggacccggcctatattgaaagccaacctcgagcagagtttttgctggggttaccagctttacaaaaaggagcacagaaagcactcggagatgattacgtaccaacagacaagtgatatattaaacctctgaaacagaccgaacgccaaaaacattgcatggggctagcaagatcaaccaactcctattctattttgtcttagagcaggtcctccctccttcaacctctttaccggccagcttctctagatcactcttattcatctccagccgatgcaaagtgttgaatagtctttatattgattgtggaaggacaaatgacataagatataagtggaagagcccctcacctcaaggctagcttttgtgatgggaaagactatttacgatcctacgcaaagaactccacggcaataagaaagagacaatttggaaaggtagatacgatgttgtttctcgttgttcatatatagagtccagcaaatggttaaattcagctctaatgtcagcaaggataaagaagtcatcaaaagctctaatgtcagcacggataaagaagtcatcaaagttaagaggaacataatcccagttgagcacatctctacataaacaccaaacaaccagttcagcacatctctacataaacaccgaacaaaatacgccaaagggcagctaaagattatgtacatctctacagaaacaccaaacaaaatgcgccaaagggcagctaaaaattatgtacatctccacagaaacaccaaacaaaatgcgccaaaggacagctaaagaatatgtggtttgtagtttctagatggacagtggagaaaaaaattctaattttaaaatcagtaacaccaaacaaaatgcgcctaaggtcagctaaagattatgttgtttgtagtttctagatggacagtggagaaaaaaaatctaattttaaaatcagtaactagagggtgagcgtgtacggtacggtgttaacacgggccacggccggcggggagcacaaaagttacagtctctatatttattttagtgctagagaagacacatatagtaaggccctgtttagattctaacttttttacttcaaacttttaacttttttgtcacattcaactttcctacacacataaactttcaacttttccgtcacatcgttctaatttctttaaacttctaattttaacgtggaactaaatacagcctaatatatgctactccctccgtcccaaaatataaatatttttaaacttcgacacggtcttcgagatactactttgacaaataatatctatgttttaactaaaaagagttgtatattatgataatttgtttaatgatcagtctagtaacatcaaattgacatgatcaatcttttttcttttgctattaatagtcaaaatttaaaaggtttgacatcacattactctaaaaatatttatattttgggagggagggagtatcaatcatttgaagagttcagtgacattgtaccctaaggacgaaacgaatactggtttgacttactcttgtttcgtcgtcacgcgccaggccgagaacgggtccaatggaggatacctcaaatacagactcagactggcagtataggaagttgtgtcgttgctcctccagctggagaagccgatcagtacacagtactagtatcacagtactgtatcagtatcaccttgcacacgatctatcgacgctggatcgccgacggcgatggccggcttttcgttgaccacttgtgctaccggcctcgtcatcttcttctccgtctgctacctgcagcctccggctcctgtcgccgccttgtccttcaactactccaacttcagctcaaacaaccagaacatcgaaattgaaggcaaagcctccatccgcgtcgggtatattgacatcagcgcgaacgacgctcgggacattttcaccagcgcgggacgggtatcctacaagacaccggtgcagctctgggacgccgccaccggcgaggtggccagcttcaccacaaccttctccttcaacatcgtcaccccgagcgataggaacaacaggggcgacgggatggccttcttcctcggcagctacccatcgaggttgccaaagaatgcctccagtagtggactcggcctcaccaacaagtcctacaccaacgtctccaccggcgaggaccggttcgtcgccgtcgaattcgacacttatctaaaccgcgacttcgaccccaacgcaacctacgaccacatcggcatcgacgtcaactccatcgtatctgtgacgaacgagtccctaccagacttcagcctcaacgggagcatgaccgccaccgtcgactacaacagcagttcgagcatcctgtcagtaaagctgtggataaatgacacaacgaagccgccttacaacctaagcgacaaggttgatctcaagagcgccttgccagagaaggtcaccatcggcttctcggcggcaacgggcgcatcagttgagctacaccagctgacttcttggtacttcaactcgagcccgtcgttcgagcataagcatgcacgtgccggagttgaagcgggagcaaccgtcggggcgacgttgttcgttgtgctgctcttcactgttgcagctatcctcatacggcgacgtcgaatcaaaaacaggaaagaggcagaggatgagcaggacataagctcggacagcttagacgacgacggcgagcccatcgtggagatcgagatggggactgggccaagacggttcccatactatgagctcgttgaggccaccaagagcttcgcggcggaagagaagctcgggcaaggcggctttggcgcggtgtaccgaggctacctgagagaacagggcctcgccgtcgccattaaacgcttcgccaaagattcctccaagcaagggaggaaggagtataagtcggagatcaaggtgataagccgactacgccaccgcaatctcgtgcagctcataggctggtgccatggccgcgatgaactcctgcttatttacgagcttgtccccaaccgtagtcttgacatccatctccacggcaatggcaccttcctcacatggccaatgaggttatcaaccctcgctagttctatctcaatctttgtgaccgtattaattaacatatattgttaaattaaacttaatagattagctaacttattttttacagggtcaagattgttcttgggattggatcagccctcttctaccttcatgaggagtgggggcaatgtgttgtgcaccgtgatatcaagccgagcaatgtcatgcttgacgagttcttcaatgccaagctaggcgactttgggctcgcaaggttcattgaccacactgtggggatgcggacaatgactgcagtgtccgggacaccaggctatgttgaccctgaatgcttgatcaccggcagagcaagcgtaaagtctgacgtttatagctttggcatcgtcctgctagaggtggcatgcgggaggaaaccgatgagcctactagacagccaaacggatggcgtctttcggctggtcgagtgggcttgggatctgtatggcaagggagatgttctcaaggttgtcgacgtgcgtctcaacgatgactacgatgttacagagatggagcgtgtcatcgttctcgggctctggtgcgcgcaccctgatccgagcgcgcgaccttctattagagacgccatggccatactccaatcgagtggaggctagctgccggtgctaccggccaagatgcccgtgccgacgtacgcgccgccggtgatctcattggatgggctctttgcgtcatctacagggttgtcgtcgtcctcaggtgtgacgcagtcctcgtccacatcgacgacgagtggccatgctactcacacctcgtgttcgtcggttccgtccgattcaaccggtttgaaggactcgtcttcattgctcaagcatcagtcctagcgtttagtttttgttttttttaatttgtttgttcttagtttagagtttacggttgaatggtccgttgatttggtctttagtgttgcctaattgccgatgtgagtaatgtatgtgtatttacgcgatggtttgaacttcctttttcaaaaaaactagctggtggcccgcgcaattgcgcggctagcacccatataaaattatctattttttacgtatggttttacttaaatttgttaaataactatctcgttatgttagaactttgaaagactgactttatcatgccggtgtttttaatagtcacgccaatcactacgccttatttctttgtcatcgctttatttgcttgctcaatctaccactgttttcattcattctttttggaacctttacaaatttgaccttgtggttttagagttcattgtatcgttgggtttcgtttttataatttttagaagtctcgccaaacgccgccactgtactcctctatggttcgcccgctgcttcccatttttattatcgttgagatttaaaaatcgaacatgattatgattgaagttttttttactttctagaaatcccgccaatcgtcgagacagtgctgcttaacgacctgctcatcgtccctcctcttaattatcattgaaattctatgtgaggttttgtttatagtttttagatatcccatctacctacaccactctatttttttgtgggtctattaattctctcatctttattataatttgtcattgttgtgttctgtgtggactattttttcaaaaatcaatatttctcattgtgatatttctttcatttataaattgtattcctacttgaactcttataattattatttttatttactttaccaccctcggcatgccctcctatggcaattgcctcctatctcatttatttgcgtacgctcgcctgcccattgcttctcttctttgtcatctctcactacaccggtaagactaaaaaatcaatccatattattgatatgatttcattttttataatttttttagaattcctgtaagccgtcgttgcatgccgccttatttgccgtcccttggcaatatgtttgttttcttttgattaaatgtggcatttttagtcctgcaaatgtgaattaattcttagatagaatatggtcaagaattgatgatcgaacattggcaggctgccaaatactgaccttgatcttgatgtcttgataatttctatacctcattatgtaatatttgaaatttatagtattctttaaccacaaaattatctcaaaaaaagaaaaattgggaatatatttttgtctttcaatctacgaccaacaaaacaattaaacttcttacttaacaaaattttgatcatactaaacttgcctttaaatgacatcgtgtgcgtgcgcgtggctgactaaatcacccgctgctgctgtgcaaggaaagggtgcattggttggcagagtgagtttgattgttagctgacacgtctatgcggtaagtgccaaggaaacatattgattttcctttttttttataagtttctggaaacaaaagaaacgttgactcagccctctgtccggttgggccattacagtccgaatagaatttttgttttgctgtatagtattttttttttacatagtttgagtaggatttgtcatgtatcctttcttacttatactattctgatcaatctcaacggttaaaatataaatctatcatgatctagcggtgtagattttttctttttcttcgattaatgtgataatttctagcctccacagcgaacgtggtgtcttttttttgagctgtcttaataatataatagatagataatgaaggcaagaagattgccttatatatactgattgatacggcagggatttgaactttactgccgttataatttgtctacaaagaattgtccagccattttctgttccagcagcagcggaagtcgagtgagggagacgggcagagatagtggctgcagcagcattaagggtgcgtttggttgctcgtattctcttagtctggctcatctcttctatccaggctgagtttggtctggctaaaaggatacatatgcagctgtttgattacccgcatccgatgaacctggatatgctgagatgatgtttggttggttgcagcaaaggattggtggaatggttgcatgcaggagatgttgtttggttggatggatacatcttaggtgtaaataccctctcttgtgagtggtgaggttaccctcataaagtttacatctgtgtagtgaggttactccgtgaggttgtgttaaaattttatttggtctttggctactattatttgtgagctaaattacttagaatattggcatacacgtctattttcttcggttggtaatttttgtaagaatcggtaagcagcattgaggaaacaaacgtgcatacaggaagttgttcacaaggaacagatcaaacattttggtatttgagtatataaaattacatcgatgttatacaaaactgaaccaattgttatacaagtacatacttattacaatccttttacagacatctttaaactcaacagccttatatatctgcaatctggtaaaatgacaagtgtatataagtatgttcttatgcatcacagctcagtactactagaatggtattgcctagaaaattaaatatcaaacaacacaggaggtcaaacaaaaggaataagcctaatttctgatattgcaatgctctgctttctgaaatttgtcctatgaacccaaaaaaaaaaagatatacatgctctaaacagaaatgctatgatgggaaaattgatcatgcttagtattttctgctgcttcctgctagcctccttttttgctggttgtttcttccagatggaactgggaaatcaaatggcagccacaacgactgagtatggagctgtcatctccaagtggccattttcagttccatgtacttacctttgttcttccaagcttgactaaattagtcagtggatgtcaacatctgattatattacaaagactgaaatgtaacttatgcagagatttagaagtatatgcttaacagcatagccaatccatggaccttgtactccgtaattcatataaaagataattggaccaagaaacataaacacaacatcctaaggagcacaacctgagtatgtatgtatacatccagtggcataccatcatcgaccatggatatttactcagacaaaacacaatcggcaaaataaggtgcacagccaaaagtgtaacacaacagcacaccataaaaaacaaataagcacccaaagtttgctctgacattgaactaatattaatctgtatgaaactgaaaaaacagtagatctgaaagaaaatgaacagctaaaaaggataccaacaatacacgttgacattgaactaatattcatctagccattgacacggtttcaatatttaaatctaccaaagtcaactaggaaaatgtataagcttttactagatctagcagatttatgaaggccccatactctcatccactcaaataacagcaaatcaaccaaatagagaagaaaaaactggggaaggagggacagggaagaggatgcccaaccttgcaatgggcgatggatagccatcaatgcacttaccctgctgctcgacagagagtgacagtggaacaacaggcacgacggagagaactggcaaacgaggggaaggaccgacgcgggggcaggaagtgagacgacctcggaacagatgaaggagagccagaatcgggggagagggctgccgcttatggccggagtgacgagaagagcagcgccgcgccgctgccaaagcctaggttgaaccctagttttttttcacgagagggagaagtgaggcagggagggagcgattctggggaagcagtggtgaccccatcccgcgagttgcacgcgtgggtgcaggcgcgggtgaagcggtgcacatcggtcgagccaggccaagcagcgaagtgggaattgaccgtttctgccgtgcctggctgagggggtatttttgcatccgcatggacaggctgggaggcccgagcaggcaaccaaaacaccacgaatttgcatggaccggtgcgggccaaccttggtgcaggcaaccaaacagaccctgaacgttcggccaagaggattactggaagcgaattaaacgatcggcccattacaattgaagaggtggccgccatcctcttcatgggccatggcctacagaatgaagttgggctgggccacaaccgctaggaaaagcctgatctacatgcctacccccaatggaaataagtccacttgatgttctcatctttccaataaatatggacatccaacgtgcaaagccgggttaaattaggttttttggcagcatagatggctggtttaactgacaaatataaaatgttcaaagctaatctaaggctataaatagacacctccaagagaaaatatatgtaagtgagagtttttaaggattaataaatatatttactttctttgtgtacacttataaatgcactgttgtcttcttagacaacaccatgaaaacttaaaatctggaccccgatccatgtacaatattttatttttatcaatcctaaattcagaaatcctttatcaagaaaaatactaaaagtaagacaccataacaagtacaactcagtattattaatttaaagcttcatattatttaataaaaaacatttatattccgtaatttcgaagtgtgtattaacataaggaaatagaaagtaagggataaaaagtattatattttattctatatacctatgatattgtaattaccaatttcaaaaattcgaaactatcggtttcattattgagcacttaaaagcaaaatacacacacttatgcagaacatacatatcagaagcccagcgaaacttttttatctttattcccggtaggtaacaccaaccgggactaaagattatttttattcccggtttgtcttttgtcaggccgcccaggatctttaatcctggttagtaacacagcactttaatcctagttggtacaaccgagactaaaattgaaaaaagcgcacggggagggagagagccgcatcgcgtcttaattatctctgatgtctctctttctctccctcgtccttatcttcttcttctcctaccccgtgtcgcgtcttatctccgtcgcatcctcctatcctctcctccacccccctcctcccctctcacctaggcgaggcgtggagatcggagcatggagtcggaggtggtgaagacggagatggctatgagcccgtgacgttgcgcggtggcctcatcgtcctccgtcacgcgcgggtgagcgacgacgacagcggtggccggcggcaggcggcgccctccgacctctgtgtctgcgaccctgtcgccagccgctgcttcttcctcccgcacctcgggatttcccaccgagcagcttcatccgcggacctcagctgctgcgtcttggctctctgcctcgactggtcatcgctgccggcgtagatcaagttccccctccttcccacctcatcgccaagccgagcgtggagattctcctcgtgtcgccgccgtcgccggccgacagtacgtgttggtatttcttaacgacattactagaaatataattcccagcaatggtgccagaaatagtcatggtatattatgattacagagtttatccgcaagcgcacggatataccattgtagcattttcacccgagagtattccaagggtatcgtatttgtttatcccgtgggaagattataatagagagaaccaaactaatatttatatgttacttgtattaatgatgtctaagcagggataaatataattgcagggtagaatgacacacaagcataagctactcatttttatattaaacctcctaagctaagtggaaagaatatagaaaagaatatattcctatacttctagtatacatcctaggtatatgattaactagctaatacctcctttccgatgccctcgtggtactttgagaagccacccttgactgccgagttccttacgacagctcgtcatgactatacaactggggctaaatacggaggagtaccctccccaaggaattaacttaggactatatacacgtgcggacgaatacccatactgagctgtcgccatcagcggcccacctctcatccgcagcatataaccccaaataatgatacccagtaatctagacaccacgcctaaacttccagatactactctaatatcatcgtcatgacatagaataattgcatatgcaaacattatacccgtaccaatgcatctcccagataagctagcagtataatcataatatctcggacatattgtaaagctggtagtcatataataggagagtattacaatactagagtcgtatacaaaagtatattctaaattaaatactagtcttacaaaagagaaagtaaagctgctagagccatacccgaactcttccgaagacttttggattccgactactattctattcctactccactagcttgagagcactaaactaacttgagagaatatgagatctttgttgcttgaagtgtgtgagagggtgaggagtttatatagccaaccaatgacggttgtgacggttggaatggtcggaaataccctccaaccgtcattgggggctaatctaagccgttccccaaaagccctgcatccaacgacgatgaggagggttcggccgaacctcgggctagcccaaccagcccactttttgcctggcggcttccctgacttcttctctctgcagatttgtgaattttgggctttttgggtcttctgaaattgatattttcagcccatcttcctttaagtctgattctcggcatcgtctgattgatcgatcgagtgttttgatgccgattcttctccatttattgcttattctctgcaagaggttagtaaaccaagtactagtggattttattttattctaacactatatgcattgcaagcatgactagctctccttttattccggtaatattgacgggcgaaactgatcgataacgaccatcaacaaaacaccccaagcttgaacctttgctcgtcccgagtaaaggacgaaaggaaacaaaacttggttattgatcaggagttgctactatgctgtatattctcaaatgtacaagtgcaaggtatatgtactctctctcaaatcaaataattttatcacgtggcttacccttacacctgattcccgcgagacattgctttaccttgccctgagcggttgaaagacagaacagcaatgatgagcactagtcacccaatctttattcaactttttattccgaaagttttcaaatgatttttcaaaagaaatctaagttcctcaaatgatcctctcgatcactcaaagtgtataaatatgaattcctcaccaaagtaaccttgttgattcctactctaaggtttagtatgtggagcttggtagggatcaaacatggcatacctgtattcacatttattattaagtcaaaaacttagactagagcatatgactagacatactcaagatcaagatcgtacataaagtgtgtgatatatggtggaaatggaatgtgaaaaaataaagaaaatacttctactttgtgctttctttcttctctaaaaaatccttcatttctttttaggagggggcatggctatattttttttatcatgctcaatattttgaggagcaagaatttattttcataaccatgtctttccctcttttctttctttttggaaaggatattattttgggaggagaaagcatataattagagagctttatttgggtggtaacatgatagatataaatggaatggatggatgctaacttctagtgcaaaagttcgcatgtgcatatatgtgggtgtatgatcttgatcatagagcatgaaaagtatctacacaagtctcaaaaatttgacaaagttcaatggaagtacaagtgccaaaaatatatatggtttgtcaatatgaatatttttggctctggtaggaatttatatcaaatgatgaacttctaagtttatcattttagaaaataaaacatccaaaatttaagtcaaacttagaacaggatcatagcagctcttatcactatctcatatctcacaacaacctagacttagttcagcaagtgcagcccacttacctcaggttcccggataatatgtggccacttttatttaatctttgagatattacttaaccgtgaatccatatataagagatataaaacagtgcaactattcatcatttcaatcaagagaactacttgtcttacctagcataataaaatctaacctatatttttggtattttctattttgcaaatttttatgtcattttttttggtttataggatgcaatgtggaaatgtaaatatgcaatggaaaaggaaaatatgcaatgtgatacaagttacctcagtggggggagatgtctccccccaagcttatctttcgctcagggtccctggtagggattgaacccttggaagcgaaggtacgcttgaagatcagcctgctgttgttgcatcagattgttgatgttaacgaactgagcattagcattttcctaccattcttgcgtctgaacgatgtgtccatcgaggtagtactggatctctcctgtctgcatatcaagggtgtctagcctcctcgtgatttcacccaagtcctgggaggaacttgagcgccaacagttggaggcgggaggcatcccgcttgatccagaggaacaggtgtgcgcgttcccccagtgtacttcacgcggtgcttgccagcggttctcactggcactgtgctaggacgaacctcctgtgttgtgtcgtggtgcttgggtccaaccgggtgcatcccccgttggttcccagtccgcctcgtacatctgcatgggtgttgatgatgatgactcctcgtgtttttgccttggtttgttgcgtgtttccctgtaggatgtacctgcacgagattcttctatggtctgcaggggaatggttagttcctgacagttgtacaaatgataccccgcattgggtaacgggatttcatttgtacaggggaaaaagtatatcaaagagccatcggctccatgcttaagtatatgcccttgcattaaatatgtttcatccacatagggatggacagtgaagatatactcgatttgatcagtggtgataactccatgtccgttcgctatgcgggtgatcaaggaagtgcactcaacaggggcattatacttaatactttctaaccattgcctaatcatatatttaacaggagcaactttagtcttcctaaccttggcaaacatgataatcaactcatctccccgaatgggtctaagatcacctcaaggaaacaaagtcatagcaatccatttgtgcataagcctaagtgtaggattatggatgtcatttgtcctaggttttctgcaagttggagcaccagaaatgtcttcccaaaatctgtttttctcgaacccggaaattcctttccgaagatcgattttacagttatcgtgaaaaccaagaagtgtgcttaatcctttccatgaaagtgtatactccttatggaaaaaacaaaaggatatgctatcttctgtttctttcaaagtgcacagaaattgtatagtaagcaaacgagaacctggctcatctactactacaaatctctgctaacagcgtgaaaatcaacatccatacctgtttttcttagaagttctggatcatacgccctggtgtggccgaactcccggtccttcagcatgtggtaggcttgtagctcccgatcaccaacaatgtcgaggtcggtgtcggtgttaaggaccaaatttggtaaatcatggatcggagatagagattaaaaccgaagcggaatcgaaggaggttgatggtttcggaaacagagtgcgcatcggctggagatcgaatcggctaaggtatgcatcggcagagttcgagtcggacaaggtagccgatgaagtcgattccgacaagatggcattgcaatcattgtcggatcgggttgatatgcttcatgaggattgccacgtgcgtattgagtctgaaaaaagcaattgtatctattaattagatattttatgtaatttacttacagtttgagttggtaagagtctgccttagggacttgttcgtatcctaagttgtaatagagttaggagtcgtgtctgacaagggcatattatgtactttgggttgggtataaaagtagcccaacccgtgttgggctgcttcgccaacctttcactttcgtttactttcgacgagttcttgctttcgagttgggctgcatcggttcgatctccgatgataaggtaaaacttgttatggcggcttgtgttctcgggattagtgctttcatctcaatgatactttaatcttgtttatgtaagttgtcaatttatcatatttcctatataatctagatcaatattgctatctaacctagaattggcaaacatctcttgttggaaggcaaccgatagggttaaataccaacgttgacttagattatatagtatatccaccatcctaggaatcaatcaatgacttgattatctagatattgttcttcttttcatactcattgctgcattagttaagtttgagcttataagttgtgattagaatagtaatctctagcctgtttattgattgccgattagggtttcatcggagtttcaaccgatcttacctgatttggttattttgtctactttatgtttacttaatatgctaagtctgccctttatattaagatctcactctaattaaatatattaagcacgttattaatctgttaagtcatcttaatacttgattgatctctgtttaatatattttgtctatattgatatctcagtataaagtggtatcggagtattagccgatacatgtcagatctgcaacatcggctatgctataaacatatataatctttatattgaagtacttttagacataagtgatttatactgtctcgacaagttgtccgatctatcccagtcacatggtttcaacatattttgatatactgattatatgttgttaatatctacagccgatcgactagatctaaccgtccttttttctttacatatcattaccgatctaattcacgttacatcggctagattacaaacgatacgtcatcggcacatggccgatcggctatcgtttatgaatttaactgtgtttctttctttgtttcttgttggttgcaggatcaaaccaactagcatgcctttgaactcgaaaccaagatttggacctgcactagagttaagcagatctctcaggccagtgtgtgtttttcgcatcaacatgcttttggcacgcccggtgggacacgagtgtgacaagcttccatcatggtggacatcaagtctaccgaggtggatccagacaatgtgattccaataaccatggacatgctaacatcagaacagaagcaagggtttgaagggatgataaatcaactgcaaaatcggtacttacattcatttgttctgactcgttcgggtacagtaattcaaagacacaaggtggatttgccaccggttgatgagaagcctgagtcaagctctgctaatgatgataaacttaaggaagtcaaagctgaaggactcaaacgggaggatgatggtgctccagagttcaacaatctacaagatcgatcagtgtggtcgtgacactgaaaattttgatttaaaatttgattccattttgctctgaaaaattcaatttgaataattgccacaaaattcaaacctaaatgcaatttctttaaaaaaattcaaacatgctttgttgcagaaatcaaattgatgaaaacaaatatgaggatacataccaatttacctattggcgagggcggcgtcgcttcaagtccgacgtgcaagaccgtacctccgacgttcatttcacggatttttcacccgtctccggaggtgatggagtgggcgttttctgcttcgcacgccataccttctttgttcttggtatgggcggcggcttcttctgagccagcttttcttccttcttggccggtgtcttgggttttaccggcgttttccaataacgggacctcatcctggatggttgaatttctagagatttcttcataaacacgatgaggctatccattttgggtggctccacttcgaccgtctgaatgttctacggggctggcccgtactttattcggaacatggagcattgttccgtccttggctggaactcgaacttctcctccttcccgttgatgcggaaacggatacttcccgttccgacatcaatgtttgcttccgcagtgctcaggaacggacgccccaggatgagcggtgtctccttgccagtgtctatgtctagcaccacgaagtcgaccgggataaagcaatctcgtatcttgaccggtacgtcttccgctatcccagctaggtagtgaaccgatgagtcagccaattgaaggcgcatcggtgttggtgtcaacaccgtgaagttgagcttgtcaaagacatccttgggcatgacacttacacttgccccaagatcgcagagcgccaggtcgaatttctatgtcccaattgagcaagtaattgtgggacacctcggatccttcggatccttcttcttctccgggagtttgtggaggatcacgttgctgcattcctccgtcagcttgaccacctcggttgttggtagtggtcgcttgttgttgaggatgtccttgagataacgtgcgtacgttggcacttgcatagcatccaacaacggcatgttgatgtggattttctagatcacctcaacgaatcgagcgaactattcgtcaactgacggtttcctgatcctctatgggaatggcagcaacctcgcgttgcagtagtcttgcggcacggtcttctctggctgaatttcttcttcagccgttgtgttggatggtgcttcccgcgtgttgcttgtacctgcagtgttaggatatggcggatcgcgagtggacttacctcccctcgtcgtgatcaccttaacattttcaatggagggtttgggttgccccgggatccttccagtttcatttgcaagtactagagcggcaagttgcgccaactgggtttcaatcatcttattgaaactcaactggttttgaaatgcggaagcaaagccatctagtttcacatttatattttctaagatcttgtcattggcagccatctttttgttgagtgcgtcggtagttttggcttgcgcaaagacaagatcctttaaggaagacagattagaaaagctaccttggttattgcctccttggaaatacggacggggatggtttcacccctgacctccttgtgggtgatacccattgttgttattgttgttgttacccatgtacatcacctcctcatgggttttcgggcagtcgttcccagagtgacccgtgttgccacagacttcacacgtaacgtgtgagtccaaggccttgacggtgccttggggcttcttctcgtgttcgtccaatctcttcatgaggaggtcgagttttgcagtgaacatttccgtctccttgacggtgtgcattccttgctgatgggactagagtcgtacctcgctccaccccatattagagaccattttctctatcagatcgacggcccctctgaccgtcttagagaaaaaggctcctccagctgccgcgtctaggtggtcacgggacgtgggagtgagtccattataaaagttctacaggatcagccagtcgtccatctcatgatgaggacaggcggccacgtactcctgcagacgttcccatgcctctggaatggactcatcacgtgtctgctggaagctcgaaattctcccacgaagggcatttgtcttgcccatcggaaagaacttcgacaagaatactatcgagcatttgtcccaggtattgatcacggcacgattggcataaaaccactgcttcgctttcccgaggagggaaaacggaaacagccgcagcctgacgacgtcaggactgacgccctttacggtgtacgtgctgcagatctccaggaaccattgcatatgtgcattagcatcctcgttaggcttgccgcagaatgggctagcctgcgccatcgtaatgaggctggatttcaggtcaaagtccacgtctcccatgttgagttgcggcccagtggccacgttctcagaggagggagcagcgaactcgcggagggtcttgtcagccatagtcttgaaagttggtggcgctggtacggctggcttctttgtcggaagagtcttctgcgggggaacaacccgcggctttacgcttcggaagaagacttctggattttcttgaaaattttccggcaagtcgaaacctgtcatgcactaccctgttttcacaacaaaaggtgaaaacaacatggttagcctgcaaagcacagtgattatatagaggtaaatataagatattagttttagtaatctctttttacaaatcttccccgggaacggcgctagaaatgcttgttggtatttcttaacgacattactagaaatataattcccagcaatggcgccaaaaatagtcatggtatattatggttacagagtttatccacaagcgcatggatataccattgtagcatttcacccgagagtattccaagggtatcatatttgtttatcccatgggaagattataatagagagaaccaaactaatatttatatgttacttgtattaatcatgtctaagcaggggtaaatataattgcagggtagaatgacacacaagcataagctactcattcttatattaaatctcctaagctaagtggaaagagtatagaaaagaatctatttctatacttctagtatacatattatacatacatcctaggtatatgattaactagctaataccccctttccgatgccctcctggtactttgagaagccacccctgacagctgagttccttacgacagcccgtcataaccattcaaccagggctaaatacggaggagtaccctccccagggaattaacttaggactatatacacgcgcggaggaatacccatactgagctgtcgccatcagcggcccacctctcatccgcagcatataaccccaaataatgataccgagtaatctagataccatgcctaaactaccagatactactctagtatcatcgtcatgacatagagtaatttcatatgcaaacattatacccgtaccaatgcatctcccagataagctagcagtataatcataatatctcagacattgtaaagcttgtattcatataattggagagtattacaataccagagtcgtatacaaaagtatattctaaattaaatactagtcttacaaaagaagaaagtaaagctactagagccatacccgaactcttccgaagacttccggactttgactacaattttattccgactccactagcttgagagcactaaactaacttgagagaatatgagagctttgttgcttgaagtgtgtggagaaagtgagagggtgaggggtttatatagcctcccaatgacgattgtgatggttggaatggtcggaaataccctccaaccatcattgggggctaatctaagttgttcccccaaagcgctgcatccaacggcgatgaggagggttacctcaggccggcccaaccagcccaccttttatcctgcggcctccctgacttcatctctccgcagacttatgaattttgggcattttgggtcttctgaaattgatattttcagcccatcttcctttaagtctgattctcggcatcgtctgattgatcgatcgagtgttttgatgcctattcttctccatttattgcttattctctacaagaggttagtaaaccaagtaatagtggattttattttattctaacactatatgcattgtaagcatgactagttctccttttattccggtaatattgacgggcgaaattgatcgataacgaccgtcaacagcgggcggcgccagaggagatgttgccgccattgacggcggacgatttgtgattttgtggttttttagatgatttgtgaatttgtggatgattttgttgtttagtatgttcattcgatctgtgacgtcaatttgatgtggggatttgggaatgtcggcaattagcaaaataaaaaacaatgaaaaaaagaaaaagagaagacctttagtcctggttggtgaatctttagtcccagttatttcaaccgagacaaaagatagatatctttagtcctgctttcagagtcccagtttgtaacccgggactaaagaggttgtaaaccgggagcaaagagggtatacccaacagtgtatagtactaaccagtgggtttagttaagttgcccgcatctctttcgataaaactgacatccagaaagtaaggcaagtgggggtaagcgtaagccaaaaacaagttacgtcaaagaaccaaagaagcacggcggtatcttcttctgttcacgcacatgcatttatgcatttccaactcgaatgtgtgccagtgccactcgcatatatcaaatcaacatattggctcgtccctccaattcgagacaatactacaacatctagaaaacaactttaaacattattttttattataatatatatgaaaacaataacaaataaatgatattattaaaatactttttaagactactctatacatataatctccatatttctaagataaatattttagaaattattatagataaagattttaaagtttgatcttatattctcatttgtgttcaaaacgaccagtattatttgtccggatgagtagtataattacttttagagtttaaatttatcttaaaaaatatagttatttcttctttatcttctcattacagtgaataataacaatctctcattgaatttctatacctactttctatttttaacaaatcataaacttctaaaatttatacacctattttctatttttaaccaatcaaaaccttccaatttaaaagtatttaagaatacttaaattttagtactgaggggagtagtctggtacccacactacctgcatgaaaataataataataaaaaactgatgccaccacactaccacagcaagtctggtacccacgctaccaactttctctaacttctactctctcgttttttatgcacatgttttccaaactgctaaacggtgtgtgttttataaaagttttctatagaaaagttacattaaaaaaatcatattaatttatttttcaagtttttaagactaatacttaattaatcacgtgctaatggacaaccccattttccgtggaattcaacctcccgaacgtagccctagttaacataccatcaagatttcagatcatctatctttggatatttgatcaagtaagaggagcagctaaattttataattttttttataaaatttggtgaaaaaagacgaaaaatttgcactcaatctgcagggcctatgccaatgtccaaagcttcacctttttttttataaaccagcttgatgttttatcattcttgaaaatgtatcagaagaaaattgaagataccaacaagaaacgaaacttactcttaacttcatttaaaattattaggaaaatatacaaaatatgatacagcactttccgaggaaccagagttgtcagagtcatggtctcatggagcctaattgatttgccaaccaccaaggcaccaacttgttaaattagtagagttcttctcactacgctaactcgctatgtccttaagatcttgactggtctctccgagtggcgacctgctgattcttcgagtagtagttttcgtattggcagtattgtccggccgctgattctgctcaaagaccggccatggccgccggcgtcctcatgacaaaaccgttcatggctgccgcttctgctctagcctgcttgctcgtcatgctgcgctgcttgcctagcgtcgtcgctaccacggtatctttcaactactccaccttcagcaacgcgaagaacatcaccctccagggcagcgcggcgttcgccggcggggggtgcatcgagatcaccaccggaagcaacctgccgagcagcggcaccatgggacgcgtggcgtacacgccgccggtgcagctctgggacgccgccaccggcgaggttgccagcttcaccacgcgcttctccttcaacatcactccgacgaatttggacaacaagggcgacgggatggccttcttcctcgtcggctacccgtcaaggatgccggacaagggcgacggtggcgccctcggcctcaccagccggtactttgacaccgtccagcccggcgagaaccggttcgtcgccgtcgaattcgacacttatctaaaccgcgacttcgaccccaacgcaacctacgaccacatcggcatcgacgtcaactccatcagatcggtgcagaccgagtcgctgcccagcttcagcctcaccgggaacatgaccgccattgtcgactacaacagcagctcgagcatcctgtcggcccagctggtgaagacatggacgaatggctcgactacactttacaaccttagcaccaccgtcgatctcaagagcgccttgccggagaaggtctccgtcggcatcttggcggcgacgggcttatcccttgagctccatcagctgcattcttggtacttcaactcctcgttccagcagaatccaccaccggcggtgcaacattccccgaccacctcaggttccggacttgccggagttatagctggagccaccgttggtgcagcactgttcgtcgtgctcctctttgccatggtagttgtccttgtgcggcgacgtcggagcaagaagagaagggaggtagaagaggcagaggaggcgagacacgtagggttggccagagatgacgatgatgacgatgacggtgagcccatcgtggagatcgagatgggcatggggccaaggcaaatcccataccaagacctcatcgaggcgacgaacagctttgcggcggaggagaagcttgggcaaggcggcttcggtgccgtgtacaggggatacctgagagagcagggcctcgccgtcgccattaagaggtttgctaaggattcctccaagcaagggaagaaagagtataggtcggagatcaaggtgataagccggttgcgccaccgcaatctggtgcagctcattggctggtgccatggccgcgacgagctcctactcatctatgaactcgtccccaaccgcagcctcgacattcacctccatggcaatggcaccttcctaacatggccgatgaggttagtacctgttctctttaacttcatctaaacttcctttgtgatgttaaattaattggcgtgttaaactcagctaacttggtcttaacttgtcacagggttaagattgttcttgggcttggatcagcactattctatctccatgaggagtgggaacagtgtgtcgtgcaccgtgacatcaagccgagcaatgtcatgctggatgagtaattcaatgccaagctaggcgacttcgggcttgcaaggttcatcgaccatgccgtggggatgcagacgatgaccgccgtctctgggacaccaggctatgttgatcctgaatgcgtgatcaccggtagagcaagcttagagtctgatgtttatagcttcggcattgtcttattggaagtggcatgcggaaggaggccaatgagcctacaagataaccagaagaatggcatcttccggttggtcgagtgggcctgggacctgtacggacaaggagatgttgtctcagcggctgatgagcggctcaacggtgattacgacgtgtcagagatggagcgtgtcatcgttgtggggctttggtgtgcgcatccagacccaagcgcatgaccatctatccgagcagccatggccatgctccagtctagtgggcaattaccggtgttacctgctaagatgcctgtgccaacatatgcgccgccagtggcctcagtggaggggctcttcacatcgtccactggaatgtcgtcctcaagtgcagcacaatcatcatcgacgaccagtggctacatcactcacacctcgagttcctctaacacatccacttcagctggttcaaaggactcgtcttcgttgctcaaacatcaatacttatgatgttcaattcatttgctttgttactaattttgacttgatgcttgaatgggatgtacaactcgtgagccattgattttccatttagagtagtctaattgccaatgtgagtaatgcatgtgcatttatgccatgatttaaattttactcccattttagtttttctagatagatttatcctgccattttctcttcaatgtctgactactataaagtgcataccttgcatgttttaagtgaatatcctagtccttagagggctgaattgtcgaagttggaagaactttaaaatgaaaaaaaaaaccaccaagagaagagaactcttacatacttcacatagtttgcatgttttcacttttcagtgaataacgcaaaggtgtaaacaacatgaactaaatataataagctaaattcaatagagatggaacatggcctctacagactatagacaatagtacaaagactgcttattttcagtagttcttatgcaattgtctcaaatcgtggatatttatgttggatacttcggtggtggaatcaagaacatccaagcaaaattgttaacactacaaaatagtaccagcatagtagttcactcactatgacctgtagattttcagctggttgttttgccctgtttttcagcttttcaaccaaaaggttgttctccccaaatcttaacgaaaattcgggcagcgctctttgtcagcctggcaaaacaaataataataaattagacattcatgcaagaaacatgtcatccaggattgacaactctgctacctcacggatcgatcaagtcaaatttggaaataaaagagttggttatgataggttcagcaatgggtttgctgctgcaaaattctcaacagaatctgatagaacaacccattggaccctactccttccagaagaaaggaaagatctggaaacattatatgatggcacagtagctagtgacccattctctttcacattatgtccttagccatgatcaaacgcgcttggtcaaaccaaccagtaccaggatgattgacagaagagtaacgagaacgaattttgacaaagagaaacagctccagtgatttacgcattcgaaattaaaaactacaatagttacagcaatttttcatctataaaagtccatgcatagcctcttttgaatgtccaagttagctattcaacattgatgcaggattgtgcttacctaaaattaagttgaagcccttacattcttttgttgaagggacatcagaaaacgttaagaggctaaactaataaatacgaagatacccaaccttagaggaaagttagtgttggacaccaaattgggcatttatcacatctaaattatctcacgaaaaaacaatttttttcacattggacaaaacaaaaaaacagcagtactattgtgaccaatcaaccacaagcatttttcacattaagttgaggttatgaggtaacggatgcaaaaccctcatctagtcacctattggaagaggaagctccggtagggacagtcggcggcgatgcactgtcgcagcctagcgtcctccgccgggcggtgcagcatcgtcagagaatccgctctcaccgccggcgtgaagtgcctgacaaggtcccgccattttggaattaggatagttcccttccagacctagctagcagcaacaacacctgcggaggcgggaggcgtggaggagctacaggatacttcgccaaccggaacttgctcatcaccggagatctcggtcggcgcgcggccgacgaccagagctatgcggcagcggcggcgacgcggtagaatacgcttcagttgcggaaagaagaaaaagcttaaaccgaggatggctatagttgggccgtgcaacgtccggataacattttattggggaataagtccaccggaggcgagactttttgagatcccttaaccacaaaaccagaaatgtgtatccctaaactcacacaaaccgtgcactcaaggtcctatggcagtatatatgggtggtttcgctgacgtggcatcctagtcagcaaaaaaaattaaaaaagtacgtggagcccacatgctagctacacatttttttttcttctcttttcttcttcttcttcttcagtaaggaaggccggcgggcggctgccctgcgtggcagtggagcggcgccgagatgcgggcagagcggcaatgagcggcggtgggcgagcagaagagcatgacgacagtgtggccgccgtgcgcgatgttgatgctgttgatgtggtagtagtcggagatggtggacttcatggtggtctcacagaagatgttctcgctgcggcgggcgcccttgccggacttcatgtggaggaggtgcgggcccgccgccgcccatcaccgcttcccccgccgcggcgctcgcctgctgcccgcccatcgccgctccgcccgccgcccgctggcctccctcactgaagaagaagagaagagagaagagagaagagagaaaaaagaagagaagaagaagaaaagataagaaaaaagatgtgcagatgacatgtggcccctacatactttttttaattttttttgctgactaggataccacgtcagcgaaaccacccatatatactgtcataggaccttgagtgcatggtttgtgtgagtttaggctatatatttctggttttgtggttaagggacctcaaaaaaatctcgctgttaagttgagggacctccggtgaacttattccttttattggactaactcaagtcctaaaatgggcttaggccaaagtttttgaagagcgggggagtatgttgggacccccgtgggggtgggacaagtctattttttgtcggagccatgtagctcggaggcaccgttggatctggcatgggaggatgacgatgcagaggaatggggaaggggagagtgaactggggaggcctcaggtgagcattgctgcctccttcttgtggatgagctaatgtggtaaggttgggatgacggatcggtggtggagctcacggaggaggagcaaggcaacagtgcagctctccgatgatcgcaccagtgttgttgtccccatcttcgttgtgaggatggcatctcatccttgcccacgttggctcgagtgctggccatctcgagctcgctacagagggcggtttcagtgatgtggatatggggaaacaacacacggcatcgctcgagacccctatgtcatgggcctattgggtccactaggttttttgtttttaaaatttttcaactcaatgacatgcgggtcccattaagtttttattctattattttagtgccatgtaggatgaacaattccacatagacacatgtgatcttcgctaccgccgttgtgtcatcgccaccgaagcctcggaactcccgaggccgacattgccatcgacgagctcccaagtgccagatccatgtctttgtcatcactgccgaggtcccaagcgccggatccgacgccgttgtcggcatcgctgccagatgtccctacagctcccgaggccagcactgccagggagctcctgagcgccagattcattgttgttgtcatcgctgccgaggttccgagcgctagatttgcctccgctgagtttctgagcgccggatccgccagttcccaagctcctagctcgcacctgccgtcgccgctgccagaagctcatcaacgcctttgcaagcccgtcaccccgctccggccatagtcatcttcgccggcggatctagagggggagaagtagatgcggagaaaagctaagtgagagagggagagagaaggagaggagagtggatcggggtaggggaatggttataaagaagagggttggctagaaagttgtttttgcattcaggtctcttaagtggctcgcatttgataatcgatttcttcatgtgggtctcaaccaaatagcatccaaatatttttatatgcggatgttttcttggcccgcttgaaactaagggcccctttgatttggaggaaaaacataggaattttagaggatttcaattttatcggaaaattttctatgaagccctttaaaacaaatgattgaatcctatccaatcctctgaaatttctatagaatggacaatcctatagagattttggaggaaatttagcaagagcttcaacctcttggtaactttcctttgagtctacatctctcattcaattcctacgtttttcctgcggttcattcaaacggtcattcctgtgtttttcctgcgttttgcaatcctctgttttacacttacattcctatcaaaatcttacgttttttctatttctacgttttctcaatcctacgattcaaaggggccctaaatagggggtgcctcaataaaagtcattttcgtagtagtgaacctttccgtcttcaagtgattttctcttcagtttcctaagtaacccagattatcatgtagattcaaaggcacataaattacagaattcagaaaatgaagcagagtagctttaagattctcactagctaaagctgcttcttaaacctccagctctttaaacagagccattgacttggtgctccaagctagagctcagcatttcggtcttcagtcccatatgaccaacaaacaatcgatcgttgactcaacgcaatctcttctgaccccgacggtcgaaaactatggccggagcacagaaagaagtaattcaatgccaatttggcacaattaatacaagtggaagaacaaatattaccaataaatcaacggcaagattgtgttacaattccttgttagaccgagccggcttctcgagtctctgtttgctagtggtggctggcaccagctgctcgagtgatatcgtggacatcagttgaacaggctaatgggtagtagaggtgatccatccacctgtgtattaattactaaaaccattggattgttacccattttatcctttatttaatgagaaagttcttgaccatttatgtcaaaacgaagtccatgacgaacattattaaataaaaagagattaattatgtggcatcacttgtagtgttgctgttaggctcattgttttgtgagtagcaattcttgttaccatttcttcaaactagttttgatgtcacatgagaatgatattgccaatttatttaagttttaatttttttactatcatccttcagtagcaccactaccaccatatagttgttttgtgatacatctcggtctctcaactcttagaggcatgtggcaatgtttcttgaatgttatcgaaaaagttaagaaaaacaaaagctgacaacgtagattaggtttctatcaataacacacaaaaaaaagcagaccataaaaaatacaattggatttggattcacgcactaagggcaaaacaacatcggtggaagggagaggaggaggacgcgacaaagagccactagcaggttcgccaaagattcctccaagcaagggaagaaagagtatatgtcggagatcaaggtgataagccggttgtgctaccacaatctagtgcagctcatcgggtggtgccatggccgcgacgagctcctactcgtctacgaactcgtccccaaccgcagcctcgacatccagctccatggcaatggcaccttcctgacatggccaatgaggttagtaactgtcctctctaacttcatctcaacttcctttgtgatgttaaattaatcggtgtattaactcagctaagatggttttaacttgtcacagggttaagattgttcttgggcttggatcagcactgttcaatctccatgaggagtgggaacattgcgttgtgcatcgcgacatcaagccgagcaatgtcatactggatgagtctttcaatgccaagctaggcgacttcgggcttgcaaggttcatcgaccatgccatggggatgcagacgatgaccgccgtctttgggacaccaggctatgctgatcctgaatgcgtgatcaccggtagagcaacctcagagtctgatgtttatagctttggctttgtcctattggaagtggcatgcggaaggaggccaatgagcctacaagataaccaaaagaatggcatcttctggttggtcgagtgggcatgggacctgtatggacaaggagatgttgtctcagcggctgatgagcggctcaacggtggttacgacgtgtcggagttggagcatgtcatcattgtggggctttggtgtgtgcatccagacccaagcgcacgaccatctatcagaaccgccatggccatgttccagtctagtgggcaactactggtgttacctgctaagatgcttgtgccaacatatttttagataatagaatttaacattccgacctttgcttaaaaagagctacaaccaattattacaaagtagcactctagaaaagagtgtaggggaggggctcagtggaggggctcttcacatcgtccactaggcgctgccggtgaccttagtggaggggctcttcacatcatccactagaatgtcgtcctcaagtacatgcaacacaatcatcatcaacgaccagtggctacatcactcacacctcgagttcctctaacacatccacttcagctggttcaaaggactcgtcttcgttgctcaaacatcaatacttatgatgttcaattcatttgatttgttactaattttgacttgatgcttgaatggatgtacaacgcatgaaccattgattttccttttagagtagtctaattgccaacgtgagtaatgtatgtgcatttatgccatgatttaaattttactcctattttagtttttctagacagatccattgacttggtgctccaaactagagctcagcactttggtcttcggttccatatgaccaacaacacaaaaatagcaactcgtattgataacaatcgatcgttgactcaacgcaatctcttctgaccccgacggtcgaaaactatggccggaatacagaagaagcaaatcaatgctaatttggcacaattactatacgtggaagaactaaataatactccctccttccctaaattttgacgttgttgatttttttaaatatgtttgaccgttcatcttattcaaaaacttttgtgaaatatgtaaaactatatgtatacataaaaatatatttaacaataaatcaaatcataggaaaagaattaataattacttaaattttttgaataagacgaacgatcaaacatactacctatatattttaatgtatgacaccgttgactttttaaccaacgtttgaccattcgtcttattcaaaaaatttatgtaatcatcatttattttactgtgacttgatttatcatcacatattctttaagcatgacctaaatattttatatttgcataaaaattttgaataagacgaatggtcaaatgttattcgaaaagtcaatggcgtcatacattaaaatacggagggagtatttaaaaaagtaaacggcgtcaaacattttgagatggatggagtataaccaataaatgaatggcaagcgtgtgctacaattctttgttagacgagccggccgtcttctcgagtctctgtgtgctagtggtggcatcagctgctcgagtgagttatcgtggacatcagctaaataggggtgatctgtccacctgtgtattaataattaaaaccattggattgttacccattttaagttcttgaccatttatctcaaaacgaagtacttgacgaaagagagattaattatgtggcatcacttgtagcgttgttgtcagtctcattgtttagtgagtggcaattcttatgaccatttgttcaaactatttttgatgtcacaaggttggagacctatttctggacatcaccttaccgggggaatgagaatgctattgccaatttatttacgtttttaactatcgtgcttgataggcaccactaccacaataacgtttctagcttgaatgtgatcgaaatagttaagaaaaacaaaagctgacaacgtagattcactagaacgggattggatatctctaacgggcttaaagcatcatctctttcgggcagggagcaaaggtcagtaataagaaaatatctcaatcgggcatccggccgtcacggatgacacatctcaatcaagccaacataaaagcccgtcatggatgactctcatctctaacgggcctagattatagcccgtcacggatgactctcatctctaacgggtctagattatagcccgtcacagatgagtataattcaaaaaaaaataaattttgtttttttgttagcctaaggcctttgccctcactagtgtgccttcctggtcggtcaccaatccagactcgtgtgcacccaggatgaattttccagtcggtcacccatcccgtttaacctcacagttctttggagattggcttccgagaaagaaattgtaatttgttggtatgagtattctattaatcctattaagcactgggccaggatgtcacaccctagcatcgcctattcatatacattcattcacataacacaaccacattcacataacatccattttgatcacatatttcaccagcgaatctgagttaattggatcaaatatatatttagcaagtattatcatgagtaggaggcaaatcagacttttaagaaaaaatgaatttcgaattgaattttatgatactaaatgaactcatatgaaaaagctatcaaaaacaaagttgtagaacacattgagatctaccatttttattttggtcatttcaccatccgggtttgattgaactatataaattttgtattttaaaatataagaaattcaaatattttttcgggtagtaaatgatttcaaatggaaaaattgtcaacaacaaagttgtataactcatcaagatctataacttttattttggttatttttctatataacgtctttttaacagtttgaatttgaatttaaaaatatgacaacttcaaataatattttcaaataataaatgatttcaactgaaaaagtcatcaacaacaaagttgtataactcatcaatatctataacttttattttgttcatttttctatacaacatttttttaacagtttgaatttgaatttgaaaatatgacaaactcaaacaacattttcaaatactaaatgatttcaactgaaaaagtcatcaacaacaaagttgtataactcaccaaaatctataacttttattttggtcattttttcatccgacaaagtgatagtaacattgttcacaaaattcacatatctctcatctagttttataaactataatacagatatgtaaattttgtaaacaatcttactaacactttatcggatgaagaaatgttaaaaataaaagttatagatcttgatgagttatacaactttgttgttgatgattttttcagttgaaatcatttagtatttaaaaatgttgtttgaagttgtcatattttcaaatttaaattcaaactgttcaaaaaatgttatatagaaaaatgagcaaaataaaagttatagatcttgatgagttatataactttgttgttgatgaccttttcagttgaaatcattaagtatttgaaaatgttgtttgaagttgtcatattttcaaatttaaattcaaattcaaactgttaaaaatatgttatattgaaaaatgaccaaaataaaagttatctctaacaggcatcaacaaaagcccgacaccgatatgagtcatcggtgacgggctttaaaatcatctcaatcgggccatatttggagcccgtcaccgatgaccctcatctctgacgggctcggtgtctgggcccgattgagatgtgcgaggtcatctcaatcgggcctaaatctttgcccgtcacagatgagtgtcatcggtgacgggctatatgtacttgggcctagagtgagtacatctacaacggtgcaaatttaccgattaagatgacttcgttctgacggtccaagtagtccaggcataattgagcccgtcacagattctaggatcggtactagtgattagttttcaatctacatacatgtaaagtcaaattcatctaaccaaaacaaaaacagaccataaaaaatacaattggatgtgggttaacgcactacaacagatcagcttcctagacagattctctgtgacaaatggggaatccgtcattgatttgtgatgaattcacaaaaagaaaatcattgtaaagttcaccttcagcctatcctagcgacggttggaggtcttccccacgacgaacaagattgtcacgaaatgatggtgatttcgtcgttagcagttgggctatcatatattaaaattgttaggggtatttttgtttctcaatctagagatagatattaatttgacccactttttatgatatcaatcactttaaggagtttataaccggacaaaatttgctctaggtcattctagaattgtgacatttatcctaggataatataattatgcggctcgccgtatgatggtctagttttgcgtctctttgccaagacacactttagcctttgttttgacatatactcttcaaatgaatttctaaaagaagagattgcccgaagacctaccaggcaggcctgagggcagtttcatcttttcaaaagttttctcttcccaattgaagaggataggttaaaagaagtggctatatatctaacttttgacagataactatgtaacacctatgtaaattaaaacttgcgttgtaacacaatcggagaggtggagagcatatgccccctagctggcatggcatcacgatttcgacgcctggtcacagagcactccatcaactttttattcctgatcatgcgcacaaatctccaggccaatccaacggaagaaaatttgaaagtttttcctccacttttcttaacatagtaaaatagtaagttcttttggcaaaagaccacaagtccataaaacaaagtgtattttggcaaaagaccacaatcccgtgacaaccgtaaactatagtgccttagaacaaattttgccttaggctataagccaactaactatatctaaatgtggagcagagagatgaaaaaaagtgttagctctcatgtaagagctagctctacacagtacacagctataagataaacacattaaatatataatgagacaaagaaaggataagaaaagcatagataataaaataacttgtctatttatatatgttaggtctaatactattttaagatggacttacttagcttatgactttgtatcataaggaccaaacgagtattacatagcttaatatccacatcatctgcttacctctttgttttgacgtactcttctttcgtcacgtatttacaggctgttaccctagcgcgagcggatccaaatccgtccaaagtcattggttaagttcgatcaccagcgagtaaatagttccatcaacttcgcttgtatcatcgtgattaaactttctcggataagtatgatattttattaaggttgatgtaagcgatacctatatgatatattgattctatttttaactgcatcactatttagagtcgtattggcttagttaggactttctcggtttttatgcaatgtttcatcggagttctagtcgatgagttatcttgttactacttctaaatgttgtattggcttatactcaaactcgcataatcactagttaaatctctttttatgaactttacccttatactatttcggtttggtctgatctatcaagattgtttttataaagaacagtttattcataattatgcatagtttagttatggccaataatagcacgaattttattgtttgtctgattattatgtgaatctcaattgagcctatagctgattgatcaaaaccctatcatatcggctggcctagccacatcccattggcttactggctaattggcaccttgatcatcgatctattcaaactaactggcacatccttaactcgattgataggaccggcactggacctaagcagatctctcaggtctttgttgttgggaatagtcccacattgcttatctagggggagttgaaccaacttaaaaatggggggagtccttcacctcttgagctagcttttggggtgtagcaaggctttctcctggttgggccaacgtctcccggttttgggccaacaagtggtatcagagccaaacccacaatctctagtgcttgtgcacactcagggtggtgtaagcccaaagcccagtggaccgcgggtgtgaggcccgtatgtgcctgtgtgtggggccggtcagggctaaggggcaccaatgtgtgaccacaatctctagtgcttgtgcacactcagggtggtgtaagcctaaagcccagtggaccgcgggtgtgaggcccgtatgtgcctgtgtgtggggccggtcagggctaaggggcaccaatgtgtgatgggggagattgttgggaatagtcccacattgcttatctagggggagttgaaccaacttaaaagtggggggaacccttcacctcttgagctagctttttgggtgtagcaagactttctccccgttgggccaacgtctcccagttttgggccaacatttgtgtgtgcaacagttagctagcccatgcatcgtagcgcatgagccaactcatgtgtttgaacccccccccctccccccaaagcgcatgatgcaattttttttaaaaaagaattagcaaatccttaaaataatagctaaagtgtgttttgacaaatgatcacaatcaaataaggagtgttatctctcattcaaaaggtagctctacaaatatataggatgaatgcattaaatacataactgagacaaagagagaataagaaaagtagagacttgtctgttacgtactcccttcgtcccaaaataagccaatctcgaactatatatatgtctagattcagtatagtccgatatatgtactttgaggttggcttattttggaatggaggaggtatgttagatctaatgctatttttagatgaacttagttagcttatgactttgtatcataccacatcatctgcttacctgtgttttgtcgtactcttcttttgtcatgtatttactggctggcgcaagcgcgggtccaatccgtccaaaggtaaaaatggcggggggctgatcggttactttaaatccgtactccagactgcattgtcacgtaggaaggctcccgagcattgtctctcatttctccccagctagtcacgccgatcagtactggtagtctatcactagctagctatatcgttgtcacccttgcgcgccgatcgacgccggcggtgatggccggcttttctttgatcagttgcgctgtgggtatcatcttcttctccgtttgctacctgcctgcggctcctgccgccgccttgtccttcaactactccaccttcagctcggacaaccaggaggacttcacattcgaaggcaacgcctccatccacgacgggtgtattgatttcgttgcgaacgggacctggggcaggggctacaggccctacagcaccggacgggtgtcctacaaattgccggtgcggctctgggacgctgccaccggcgaggtggccagcttcaccacaaccttctccttcaacatcacgccgatgaatattagcgacaagggcgatggcatggccttctttctcgtcagctatccatcaaggatgccgctgaccgccgacggcgacactctcggcctcgtgagcaacaaacccgaaaacgctccggccggcggcgaccaattcgtcgccgtcgagtttgacacctacccaaaccccggcttggaccctaacgctaccggtgaccacatcggcatcgacatcaactcagtccgatcgttgacgaccgaacccttgaccaactccagcctcatcggtaacatgaccgccatcgtccactacgatagcagttcgagcatcctgtcggtgaagctgtggataaatgacacgacgaagccgccttacaaccttagctacgaaattgttgatctcaagaaaaaattgccggagaacgtcaccatcggcttctcggcggcaacgggcgcatcagatgagctacaccagctgacttcttggtacttcaactcgagctcgtcgttcgagcataagcatggacgtgccggggttgtagcgggagccaccgtcggcgcgacgttgttcgttgtgctgctcttcactgctgcagctatcctcatacggcgacgtcggatcaaaaacaggaaggaggcagaggatgagcaggacataagctcggacagcgaagacaatgacggcgagcccatcgtggagattgagatggggactgcgccaaggcgattgccatactatgagctcgtcgaggcgaccaagaacttcgcggtggaggagaagctcgggcaaggcggcttcggttcggtgtaccgaggctacctaagagagcagggcctcgccgtcgccattaaacgcttcgccaaagattcctccaagcaagggaggaaggagtataagtcggagatcaaggtgataagccggctgcgccaccgcaatctcgtgcagctcgtcggctggtgccatggacgcaacgagctcctccttgtctatgagctcgtccccaaccgcagtcttgacgtccatctccatggcaatggcaccttccttacttggccaatgaggttattaattatccgtgctaactttctcatctcaactgcttcgatgagtgtcaaatctaattctatttttatcttgcttaattggttgtttccacaggatcaagattgttctcgggctcggatcagcactactctacctccaccaagagtgggaacaatgtgtcgtgcaccgtgacatcaaaccaagcaacgtcatgttggatgaatccttcagtgccaagctaggtgacttcgggctcgcgaggctcatcgaccacaccatcggtataaagacaatgaccgccatgtcaggaacaccgggctaccttgaccctgaatgtgtgatcaccggtagagcgagtgccgagtcctacgtttacagtttcggcattgtcctactggaggtggcatgcgggaggagaccgatgagcctactagacagccagaataacggcgtcttccgactggttgagtgggcctgggatttgtatggcaagggagatgttctcatggccgccgacaagcgtctcgacggcgactacgattctgcggagatggagcgtgtcatcgctctcgggctctggtgcgtgcaccctgacccaagtgtgcgaccgtctatcagagacgccatggccatactccagtcgagtggaggccaactgccagtgctatcggccaagatgcccgtgccaatgtacgcgccgccgatggcctcgtttgacgggctagctgtttgcgtcatctacagggatgtcgtcgtcctcaggtgtgacgcagtcgtcgtccacatcgacgacgagcggccatgctattcacacctcgtgttcctcggtttcctccgattcaaccggttcgaaggactcgtcttcattgctcaagcatcagtgctagtgtttagtgtttgttttttaatttgcttgttcttagtttagagttgatttggtctttggtgttgcctaattgccgatttgagtaatgtatgtgtatttaggccatgatttgagtaatgtatgtgtacttatgccatgaatcttatggcactgtagtttctctagaaagatctgtccggccattttctgttccagcattagaataagtcgagtgagggacatgggcaacgatagtagctactgcagcagcactacaattgaggcgaatcaaacgatcggcccattacaattgaaggggtggtcgccatcctcctcatgggccattgcctacagaacgaattgggttgggacacagccgctaggaaaagcctgatctacatgcctatccccaatgcattaaatcaactttacatcccttatgtttccatcgagtttaaatcgcatctctgaaccgcaatacaagaagtctagacccacaacttgtaaaactaacttaaattaggttcttcggcgatatagataggtgatttcgctgataaatataaaaaaatgcatacctaactctaaggctataaatagacccctccaagagaacatatattgtaagtgagtttcaataaatatatttactttctttgtgtacacttagaaaccactgtttgtcctcttagacaacaccatgaaaattcagaaaatgtgcaatattgtatttttatcaatcctaatttcagaaaaatcctttatcaagaaaatgttggaattaatggatgggccttagcccactcgaagattaattctttggaaaatcacaaaagctcacctcatgagatggcatgcgtgtggagtttagtaccaccttgcttattttaggagaaggggaccttcttaaaagggaggatgccctcctagccacttgaagcatgtgtggtggagagaagagggggaacacacgcgcgcgctcgctcgccgggcagggcaggcggcgcgcgtgcacgacgtacgcgtcgaatggtccgcaaaattggctcctcacccttgcgcagatgcagcctccttttgcagttttgttttgctgcaagaaaattcggatttgttttgttgtaggaaacattccgaaaaatccggtgcgtgaaaacggcgtggagtccagataagttacgcgcgacttatccggttcggttacgcggagtggagatcgtgcgggcgccctgatcaagcgacctatctctatataaaccgagccgctgccttcacgcaacacacgtgaaatcaatctagggtttgcctcctcctctgtgttgtgccgtcgctcgtagactactccatcccgatcgtcagcgtgcaccggcaatcgggagagcaggtctccggaacctctgccttcgacgtcctgcaccgggagaaggcggcaataaggtttttgggaagcgctccgcgcgactgctctctgtttgttcgcgacggctcgccttcctctccgctcgcgtgctgcacgccttcgtcgacgctcgcaacagcgagtagttcctgccgagcaaccggtctttccgccacctcggtacgtgttcgacatgttgcgcatatttgatctgttcatgttttactgcttagtttacatgtgtagatctaatgatgtgttactgctagtatacatctgcaatgttatgatttatttatggaatatattaaatcattatatgcctatattctcaacaatccaaaaaccttattataggcgctgtgattttactatggctggttttgccgatgcactgaggccggataaattcaccggtgtgcactttaagagatggcagatcagggtcgctttgtggctgacagctatgaaatgcttctgggtgagtactggtaaacctgaaggaattcttgctgctgatcagcataagcaattcgagaaagccactactctctttgtgggatgcattcttagcgttcttggcaatcgtctggtcgaggtgtatatgcacatgaccaacgctaaggagttgtgggatgcactgaatactaaattcggtgctactgatgctagcaatgatctgtacatcatggagcagtttcatgactacaggatggctgacaaccgttctgtagtcgaacaggctcatgaggtacaaaccatggctaaggaactcgaactccttaagtgtgtcttacccgacaaatttgtggccgggtgcattattgcgaaactacctctatcttggagaagtttcggtactgcactcaaatacaagagacaggaatactccgttgaggggttgatagtgtctcttgatgttgaggagaaagctcgggaaaaggacgccgcgtctaagggcgacggtgggcagtccagtgccaatgttgtgcacaaggcccagaacaagagcaaggggaaatacaaagctcagcagaccaccaacttcaagaagcagaagaagaacaacaacaatcctaatcaggatgagaggacttgctttgtgtgtagccaacctagtcatctggctaggaagtgtccacagcgcaaggggatgaaggcacctgcagggcagacttctaagtctgctaatgtgaccattggcaacactggagatggaagcgggtatggtaatttacctacagttttttcagttaatcaatctactaattagtgggttgatactggggctaatgtacatgtttgtgctgacatctcattgttttcttcttatcaggtcgcacggggttccaccgtcctaatggggaatgggtcacatgcttctgttcatggtgttggcacggtagatctgaagtttacttcgggaaagatcgtgcagctgaagaacgtgcagcatgtcccttctatcgataggaatcttgttagtggctcccgtctgactagagacggatttaagttggtttttgagtctaataaagtagtcgtgtctaaacatggatattttattggtaaaggttatgagtgcggaggcttgttccgtttttccctttctgatttctgcaataagtctgtgaatcatatttgtggcagtgtggatgatgaggctaatgtatggcactcacgtttatgtcatattaattttggcttgatgtctcggctttccagcatgtgtttaattcctaagttttccattgtcaaaggttctaagtgccatagttgtgtgcaatcaaagcaacctcgcaagcctcacaaggctgctgaggagagaaacttggcacctctagaactcctacattcagatctttgtgaaatgaatggggtgttgacaaagggtggaaaatgatatttcatgacgttgattgatgatgctactagatttttctatgtgtacttgttgaaaacgaaagacgaggctctagactattttaaaacttataaggcagaagttgaaaatcaacttgacagaaagataaaaagacttaggtctgatcgtggtggagagtttttctcaaacgagtttgacttattctgtgaggaacatggcattatacatgagaggacgcctccctattctcccgagtctaatgggattgccgaaaggaataaccgcacactgactgacttggtgaatgccatgttggacaccgcgggactacctaaggcatggtggggggaggcattgttgacctcgaatcatgtgttaaacagagttcctaacagaaataaggacaaaacaccatatgagatatggattgggagaaaaccatcactttcttacttgcgcacatgggggtgcttggcgaaagtcaatgtactaataacgaagaagcgcaaacttggacctaagactgtggactgtgtctttctgggatatgctcatcacaacattgcctatagatttttaatagttaaatctgaggtaccagacatgcatgttggtacaattatggagtctcgtgatgctaccttctttgagagttttttcccaatgaaggatacacatagtagttctagccaaccctgtgaaataattcccagttcaatcacaccaccagaacaaactgaacatacacatgaacatgtcactgaggaggatgacagtgaagctcctcgaaggagcaaaagacaaaggacggctaagtcttttggtgatgatttcactgtgtacctcgtggatgacactcctaagtcaatttcagaagtatatgcatctcctgatgcagactactggaaggaggctgtccgtagtgaaatggattccattatcgctaatggaacttgggaggtgacagagcgaccctatgggtgtaaacctgtggggtgcaagtgggtgttcaaaaagaagctgaggcctgatggtaccattgaaaagtacaaggctcggcttgttgctaagggctatacttagaaagaaggcgaagatttctttgacacttactcacctgttgtcagattgaccacaattcgtgtgctactttccctagcagcctcacatggtcttctcgttcatcaaatggacgttaagacaacttttcttaatggagagctggatgaggagatctatatggatcaacctgataggtttgtagttgaaggtcaagaagacaaggtgtgcaaattgttgaagtctttgtatggtctgaaacaagctcctaagcaatgccatgagaaatttgatagaacattgacatctgtaggcttcgcagtcaatgaggcagataaatgtgtatactatcgccatggtgggggtgaaggagttattctgtgcttgtatgttgatgacatactgatatttgggacaaactttgaggtgataaatgaggttaaatcattcttgtctcaaaaatttgatatgaaggatttgggagtagctgatgttatcctaaacattaagctaattagaggtgagaatgggattacactcttgcagtcccattatgtggagaagatcttgaatcgttttggctacattgacagtaagccttctccaatatcttatgatcctagcttgttgcttcgcaagaacaagagaattgctaggaatcaattggaatactcccaaatcattggctcgctgatgtacctggctagtgcaactagcctgatatctcctttgctgtgagcaagttgagccggtttacctctaatccaggagatgatcactggcgtgcgcttgagcgagtaatgcgctatctgaaacgtactatggaattggggcttcactattctgggtatcctgcggtactggaaggatatagtgattctaactggatctctgatgtggatgagatcaaagccactagtggatatgtcttcacactaggtggtggtgctgtttcgtggaggtcttgcaagcagaccattttgacgaggtcaaccatggaagcagagctgacgtgtcacaccctgaaaattcaaaatttataaattgttgtttaattggaatttttagaaataattttaaaagcctagaaaagaagatctaattttaattaataaattccaatataaaatggggccagataaaatttcattaaatactttgcttaattctataattcctagatttttctgggatttatttgagctaaggaagtatttttaataaatggaattgcatttaagaaataatttaaattgaaaaaggttttaaaaagtctcttttggctttgggccgaaagtcggcccaaaaccgctctctctctctccctcggcccaagccggcccagtccgtccgcgcgcgcgccctcgctgccgctgacaggtggggcccacctgtcaggcccgtcgtcttcctccggccgaaaccctagcgcgccgccgccgccgccgctttccaatccggccgttcctttccttctccggtcgaattgattgaggggaaacaatctccgggatctcctctaccttttctcctttggaatctttggctaaatcgttttggaaagcgttggattcgagtttgtctcggattcattcttcccgatctttccttcctcgtcgtcggccgccgtgggcctttgccgccgcctccgagcccctttaaaagcctccccggtgtctcctctacccgccgccacccttgccttcgcctctcgtcgtctgaatcgttctagcgccgtgtgccctagctttgccgtcgccgccgccgctccagccgtgcgccgccgttgtttcagccatcgccgtcgctcgggaagaccgccgtcgtggtcgccaagtcgtcgccgtcctcgtccgccccttcgctgtcgccggagatcgccggagcttcatcgccgccgtcgacccgaaggtttcctccgtttcctcctcgtcgccgtcgccgtccgttgatcttccgccgccgttttggtcaccggtgagttcgccgtgtcgtcctctacgtgctggtggcctccgtttgcgtcctagtgccgccgttcgccggcgagcgtgcgccgcccgagctgtccgctccgccgagcccccgccgctgtcggtgacgtcattgccgacgtcatcggggtcgtccgccgtgagccggtcgtggaccgttcgatctcggccgtccgttttggattggatcgatctcggccgtccgtccgcgtgaaccgccgcccgtgcgcccggtccaccgaaaccctagcccgctgacgcaataaaccttcttttccttttcaaaaataattcattattgcgtcataattcaatttaaaccgatataagtgtccttttcaaaaatatccacatgtactgttcatgcttatttatgtgttgttttggtgattttgctcttttctgtttagattccgtcgtttccggagagtccgttttcgccggagaagaatttgaagagttccaaggccagcaaggcaagtcacacatatcccaaacaaccctttgagcatgttgatcctatttaaagctattgtttcttttcaactattgcatttattttcgaatgtcattgggtggaattaacctattgtttgttatagcccttttgttcttgattactttattccttgataccttgggttataataatttgactggttgaactttatttatattggttcaactagatattagaaataattgcttagccctgcttagaaacattagcacactattgggataactcatgattcactattatttcgtgatggcttattgatagttcacgatggtcaatcgtgattagttaattaattaatgtgccaactaaaacctgataatggtgggttgtgagcacatggttttgatggtcgtgctcatgacaattaaggaccggttcacgagtttcggttgtgaaacattaatcgtgccaaccacaagccagcatgggcaacggctttatcttttgtatagcatagttcattgcggggcaccagactgagaagtggcggagataagcccacgggggtcgctggggagtccatgccttgtttataaggggtgattatgatctaggaaggtgcactgcagtggattgtgttgtatgcggggtattgtcacaactcctttccgaggtatcgtggtggtattgaggcacatggtgacatgatgtggggttgtgtcttgtgggtacagtggtacacctctgatcagagtaaaactattcgaatagccgtgcccgcggttatgggcgggtctaacaatgtctttcatgattagtttcacacttctcaccatagtaaatgatgctttaactggtaataatttgattagctcctggtttggaatggtatattcctggtttggagatagaactgtgcagccgggatggttgttcagaatggttgggcctatacaacagggtacgttgtatagcgttggattaatattgttttgttacttaactgttttattaaattctcaaaggtttgctaaatgctgcttttgcaaatgaaaccctactatgccatcctttgttatcctgtgcacttgcatatttgctgcgtggcttgctgagtatgtcatatactcaccttgcaatcattcatcagaggaagagttctacaatgaggctgatggtgtggaggattaggagtagccttggtcaagctgcctgtggagtggagccgtctgcgccgtttatttcattttccgctgcttagatctttattgattgagaggaactatctacctctgtaatgacattttattcgcttattaattagagtaataattgtactctattatcaatttgttattgtgtgcctcggctgattcctggacgagggttcacacacatgtaagcgtttggaattttggatagaaattccgggcgtgacatgacggcactggatactgctactgttgaggcagaatggctgcgtgatcttttaatggatctgcctattgttaaaaaaccggtgccggctatccttatgaactgtgacaatcaaacggtaattgtcaaagtgaatagttctaaggataatatgaaatcgtctagaaccgtgaaaagacgattgaagtctgtcaggaaattgagaaactccggggttataacgttggattacatccaaacagctagaaacctggcagatcccttcacgaagggactatcacgaaatgtggagtccagataagttacgcgcgacttatccggttcggttacgcggagtggagatcgtgcgggcgccctgatcaagcgacctatctctatataaaccgagccgccgccttcacgcaacacacgtgaaatcaatctagggtttgcctcctcctctgtgttgcaccgtcgctcgtagactactccatcccgatcgtcagcgtgcaccggcgatcgggagagcaggtctctggaacctctgccttcgacgtcctgcaccaggagaaggcggcaataaggtttttgggaagcgctccgcgcgactgctctctgtttgttcgcgacggctcgccttcctctccactcgcgtgctgcgcgccttcatcgacgctcgcaacagcgagtagttcctgccgagcaaccggtctttccgccacctcggtacgtgttcgacatgttgcgcatatttgatctgttcatgttttactgcttagtttacatgtgtaaatctaatgatgcgttactgctagtatacatctgcaacgttatgatttatttatggaatatattaaatcattatatgcctatattctcaacagaaaaatactaaaaaagtaagacatcataacaagtacaactcagtattattaatttaaagctttatattatttaaaaacaacattatattcagtaatttcgaagtgtatattaacttaaggaaatactagaaagaaagtaagggattaaaagtattagattttattctgtatacctatgatattgtaattaccaatttcaaaaattcaaaactatcggtttcattcttaagcacttaaaagcaaagtataaacacttatgcagaacatacatataatactgttgcaaatatatgtactaaccagtgggtttagttaaggccttgtttagttcccaatttttttccctatagaatagctaatatggtccctaaaatttcgttcctgggtcattttagtccttaatcttttatattattcaaacaagtcctttaaatttgtcacgtgggctgatatagtcctcggtcccacaaaaaattgccacatggacataccatgttaccctcctatgcaaaatctgtatgatttgtccaatttatccttatatatatcataggagaataaaaaaaggaaaaaaagtttatatatatatatatataccccatatatatatatatatatatggggtatatgtaagagaaaaatatacgtcaaaagggtgaaaaaaatggaaaagtatttttttcctatggttatgtctaattcacccttacatttatttttctatgatatacgtaagggtaaattggacaattcatcatagattttgcatgaatgatgacatggcattccatatgatgattttggtggacccaaggattattctaggccttatgacaaagtttaagggtttctttggaccatttaaaaggttagagattaaactgatcttacagagaaactttagggactatagtagctattctccctttttttttcccaaaacatcacattgaatctttggacacatgtatggagcattaaatatagataaaatgaaaaactaattgcacagtttgcatggaaatcgcgagacgaatcttttgagcctaattagtccatgattagccataagtgctatagtaacccacatgtgctaataacggattaattagtattaataaattcatctcgcggtttccaggcgagttatgaaattaatttttttattcttatccaaaacctcttccaatattcagtcaaactttcgatgtggcatccaaaaattttatctatatataacactaacacccagaaagtaaggcaagtggggtaagcgtaagccaaaacaagtcacgtcaaagaacctaagaagcacggcagtaccttcttctgttcatgcagatgcatttatgcatttccaactcgaatgtgtgccactgccagtgccactagcatatatcaaatcaacatattggctcgttcctcgaattcgagacaatcattgtactccaatcgctagaaaacaactttaaacactatttttattataatatatatatatataaacaataacaagtacattttaagactactctctatatatagtcccatatttttaagataaatattttagaaattattatagttgaagattctaaagtttgatctctttcatgtaaaaaacgacaagtattattaccccggatgagtagtataattacttttagagtttaaatttatcttaaaaattatagttatttcttttttttatcttctcatctcaacgaataataacagtctctcattgaatttgtatacctactttctatttttaacaaatcataaacttccaaaatttgtacacctattttctaatttctaccaataaaaaacttccaataatttatttaaaagtatttaagaatacttatattttactactgagagagtagtctgctacccacactacctgcctgaaaataataataataataataaaactgataccaccaccactaccaacatagcccctggtttttaccctcaaattgaaaaacgtggaataacaaggagaatttggtatcattaaattaaggaacaacgtaatttacttacatctccgaacctggtatcgataaattaaaggtggaacattatttttccatgtatttaacccagtaatccgatctaacacatgatcaattaggattactctccgagttaagatctaacgcgaaataactaaagatcatttcctattttgtgagaaattcccaacacaatctttcttttagaattacacagtacaacgcagacactcacaacgcacacgtactcacccatataaacatacgcacgcaaaccctacccctatgagcatcttcgaagactggccggcaaattctggagagattgacgaagtcaccacaggcgcctcgctgtcgacgggtacgtcgcctaccactgaaagcacaacgccgttaaatcctagaaaattcgctcccacggggagtcgaacccaggacctcaggtgctactgagactcttgtaaccattaggctacatgccctttcgcaatcttatttatactagcaacatatactacttatattgtacctaaaagtccccttttttatacattgtttagctatagtcctcctaggctgttcctttcccaactttctcaacttctactctttcgtttttcatacgcacgcttttctaaactgctaaacggtgtgtgtttttgcaaaagttttctatagaaaagttacattaaaaaattatattaattcatttttcaagtttttaagactaatacttaattaatcacgcgctaatggaatacaaccctattatccgtggaactccacctcccgaacgtagccctagtcaactatgcaaaataccatcaagattttagatcttctgtctatggatatttgatcaagaggagcaggtaaattttatacatttttttataagattaggtgaaaaacgacgaaaaaattgcaatcaatccgcaggcctaggccaatgacgtccaaagcttcacctttttttttatatataaaccagcttgatgtatatataaaaaaaggattttatcattcttgaaaatgtatcagaagaaaaagtgaagataccaacaagaaacggaacttacgcttaacttcgtcatttaaaattattaggaaaatagacaaaatatgatacatttcagcaccttccgaggagccagagctgtcagagtcatggtctcatggagcctagttgatttgccaagcaccaacttgttaaattagcagagggagatctcgactggtctctctgagtggcgactggccacctgctgatttgaatactactagtagttttccgtttttggcattggcagtattgtccggccgctgattctgctcacagaccggccatggccgccggcgtcctcatgacaaaaccgttcatggctgctgcggctgctgctctagtcagcttgctcgtcatgctgcgctgcttgcctagcgtcgtcgctaccactgtatctttcaactactccagcttcagcaacgcgagcaagaacatcaccctccagggcagcgcggcgctcgccggcgccgaatggatcgagctcaccaaaggcaaagggaacaacctgtcgagcggcggcaccatgggccggatggtgtacacgccgccggtgcagctatgggacgccgccaccggcgaggttgccagcttcaccacgcgcttctccttcaacatcaccccgaaaaacaagagcaacaagggcgacgggatgaccttcttcctcgtcagctacccgtcgaggatgccgtacatgggctacggcggcgccctcggcctcaccagccagaccttcgacaacgccaccgccggcgaccggttcgtcgccgtcgagttcgacacctacaacaactccttcctagaccccgacgccacctacgaccacatcggcatcgacgtcaacgccctccggtcagtgaagaccgaatccctgcctagctacatcctcatcggcaacatgaccgccatcgtcgactacaacagcaattcgagcatcatgtcggtgaagctatgggcaaatggctcaacgacgccttacaacctcagctccaaggttgatctcaagagcgccttgccggagaaggtcgccgttggcttctcggcggcgacgggttcatcctttgagcagcatcagctgcgttcttggtacttcaacttgacgttggagcagaagcagccaacaggacaacattcgcgtggcggagttgtagcgggagccaccgtcggtgcaattctgttcatcgtgctcctcttcaccatggtagcaatcctcgtacgacgacgtcagagaaagaagatgagggaggaagaggaggacgactcggaaggcgatcccatcgtggagatcgagatggggacggggccgaggcggttcccgtaccacatacttgtcaacgcgacaaagagctttgcggcggaggagaagcttgggcaaggcggtttcggcgcggtgtaccgtggcaatctgagagagctcggcctagacgttgccataaagaggttcgccaaagactcctccaagcaagggaggaaggagtacaagtcggagatcaaggtgataagtcggctgcgtcaccgtaatctcgtgcagctcatcggctggtgccacggccgtgacgagctcctcctcgtctacgagctcgtccccaaccgcagccttgacgtccatctccacggcaatggcaccttcctcacatggccaatgaggtaattaattaactctcattaatactccctccgtcccaaaatatagcaatttttagctatgaatctggattttgggacggaggtagtatatcagaatctatttttttccaatgtgcaatcaacaaatgtcaattgaaattcaactgatcaactagcttggatattatcataggatcaacattgttcttgggcttgggaatgctctgctctacctccatgaggagtgggagcaatgtgtcgtgcaccgtgacatcaaaccgagcaacatcatgctggatgaatctttcaatgcaaagttaggcgactttggtcttgcaaggcttattgaccataacgttggggtacaaacaatgacccacccctcagggacgccaggctatcttgatcctgaatgtgtgatcacaggtaaagcaagcgctgagtctgatgtctatagttttggcgttgttttgttggaagtggcatgtgggaggagaccaatgagcctactggacaaccagaacaatagcctcttccgactggtggaatgggtctgggacctatatggccagggagtcgttctcaaggcagcagacgagcggctcaacaatgactatgatgcaaccagcatggagtgtgtcatggctgttgggctctggtgtgcgcatccggaccgatacgcacgtccatctatcagagctgccatgacggtcctccaatccaatggaccactaccagtgttaccatctaagatgcccgtgccaatatatgcaccgccgatggcctcgtcagaggggcaactttcatcatcgacaggaatgtcatcctcaagtttgacaataacatcaattacacctcgctagggtggcaagttttctcactcataggatatgtatagcaagacaacttttgtcatatctagatttttatccatacccacaagtcgaactacctgcatccctacacctcagttcctttcgcatactttagccggtttgaagggctcatcttcgttaattgctccgtacagtagtattagccatgtttggttcattttacatgttgtacatttacaaattgccgcttgaataggatgtacagctcgtgaggcaattggtttgctctttagagagctgcctaattggcaatatgagtaatgtgttcagtttacatcatgctttcagttttccaaccatttagttattttgtccagaaaacttttccttcaatttcctctccaacaatccaaccaaaccgtccatatctctgaccgtccatatctcttcattaattttctactgaagcagttcttatgcaatcgtctcaaattgtggatatttatgttcagtacatacaccggtgttgattgaacgctgaatcgagaacatcgaagcaaaattgttaacacacaaaaataacaacagccaattgtcagatttaagacataagagattcatgcagcaagcatatcgtccaagattgacatctctgctacttcacagagtgatcaagccaaaatttgaaagagaagagagttggttctgatagggtcagcagtggctttactgctgcaatttcctcaacaaaatctgataggcttttacggtgtttgcattccaaaaaaaggtatagatccaacgctccataatcataggtatcatgtaaaaggtatttaaccattggtattggtgcttaagtactaagggtaaaaatataattttactagtagagaaaaagggtagaattgtctcccaaattagaatcggtaccgcgtaggtactaccatacgaagttaacatttcccctttaccagctttacaggttattatttgcgtattttctcttttgcatggttttatctagatttacgttgtgtttgagttaagtcatttagccagcactagcattacaggttcttaagttgcatcattttatctagagttactccgttctttgatgttctcatttacgtggttttctctatatttatgttgtgttcttataacctgtacatgtcaatcagatcttgcctcctgttcaaatgctcgaccatgccagatcttcttcctcgaccgtgtctcctcatgggtgcgcccgttcgaacactagaaaaacaccataggaggagatctcgtttactatcccacaaaaattccagtcccttatataaggagtttatgaactacatgaataactaatcaactatgtgaataagcataggataactttcagatgcgctagattgagcctagtcatcgaccgggctatcgcattgtcgacgtttgatgtctcgactacggtgtttgggcaatatggagatcgtcggtgctagggtatacgcaagactgaggtaaaagagatggagacagggatttttatacaggttcgggcccctgagctatcaggtaatagccctacatcctgttggccggagccgatgttgctttttattcatgataatcacaccagtacaatgtttggggtagcctatctaactgttgtcgacatggcggtctgacgatctgactcgtagtcgacaacagggtagccttcctcctcgaatccgtgcccggcgagatcagagatagtgctttcgtctctcctgacagtatccggagacaccgtagggtactagccgtgtttatccctgaagtcgatatccggcggcgtgtcttagcgtatgtaggcttctatgttgtggcttctatgtcgattgtgttaggtgttgatcccttcatggtgggtgtatgttgattgtgttggttctccctggcgggtgtccccctgtcctcctaggggggcttgtatttatacccataggtgtccccttgtccaagtagaactagggaaaccaatatggatacaatccgagtagtccttgtcgtttccatgtagaactctggttatctttccttattcagaactccctcgaggttagtttccatataagacatggtatgtggtggatcctgccgagatttagtcaactactattaggtatgtggtatccataaccctgacacgcatctcctcaaccctcaaccatgcagacgcttttttctctgtctccttctagtgaatgttcaaaccctagaacaagaacgaagcgaaaggagagaagaatggagatgcgatctttctgtttattttggtacagatcgaattgatcgctgctaaatcaacagtgtatctgtgatttactttttttcctcacgacgtatcaatctgcataatgatatactgatcgatggatataggtattcaattcacgtataatgcccatgttttactagttaattacgtcatcatattataataactaggaagaaagcccgcgcagatgcgcgggcagttttatgaagacaattttttaaaaaggttatatctcaccatttataagccgagaaatatattgcatactttaatatatttaagtaataaggttatctcctagattaaataaaatcactttgcctctggttacatataaattttcttgttgtcacttcaacctattatcactgtttaaaagccaagtacctattcatagatgaactacgtaatgtatcaataaaataagcctaatatatcattaatacattgaaatatccactacacgtaagtgtttcgtgcctcaccaattttcaaaactatatataaatattgtaaaaataccacttgtacaaattaatagaataacatcaagttatatataaatgcttctctaatgcgtgaagccgattgcagtggcgagactttctttgtccgttgccttgaaacataggtcccatatcgatgtagttgtgcacctccagactaacctggagcacaattttaatgcctaatttactatcacacccttatcgagttgtgcatcggtaagtagtaagttgagcactattggtgactgtggtctccactgggaccgccttaactcccatatgtacatccctgttatacttatagcaacgtagcaaactatgttattcatgcttatgcccttcatgaaaggaaaaagagaagatggaggtgatcaaaagaatgttttttttatgttttgagagtagattcatggtatagagtaggcaccacgtgtttatggtgttaaacattatgcaatttgaaaatgagcgaagttgtaatttgacggtactaaaagagaagatggaggtgatcaaaagaattttttttttaagttttgagtagattcctggtatagagtagacaccatgtgtgtttatggtgttaaatatttatattttgacaaacatctatagtttagcgcttggtttattttcaatacttattgttgataatgacatgagacacctttactaattcgaagaatatatttattttttttaaatttattaataataactaatgcgtgggagtatatgggagttttttattttttttgtatgatactatatacgtatattttttttggttctatctttttttgacacgatggctttattcttttaccgtacgtatgtaggttttattgttccttttcaatcttacgtacttactttttttttggcgaacctattctctctcgtatgtataggtggaaagtattagtattagagatatatatctaatctaatgatctaaataacggatccatcaatttaagtgaaaatcaacggtatagatatagatataatctaatggtctaaaataacgggtccaccaatttaaatgaaaatcgacggtgagattaaacagtgccacgtggcggtttaggagcgtttataagaatgccacgtgtcgtcttgagagtgtttgtaggacgtttaatggacttttagtatataatagatagatagatatattttgttccctaccttgcccctctcttgattaacggtacacattattccatctccaggtacctctaagtacctcgcaaacggtgtaaaaagtctcgaaaagtaattgaaagctcatactgtcagtagagagttcactgtctttttcaacacggtgacggtcgtgcgtgtatgctgcaggctggaactcaggacttaattcggtcttcgatcggttgtactagatgacatcaaagctcaaatttgcggagactctttactccacggccaaaggggagtctttaaagtctttctgcgatccggatcgaattcggatcctctgcggtggaggagaaaattcagaggttgctacagtacccagcattaggagtactgtgggccgtccgatcaagaacggacggatcagaccgttcgctacagtaaaacagtgcattgatgcacagtactttcatccctgtagatacagtaaatcatcactgtagcggtactgttctgtgcattgaaacactgtccccctcacatatcactgtggccacagtgcctctctgcggtaatgcagaggatccgaatccatccggatcactctccatcgatcgatcagtggagttggcacaatatagtttcagataagctgggccattgactgacctctgggctcttgttctgcgtcaaacgactgcatgaggcaaccctgaatatctctcaagtctgaacattacgatttacttacaattatgcatgtttctccgtctctccgatggatcatggagattgtagcagcatcgttaattttggggtattgttcttttcagctcggcatggacaattattgtagtccagctaggaaccgacgctgataaaccgacaattattagttaagtcatcgcaatgatcatttccggtgcgcaatccttttccgtattaaaaaaaaaaatccttccaagttccgacccctgcgaaccaacaagtacagaacaagcaattcaataccaatttggcacagttaaaccatacggaagaactaatagcatttatatgccgtgttaacaccagctgtgttacaatgccttgttagaccaaactgtgttgagtctctctgtgctgctcattgtacttgaggaaaaggtctttattttcttacgtcccttgagttaatccctctcattagagaaatgaaaacgaattatgaaacattaatttcacacctgtcaatccccatctcatgtggattaatcgagcaatgtctttaatgagatgacactcgttttcttacatgccatcaaatagttgtaaaattgtttttataaaaaaatatcataatgcgatatatttgttggattctaccttttcagattgaaaaacaacaaattttgtttcatcttgcatatttgtaaaatgatatcacacatttatctatgttgttgaatcttttaaagatttttctatgaatattgagacaacatatataaaagagtaaaatacacggccggtccttaaagttgagcgcgggtgtcacttaggtccataatcttgtaaattgcacatctaggtccaccatcttgtttaagtgactcattgaggtctaaaagacctctgaccaggttgactggcttacgtggcggtgcagcgtggcaacatatttgcattttgccccctttttgattccccgtgtccgatccaatcccttctttgcgtggcgcacgcaggaacgcgccgacggcaacgtgcgccagcacgcacacctgtggcacccacctgtctcaaccacgctgcgcccgctgacgtgcctcgtacccctctggcagccgctcgccggtgttgcgcagcgcccagagaaaccgcacaccgtcgtcgacgggaaggagaaggagcaggggaaggggaaggcccccgctctagccagccgtgggtgcacgcgacaagtggctgcggcagctgctcaagtcaagcttgccctgccgccatggagctcgcacccgcccagctcgcgccgaactcgccgacgcctcacccacacacgcggccgcggtaggcgacccctcctcccaggcgtggccggcgacacctcccccgcgcgcgccaagctcaccgacgcctctagcaccaacgaccagcgggaagggagaccgatggatctggctgtcagtgaggcgtgagcgccaccggcacgctagctacgaagactgtcacaccctgaaaattcaaaatatataaattgttgtttaattggaatttttagaaataattttaaaaagtcttgaaaagaagatctaatttttaattaataaatttcaatataaaatgggcccagataaaatttccttaaatactttgcttaattctataattcctagatttttctgggatttatttgagctaagaaagtatttttaataaatggaattgcatttaagaaataatttaaattgaaaaaaggttttaaaaagtcttcttttggctttgggccgaaagtcggcccaaaacctctcttctctctcctcggcccagccggcccagtccgccgcagccgcgcgcgccctcgctgtcgctgacaggtggggcccacctgtcagtcgtcgtctacctttggccgccgccgccgaaaccctagtttcgcgccgccgccgtttccttccaaatccggccgcccctttccttctccggccgaatcaatagaggggaaacaatctccgggatctcctctaccttttctcctttggaatcttcggctaaatcggtttggaatgagttggattcgagttcgtctcggattcgttcttcccgatctttccttcctcgtcgccggtcgccgtgggccttcgccgccgcctccgagcccctttaaaaggacccccggtgtttcctctacccgtcgccaccttcgccttcgcctctcgtcgtcggaatcactctagcgccgtgtgccctagcttcgccgtctccgccgccgctccagccgtgctccgccgccgttccagacgtcgccgtcgctcgggaagaccgttgtcgtggtcgccaagtcgtcgccgtcctcgtccgccccttcgccgtcgctggagatcgtcggagcttcgtcgcggtcgacaacccgaaggtttccgccgtttcctcctcgtcgccgtcgtcgttcgttgtttttccgccgccgttttggtcaccggtgtgttcgccgcgtcgtcctctacgtgctggtgccctccgtttgcgtcctcgcgccgccgttcgccggcgagcgtgcgccgcccgagccgtccgctccgccgagccgccgccgctgtcggtgacgtcattgctgacgtcatcggggtcgtccgccgtgagccggtcgtggaccgttcgatctcggccgtccgttttggattggatcaatctcggccgtccgttcgcgtgaaccgccacccgtgcgcccggtccaccgaaaccctagccgctgacgcaataatccctcttttccttttcaaaaataattcattattgcgtcataattcaattttaaccgatttaagtgttttaatccgatttaatcttcaaaaattcataactaattcatcttagctccgatttagttggttcaagtctctaaatttttctaaaattgagatctacacattaaaaatatccacatgtactgttcatgcttgtttatgtgctgttttggtgattttgctcttttctgcttagattccgtcgtttccgaagagtccgttttcgccggagaagagtttgaagagttccaaggccagcaaggcaagtcacacagatcccaaacaaccctttgagcatgttgatcctatttaaagctgttgtttcttttcaactattgcatttattttcgaatgtcattgggtggaattaacctattgtttgttatagcccttttgttcttgattactttattccttgataccttgggatataatttgactagttgagctttatttatattggttcaactaaatattagatataattgcttagccctgcttagaaaccttagcacatttatgggataacttatgattcactattatttcatgatggcttattgatagttcacgatggtcaatcgtgattagttaattaattaatgtgccaactaaaacctgataatagtgggttgtgagcacatggttttgatggtcgtgctcatgacaattaaggaccggttcacgagtttcggttgtgaaacattaatcgtgccaaccacaagccagcatgggcaacggctttatcttttgtatagcatggttcgttgcggggcaccagactgagaagtggcggagataagcccacgggggtcgctggggagtccatgccttgtttataagggggtgattatgatccaggaaggtgcgctgcagtggattgtgttatgcgaggggtattgtcacaactcctttccgaggtaccgtggtggtattgaggcacatggtgacatgatgtggggttgtgtcttgtgggtacagtggtacacctctgatcagagtaaaactattcgaatagccgtgcccgcggttatgggcgggtctaacaatgtctttcgtgattagtctcacccttctcaccatagtaaatgatgctataattggtaataatttgattagctcctggtttggaatggtacattcctggtttggagatagaactgtgcagccgggatggttgttcagaatggttgggcctatacaacagggtatgttgtatagcgttggattaatattgtttaattacttaactgttttattaaattctcaaatgtttgctaaatgctgcttttgcaaatgaaaccctattatgccatcctttgttatcctgtgcacttgcatatttgctgcgtggcttgctgagtatgtcatatactcaccttgcaatcattcatcagaggaagagttctacaatgaggctgatggtgtggaggattaggtgtagccttggtcaagctgcctgtggagtggagccgtctgcgccgtttattttattttccgctgcttagatctctattgattgagaggaactatctacctctgtaatgacattttattcgcttattaattagagtaataattgtactctattatcaatttgttattgtgtgcctcggctgattcctggacgagggttcacacacatgtaagcgtttggaattttggatagaaattccgggcgtgacaagttggtatcagagccccttgaccctaggttatgccaaatggttacccatagaagccctctaaaaatattggaaaaagtagaactgttctcctccctttctcttttaattaaaccaaaataatggcacatgcatttcagcaaaatttcataatctcttttaatggttctcattcaaaatttattccagtgttattattactgtacatctattactgtactaatggctcatttaccagcaaaagttttacaatgttgttttatttaatcttgctgcaataaaataaatttagcatgttgattttataactttccttttatttcttttgaaacctgttattcaaaagcacaaaatttgtaaccttgttttcaactatttcaaattatcttgcaagtttggtttaccttatttacttaccttttactttgattttcaaattttattcaagttaatccaaaaacttgtgctgttaattggatagatgtcttaactctctcctttcacttgtctttagatgccgcgctacaagcctgagtacctgtttggtgttgagggttttgtccaggagttgcgtacgatgtcctttgccattggatttgggactgcccctttttatgcccagattcctcatgatcgtcatgaagagaagtgccgagtcaaagtcaccttaaacagcaatagtgaagatgtcccctcagtgatgttcgaagctggaggaagaaactacatccatgcatgtcaggaagtggcaaggatcgccataggagagctccgtgatcgctacagtgatcagttggccgatactgagtatcgctaccatcctcgtcaaccccagggaagtgaccgtggcagttaccttgagactgaaggaattgagaatgatgctaccacaaggcatttggttgagatgttgtgggctatggatgaaagtcgtgcggagactgtgttagcggctcaagatcgtgaagaccggaatcgtggtaagatttgcaagttagaggacaaggtggatcgtttggagaaggaactcgccgcattgaagggagaagcaccgccgcagaaggccaggattcgtctcaccgcaaggaagagagctctatttgtccctcgctatcaattggcgccaaaggttcgtgtggtggagaaagaagttgccccagctcaagcggatcctccggtcatcatcataagtgatgaagaagaagaatccaagcgcacccgttccaagattgagtgggtagcaactcaagatgatgaagacgagccgaacgagcctacaatcgacctccgatgcttggaagaactagagtgacttgttaagtcgttgtcttagatcgttgtgttagtttgcttgctttaagtttgcttgtgtgtgtctcgcatgtgatttacatcagtggtgggatgtaagtgcatgcgtttgtttgcttttgagtgttaggaagttggtgagtttagtggtgtgagagtcttcagtttgtaataatgaaactcagttaagatcaataaaagttaaagtaattctctatcctaagtagttccccggtttctcttcttgtgccctgttcctgccagatggtgaatactcgcagcaacgggaatggtcccaacaaccccaataacaataacaatggagagaacccaactctggcccaagttcttcctcaacagacacagcttatgaacatgatgatgcagcaattccagaatcagcagaaccaaggaaataaccatgtacctccccagaataagttagcagaatttcttcgtgtgaggccacctgttttctttagtaccactaatcctattgaagctggtgattggctgcatgccatagagaagaagttggatttacttcagtgcactgatccggagaaggtatcttttgcatcacatcagttgcatggctctgcctctgaatggtgggatcacttccgcctgaataggactactgctgaacctatcacttggcttgaattcaccgctgctttccggaagacgcatataccatcaggagtagtgtctctcaagaagaaggagttcaggtcgcttactcagggatctcgctctgttacggagtatctgcacgagttcaatcgtcttgctcgttatgctccggaagatgtgcgcaatgatgaagagcgccaggagaagtttttgggaggacttaatgatgagctttcttacccactcatggttggagattattctgatttccagaaattagtggataaggctatacgtcaggaggacaagtacaattgcatggaacagaggaaacgtcggattgctcacttcaaggcacaacaggggagtaatcagaagccgcgtcttactttaggaccccagtctatgccacagggaggttcttcgtctgttgttcgtccgccgcgtcagttcttcaacaacaatgctggcaataacatccgcaatcaaactccacgtcctgttgcagctccaacacagcaacagcctgccaagagggagcaaggcagcaagcccgtggtgtgtttcaactgtggagacccaggacattatgctgacaagtgtccgaagccccgtcgcgtgtaggttgtccctgcccagagtaactctgctgtaccagcatcaaaggcccgtgtcaatcatgttgctgctgcagaagctcaagattctccagatgtgattttgggtacgttccctgttaactcagttcctgcaacagtacttttcgattcaggtgctacacattcattcttatctatgagttttgcgggaaatcatgggatggaagtagaagatcttagacatcctttgatggttagtaccccaagtaatcaagcactctctttgcaacgtagcccctcggtcagaatagaaattaaaggagtaccatttctggccaatcttatcttgttagaatccaaagaccttgatgtcatcctagggatggactggttagccagacatagaggtgtgatagactgtgccaacagaaaagtaactctcaccagcaatgatggtcgagttgtgactgttcatgcattgtcttctgagtctttaaggtcaagactgaaccagataactttggaagagattcctatagtccgggagtatcccgatgtgttcccagatgatttacctggtatgccgcccaaaagggatatagagttcagaatagatctggtaccaggaacaactccaatccataagagaccttatcgaatggcagccaatgagttggcagaagtcaagaggcaagtggacgatttgcttcagaaaggatacatcagaccgagttcatcaccatggggagctccggttatttttgtggaaaagaaagaccatacccagagaatgtgtgtggactatcgtgcgttaaacgatgtgactatcaagaataagtatccgctgcccagaattgatgatttgtttgatcagcttaaaggtgctaccgttttctccaagatagatcttcgatcagggtatcaccagttgagaatcaaagaggaagatatacctaagacagcttttaccactaggtatggattgttcgaatgtacggttatgtcttttggacttaccaatgcccctgctttcttcatgaacttgatgaataaggtgtttatggaatacctagacaagttcgtagtggtctttatagatgacattcttatctactctcgaaccaaagaagagcatgaagaacatcttcgccttgcattggagaagctacgagagcatcaactgtatgctaagtttagcaagtgtgaattttggttgtctgaagtgaagttccttggtcacgtcatctcagcaggaggagttgccgttgatcctagtaatgtggaacccgtaaccaactggaaacaaccgaagacagtttcagagattcgcagttttctaggcctcgcaggatattaccagaggtttatagagaatttttccaagattgctaagcccatgacacgattgcttcagaaagatgtgaagtacaagtggtcggaagaatgtgagcagagttttcaagagttgaaaaatcgcttaatatcagctcctattttgattttacctgatccaaagaaaggtttccaagtgtattgcgatgcatccaaacttgggttaggttgtgttttgatgcaagatgggaaggtggttgcctatgcatctcgtcagttacgtccgcatgagaagaactaccctactcatgatcttgagttagctgcagtagttcatgcgttgaagatttggcgtcattatcttttcggtactcgtacggagatgtacaccgatcacaagagtttaaagtatatttttactcagccggatctgaacatgagacaacggagatggttggaattaattaaggattatgacatgggaattcattatcacccgggaaaggctaatgttgtagcagacgctcttagcaggaaaggctattgcaatgctaccgaaggacgacagttgccattggaattatgcaaggaatttgaaagattaaatttgggaattgtcagtagaggtttcgttgcagctttagaagcgaagcccactctaattgatcaagtcagagaagcccaaattaatgatccggatattcaagaaatcaagaagaatatgagaagaggaaaagctatcggtttcttggaggatgagcaaggaactgtatggttgggtgaaagaatttgtgttcccgacaacaaagacttaaaagatgcaattctgaaagaagctcatgatactttatactccattcaccctggtagtactaaaatgtaccaggatctcaaggaaagattttggtgggcaagtatgaagcgtgaaatcgcagaatatgtagcagtatgtgatgtttgtcagcgagtcaaggcagaacatcagaaacctgccggtttgctacagcctttgaagattcctgaatggaagtgggaagaaatcggtatggattttatcactggtttacccagaacgtcatcaggccattactctatttgggtaatagtcgacagacttaccaaagtggctcatttcattccggtaaagacaacttattctggaagtcgattggcggaattgtatatggcaaggattgtgtgtttgcatggcgtccctaagaagatagtgtctgatcgaggcagtcagtttacttcaaatttttggaagaaacttcaggaagagatgggttctaagctgaattttagtactgcttatcatccgcagacagacggacaaaccgaaagggtgaatcagattttggaagacatgttgagagcttgtgctttagacttcggtggaagttgggataagaatctaccctatgtagaattttcgtacaacaacagttatcaagctagtcttcagatggctccttacgaagcactgtatggtcggaagtgtcgcactccgcttctgtgggagcaaacgggagaacgtcaggttttcgagacggatatcctaagggaagcagaagaaaaggtgaaaatcattcaggaaagattgcgagtggctcagtctcgtcataagagttatgccgacaatcgccgtagagatttgagttttgaagaaggagattatgtgtatcttcgtgtcacgccttttcgaggagttcatcgttttcacaccaaaggaaaattggcaccgcgttttgtgggaccctataagattgtcagtagaagaggagaggttgcttatcagttggagttacctcaatctttggcaggagtccataatgtgttccatgtttcgcaattgaaaaagtgtttaagggtacctaccgaagaagctaatcttgaacagatagaagtccaagaggatctgacctatgttgagaaaccaatccgtatcttggaaataaatgagagaagaaccagaaatcgagttatccgtttttgcaaagtccaatggagtaatcactcggaagaagaatcaacttgggaacgagaagatgaattgaagtcagctcatccacatctgttcgccagttcttccgaatctcgaggacgagattctgtttaaggggggtaggtttgtcacaccctgaaaattcaaaatatataaattgttgtttaattggaatttttagaaataattttaaaaagtcttgaaaagaagatctaatttttaattaataaatttcaacataaaatgggcccagataaaatttccttaaatactttgcttaattctataattcctagatttttctgggatttatttgagctaagaaagtatttttaataaatggaattgcatttaagaaataatttaaattgaaaaaaggttttaaaaagtcttcttttggctttgggccgaaagtcggcccaaaacctctcttctctctcctcggcccagccggcccagtccgccgcagccgcgcgcgccctcgctgtcgctgacaggtggggcccacctgtcagtcgtcgtctacctttggccgccgccgccgaaaccctagtttcgcgccgccgccgtttccttccaaatccggccgcccctttccttctccggccgaatcaatagaggggaaacaatctccgggatctcctctaccttttctcctttggaatcttcggctaaatcggtttggaatgagttggattcgagttcgtctcggattcgttcttcccgatctttccttcctcgtcgccggtcgccgtgggccttcgccgccgcctccgagcccctttaaaaggacccccggtgtttcctctacccgtcgccaccttcgccttcgcctctcgtcgtcggaatcgctctagcgccgtgtgccctagcttcgccgtcgccgccgccgctccagccgtgctccgccgccgttccagacgtcgccgtcgctcgggaagaccgttgtcgtggtcgccaagtcgtcgccgtcctcgtccgccccttcgccgtcgccggagatcgtcggagcttcgtcgccgtcgacaacccgaaggtttccgccgtttcctcctcgtcgccgtcgtcgttcgttgtttttccgccgccgttttggtcaccggtgtgttcgccgcgtcgtcctctacgtgctggtgccctccgtttgcgtcctcgcgccgccgttcgccggcgagcgtgcgccgcccgagccgtccgctccgccgagccgccgccgctgtcggtgacgtcattgccgacgtcatcggggtcgtccgccgtgagccggtcgtggaccgttcgatctcggccgtccgttttggattggatcgatctcggccgtccgttcgcgtgaaccgccgcccatgcgcccggtccaccgaaaccctagccgctgacgcaataatccctcttttccttttcaaaaataattcattattgcgtcataattcaattttaaccgatttaagtgttttaatccgatttaatcttcaaaaattcataactaattcatcttagctccgatttagttggttcaagtctctaaatttttctaaaattgagatctacacattaaaaatatccacatgtactgttcatgcttgtttatgtgctgttttggtgattttgctcttttctgcttagattccgtcgtttccgaagagtccgttttcgccggagaagagtttgaagagttccaaggccagcaaggcaagtcacacagatcccaaacaaccctttgagcatgttgatcctatttaaagctgttgtttcttttcaactattgcatttattttcgaatgtcattgggtggaattaacctattgtttgttatagcccttttgttcttgattactttattccttgataccttgggatataatttgactagttgagctttatttatattggttcaactaaatattagatataattgcttagccctgcttagaaaccttagcacatttatgggataacttatgattcactattatttcatgatggtttattgatagttcacgatggtcaatcgtgattagttaattaattaatgtgccaactaaaacctgataatggtgggttgtgagcacatggttttgatggtcgtgctcatgacaattaaggaccggttcacgagtttcggttgtgaaacattaatcgtgccaaccacaagccagcatgggcaacggctttatcttttgtatagcatggttcgttgcggggcaccagactgagaagtggcggagataagcccacgggggtcgctggggagtccatgccttgtttataagggggtgattatgatccaggaaggtgcactgcagtggattgtgttatgcgaggggtattgtcacaactcctttccgaggtatcgtggtggtattgaggcacatggtgacatgatgtggggttgtgtcttgtgggtacagtggtacacctctgatcagagtaaaactattcgaatagccgtgcccgcggttatgggcgggtctaacaatgtctttcatgattagtctcacacttctcaccatagtaaatgatgctataattggtaataatttgattagctcctggtttggaatggtacattcctggtttggagatagaactgtgcagccgggatggttgttcagaatggttgggcctatacaacagggtatgttgtatagcgttggattaatattgtttaattacttaactgttttattaaattctcaaatgtttgctaaatgctgcttttgcaaatgaaaccctattatgccatcctttgttatcctgtgcacttgcatatttgctgcgtggcttgctgagtatgtcatatactcaccttgcaatcattcatcagaggaagagttctacaatgaggctgatggtgtggaggattaggtgtagccttggtcaagctgcctgtggagtggagccgtctgcgccgtttattttattttccgctgcttagatctctattgattgagaggaactatctacctctgtaatgacattttattcgcttattaattagagtaataattgtactctattatcaatttgttattgtgtgcctcggctgattcctggacgagggttcacacacatgtaagcgtttggaattttggatagaaattccgggcgtgacaaagacagtgacggcgctccgcaagctctcctctagttccctccgtgtcacgcccagaaattcacgaaccagaatttctaagctgaatgtgtattaaacccctgtccaggaccagccagggtacacaaatgacaattgttgacatacatatccacgttttacaaaaatataagagattacaaatgcagcggaaaagataaaagcgagctaagcctgaagacttgactcctgcagcggacgactccattccacaggcatccttgacggcagcgacgaaaccaacctcttcgagacatcttcaactgagaaggacttcaactctggtgtgggggaaaagagagcaagactgagtattacccactgtactcagcaagtcataccggaagaggaggtatgatgcagggtatatccaagggaggctaaaggttcttttgcatgaagctagcatttaaaagcagttgttgaaagcagtaaaacaattgcgttaattaatcaatattaaccaatcactgctcaacgctacaccacgttgagacaggcccaaaccaccacctgaactaaccagttccaaaagataactaggggtgagactaatcacggtgaatctggtcgaccgcccataaccgcgggcacggctattcgaatagttttactctgatcagaggtgtacaactgtacccacaagacacagccccacgacacgttcctgtgcgccgacatgccaccacaacataccggaaagaggccgtgacaggacccttcgcataaccccctctaaccgatcgcaccacaccttagggttcgcccccgtccccagcaggcaacgggcagcccccctttcgtgcctcggtgaatccggaagccgatcaaccggacaccccggccgacccaactccatcacatccaccctcgcctgggtacgtcggctagagaaaagctacactacaagcccagccgttgcccacgctggcttgtggtaagtacgataagttcttccagggcatcccgtgaaccggtccttaattgccatgggcacgactagcaaaaccatgcacccacagcccaccatgacgtgtattttaattaaccaataccattacggtggcaccaaaccaaagctatgccgataatcaaagtctatgctttaatgtgattccctttttgtgtactagtagaactaagcatggctaagcatttcctaaaccaacatctagtcattttaatacccaagttatcaatggcgtaagggaaacaacataaagctgagtaataggacccatcccacatgatattgtaaaacgatgcaatatttaatagaaatacaggacatttgtaaattgggtacaatatgctcaattgtaatgtatgacttgccttgctctcgcactgatgagaccacagcaacgtcttcgagaaaccgcgaatcgacgaaacggccgaaatctacgcgacaaacaaagcacaccagcaaaacatgctataagactactgaaacaggaaacaaaaccatttttaatggattctacacatttttatgaatttactgagacttgaatggacttaatcggagctcggatgaattagttatgatttttagaagattatctgtgtttttactataaaagaaaaacccttaatcaatttattgcgcaataattcctcccagggctgacgtcagcaaggggtggggcggcgccgacatgcgggccccactggacagaggcacaagagagagggagagggggcggctggcaggcgggacccaccgggcggcggctcagggggggagacgcccggtcggctcggctcggcctcaaaccggccgaccggttatggcgagggcggcggcgcgcgagcacggtcgccggcgacggcaaccggcggcgggaggcggcggcggacggcgcaaaggcggcggcggcggcgcgcgcacggaggcagcggcgatagggagctcgggagcggacggcgaaagagggaaaaaggtggagagaggcgcggtggtcggttatatagaggtggggaggctggacgtggccgggagcggcggttccgcggcgacgacgtggagaggtggaggaggagagagagggggagaggattcaaatcgaatcccgtccgtgcgggcgcgcgcatggacgggagagggcagggcgtggggcggcgacgtggggacgtgtgggcgcggagtggggcgcggatgcggaggaagcggcggcgtgggcggcggtttcagcagcggatggtggcggctgccggaggttagggacgaccgacaggtgggccccacctgtcggcgcccgggaggagaggggaggtgggctggacttcggggaggggaggtgaagcgggccggcgcgggagggaatgggccgggctcaagaaaaaggaaaaaggagggaaaagaaaagataaaaaggaaaaaggattttcccagggatttatatattgcacatgctcatttttaattggttaaaattatttccaatgctctgaaaattccgctaaaaatcctgttagcgtattttgacatgtagaatccaagaaaaattccacatgccgaatccgattattatttgcatttattaatttagggtttctctcttgcctttaaacaaataatttcttccaaccatttattaattgaatttttgctagggaaataacttctgggcgcccgtcgccgctccgctcgcaccccgccgccgcgcttgccctccaccgttccgcccgccgcccattcgtcaagaaggatttgaggtccacgacggcgcgacgtcctgatcttcgagctcgtccgccgctcgcttcatcccctctaatactgcgtcgttggcaatcatgcgtcgcttcgtcgaggtccacgatagcggcggcggaggacactgatgttggcgaggcgaggccggagaacgtgacaagcgaggcggtgcagccgtggtgtgcgactaggcgctgcaacagctcagccatcggtatgacatggccggcgaaggggctgacgatgaggatgacgtgcggcggcggtgggcgatgtgacgacggaggcagctgagggatttgggggttctttttggtgcccagggctctactgaatgcaatgtagatggttagcttcggtcaaaccgggtatggaccttaatgagtcacttaaacaagatggtggacctagatgtgcaatttacaagattatggacctaagtgacacccgcgcacaactttaaggaatggtagtgtattttactctatataaaaaaagaggggcgatcctaaacgtagaaaaaaccacctcctcctattatgctatgaattatcttaagaaagataattcatagaaaaaaagctgctcatgagaatatagaaaaacatgctttttctatcttgtggcttctaacacattattttaatttcatagttatattgatgggaatttaggtgaaaaatttctaccgtctagagagccataaattatggaaaatgttgtattactataaactctcccgaacaaggacgaaggagtgcaagcagcttaaaatccacataacttccttaacgcctcgttattttctgattaagttacagatcttacccactactacaaaacattaaataggtgttgccactatagatactgaaagtactaaaaccagcacctataggccttttccaatttccgcgggttgaaattgcaaaaaccggcacctttaagcaattataagtgccggttctaaataagaaccgacacctattctataggtgtcggaccgacacctataatatattataggtgccggttttttaaaaaacgacacccacagaaatctagccgaggcggcatcggatgagccaaccagcgggccccaccacaacgaggcgaggaggagataaggttcgctctcgcgtcatctcgctctcttctctctctccctcccttctctctcatctctatcttctctctctccctcccttctctcccgctaccggcggaggcggcagcggcgaccgcgcccttccctcgctagatctagcgggaggggaggtggcggtggcaggaagggaggcggtagcagggatcttgaggggagcccgtggtggcccgacggccaggggggaggcggcggcaacgccttcccctccgctagatccggctggaggggaggcagcggcgcctccgctccaccagatctggccgggaggggagtcagcaacggctcggcggcggcgggaggggcggcagcagcaagtggcgtggctcacaggcatcggcggcggcgacctcccatctgccaaatccggcgggagggaaggcagcagcggcggcggagccccccctccgccagatccggcggggtaggcagcggcaacgacagtggcgggctcccttgtctcttctaccactggtgagcacccccaaccatctcctttgcttgccggctgtgtcattgttgatgtttgattcgatgattcaataatgtttgatgtttgattcagtgatttaaacttgttgatgaatatttgattgtgtgatgtgtacttgtctttttttttttgatttttgatttttttttttggctttaaagaattggctcgactcaaatcgagccgatcgggcttttttttttttttttgcaaatcgtatacctcaaaggtgtcggttcctaaaccggcacctttgagtcatctcatcagtgccgccttggtggtgctggttgggaaaattggcacctaaggggatttcccaaccggcaccgaaggctctttctgtggtagtgaccctggttttgttagcacgtttttcaatctgctaggtgtatttcgtgcgaaaactttttatacataatttaagttgctttaaaatatcagataaatctattttttaagtgtataataattaaaagccaattaatcatatactaattaatggatttcttgttttcgtgtcctagctacttcatctttagtaaaaacgagcatcaccaaactatgttccccggactggttggagagtggatatattttaaactttcgagaagacgttcccttgttgtttacatatcactcaaaatagttattaaaaaatttaaaagatatattaatatataatatatcagtatttaaaattcaacttttacaagttgtaaaaaaaaagtacagctagttaatgtatattgatagtcattttttttttgcaacatgtagaagttaaatttaaccttgcatgtttgtttggtgatctatcatatattaatatatcttagtgactttttttaaaaaaaaaattaactatctttatataataaaagtccattaaacttcctacaatcactctcaagccgccacgtggcatcctaaaaatactcccgagtcgccacgtggcattctaataaaatagagaaatctgaccatcgattttcacttaaataggtgggcccattattttagatcgttagattatctttaaagaaaaaaaaccccctgccgtccctacctccgtgcaggatgcgtattgtacgctccctatcaccccttctttttttttctctttgtttctttcttctttttttatctttatgaaaaaaaatccctacaaatagacatcgtacgagtaagtccattaaacttcttagaaacgcttttaagccaccatatggctcctacaaacgctcttgagtcgccacgtggcgctctgataaattagagaaatctaagaaattccaataaaaaaaagaaaaacatcgtaccatttattttctctttacacaccattagatctatatatgtaaaaaacaaatgtcacgtacgaccacacctctccctaggtccctcatctcctaacatgtacgtgcatccaaagtacgtatgtctccccacccctctcttcttccttccatttatggtagcaaaattttgtatataaaaaacacaacaactaaataattagaatatcttataatatattcgattttaatttgaactatgtttaccatattttggtatgtacatatataagaaacatatcatttgacataaacccctttatcgcaactaaatagtaataaaatattacaaaaagtaacatatatcatgccattgtaaatgatctcctattatctctcgtgctcactttcttatccatattttctagcgagcagttcagtacataaagaaccaacaaatgctatattaactatctattatatacttaaaaattcattaaactccctacagatcctcttaaactgtcacatggttttctacaaacactcatgagatgccatgtagtgctcaaataaattaaaagttcctagaaattatgataaaaaaatcaaaccattgattttcctttaaataggtagatccaataattataactgctacatctcacaaaaataaatccggtacccccacctccacccctaccgtatgtgagcatgcatgtacgtacgtacctccaccgtcctactcatctctgggatccaattctcatatcctatttttaagataacttttcctattttctacctagcacataatatatagaaaaataataatagctaaatgatcatgactctcaagttacatgtacttttctcagtttatttgactttttgtgttatttataattaaattcaagacccatattgcacatatttactatatataagttagataatactgctatctaactacaaatatttgagcaaaatagcacttcgaaaatgatgaatgaattcaaatgtgtgggtctaaagtccaagttcaatcatcaccaaagaagcttggaaccagaatgcacactctgggcctgaacccgatgaaggcggagctataagacattattagcaaggtggacactgacggcagcggcatcatcgacttctacaagttcctggacctaatagcgcactaaatgattagatgaaggacaaggactaagaggaggggaccagagggagacgttccatgtcttcgacaaggactagaaaacagcttcatctttgccaccgagccccaccacgtcatgtctaatgtatcaagagaggctcactgatgaggaggtcaacaatgatccgcaaggctaatggtgacaggtggatcaccacaaggagtttgtaattaaattcagaacaaaaatataaaacaagcaatttgattaaaatacacaaacaaaaaataaaaaacactaaaactataaaaaaaaaataacaagattccatgtagaatataaaatatcaagagtccctataaaagtataagttataaatatctaaaatttggaataataaaataagtattaaaaaaagagatcaaatacagcacgatatgagattaagcgcaatttaaaatccctaaaaagacaatttagaataaagtaatttgatttgaatacaaagtcgaattaagaatcactcaatcactaaattcagaatacaataaatattttttaaagaatttttctatctttattgattcacatgcataacaaattgcatatatatgaagcaattaaagagagggctagcagaatggtaaaaatatatatttattaccaatgaaagtttatcgagatttcttcacgaaaaagagatataataaatactcaattaacagtagagaatacattactttaattttggatagactagttcttccatgctttgcttgctctcccttgtgaacacagagtacactcctctaaactaccaagtctcacttaagtcgacggcctccacacttcagtgaatccactccccaattaggaagactctacgcactgactcgttgctccaagtcaagctggtatcaccgtgcgcaccgacgccggccggccgcggcggcgatggctggctttccgctgatcacatcagcgatcacttgcgcagtgggcatcatcttcttctccgtttgctacctgcatccggcaccggtcgccgccttgtacttcaactactccaccttcagccaggacgacgggaacaccatcagactcgaaggcgacgcctccttcggcgacgggtggatcgacatcagcgccaacaggtacggccacaggggacacagcaaaggccgggcatcgtacagcgcccggccgatgctcctctggagcagggacaccggcgaggttgccagcttcaccacgcgcttctccttcaacatcaccccgcccaaagaggacggcggcatcgacaacaagggcaccggcatggccttcttcctcgccgcctacccgtccatgctcccgagcggggtcgatgagctcggctacaacatcggtctcaccgaccaaggcccggacgccgtggcgactggcgacagccggttcgtcgcggtggagttcgacaccttcaacaacaccatggtgcacgaccccgacgccacctacgaccacctcggcatcgatgtcaactcagtcgtgtccaacaagaccttgaccttgcccagcttcaccctcgtcgggaacatgaccgccgtcgtcgagtacgacaacgtctccagcatcctggccatgaggctgcacctcggctatgggcttagtggcccccgtcaccggccggattacaaccttagctacaaggttgacctcaagagcgtgctgccggagctggtctccgttggcttctccgcctccacgaccacatcctttgagctgcatcagctgcattcatggtatttcagctcatcgttggaaccaaaggccgcggtgcgtggcagagttgtagcgggagccaccgttggcacggtaatgttcgtcatactcctcttcgccatggtagcagtccttgtacgacaacgtcagagcaagaagagggagacagaggaggcaaagaacggaggcatggatggcagcgacgacgacgatgacgacgacggcgagaccatcgtagagatcgagatggggacggggccaaggcgatttccatactacgaacttgtcgaggcgaccaagagtttcgcggcggaggagaagcttgggcaaggcggtttcggcacagtgtatcggggctacctcagagagcagggcctcgccgtcgccataaagagattcaccaaagattcctccaagcaaggcaggaaggagtacaagtcagagatcaaggtcataagccgtctgcgccaccgcaatctcgtgcagctcatcggctggtgccatggccacgacgagctccttcttgtttacgagctcgtccccaaccgtagcctcgacatccatctccacggcaatggcaccttcctcacatggccaatgaggttattaactcttgctaattttgtcttaatctttgtagtgtcaacttaattggcgaacatattgtcaaattttactcaggtttacgaacttgctaagtgcacatcgagatctctaaacttggtttagagtatcatctcggtccaaagccgcgtttgaccgtgctcttgcctatgtgacacgccacatagacgatgacatggaattttttttctcctttttcttttttttttctcctgcgcaaccgaatcgttaaccatgttcccttatacagtttcgcatactcgttcgtccagttgttagttattcacaggctgtcgcacgtgtggaacgaagaaggaaaaggaagtatccatgtgctttcctgatgggccacccttacctttcttctaaaattcatcatcatgtctccacactactgccactgcaaacagtgtacgcattgactcgatcaatcaacggggagggaacacaacacggcggccatcgatggccggcgttttgcagatcacatcgtcgacgaccaccacgaggtacaatattgtcggcctcatcttcttcttctccgtcttctgcgacgatctctactcgccggctccagtcgccttggccttgaccttcaaccacaccaacttcggcccggacgagcagacgaacatcaggctggaaggcgacgccgccttcagcgccgacttctccttcagcggcgacggcggcgggtgggtcgacatcagcgccaacaggcacggcagcatcgaagacagccgtggcagggtgtcgtacgcccttccggtccctctctgggacgccgccaccggcgaggttgccagcttcaccaccggcttctccttcgtcatcaacccgcccaaacaggacggcggcatcgacaacaagggcgccggcatggccttcttcctcgccggcttcccgtcgaggctccccggctcctacccctacaacctcggcctcaccaaccagaccgccgaccaggtggccgccggcgacgaccggttcgtcgccgtggagttcgacaccttcaacgacaccatcgtgcacgaccccgacgccacctacgaccacctcggcgtcgacgtcaactccgtcgtgtccaagacgaccttgaccttgcccagcttcaccctcgtcgggaacatgaccgccgtcgtcgagtacgacaacgtctccagcatcctggccatgaggctgcacctcggctatgggcttagtggcccccgtcaccggccggattacaaccttagctacaaggttgacctcaagagcgtgttgccggagcaggtcgccgtcggcttctccgccgcgacgtccacatccgtcgagctgcatcagctacgttcatggtacttcagctcgtcgctggaacccaaggccgcaccgccaccggtggcgccgccgtcaccgtcaccaccgcctacctccggttcaggaagtggcggggttgtagcgggagccaccgtcggcgcagcactgttcgtcgtgctcctcttggccatggtagcagtcgtcgtactcgtacgacgacgacatcagaggaagaagatgagggaggcggaggaggcgaacgacgacgacgatgacacggaaggcgatcccatcatggagatcgagaacgggacggggccgaggcggttcgcgtaccatgtgctcgtcaacgcaaccaagagcttcgcggcggaggagaagcttggccagggcggattcggcgcagtgtaccggggctatctaagagagcagggcctcgccgtcgccattaagaggttcatcaaagattcctccaaccaagggaggagggagtacaagtcagagatcaaggtcataagccgtctgcgccaccgcaatctcgtgcagctcatcggctggtgccatggccacgacgagctccttcttgtttacgagctcgtccccaaccgtagcctcgacatccatctccacggcaatggcaccttcctcacatggccaatgaggttattaactcttgctaattttgtcttaatctttgtagtgtcaacttaattgacgaacatattgtcaaatttaactcaagtgatcagctaacttctattttgtcacagggtcaagattattcttgggctcggatcagccctattctaccttcatgaggagtgggagcaatgtgtcgtacaccgtgacatcaagccaagcaatgtcatgttggatgagtccttcaatgccaaactaggtgacttcggacttgcaaggttcattgatcacatcgtggggatgcagacaatgactgcagtctctgggacaccgggctatgttgatcctgaatgcgtgatcaccggcagagcaagcgcagaatccgacgtttatagcttcggcattgtcctactggaggtggcgtgcgggaggaggccgatgagcttactagacagccagaagaatggtatcttccggttggtcgagtgggcttgggatttgtacggcaagggagacattctcatggccgctgatgagcggctcaacggcgactacgacgcggcggagatggagcgtgtcattgtcatcgggctctggtgcgcacaccctgatccgaacgcgcgtccgtctatcagaaatgccatggctatgctccaatccggtgggcaactgccagtgttgccggctaagatgcccgtgccgatgtacattcctccagtggtctctgtagatgagctcttcacgtcgcctgcagggatgtcatcctcaagtgcgacgcagtcatcaacaacaacggtgagtggctacgcaacccacatctcgacttcttctgacacatccacttcagctggttcgaaggactcgtcttcgttgctcaaacatcagttctagtaatgttcagttcatttgagttgttcttgattttacagtagttgatgcttggatgggatgttcagctcgtcagcgcccgttgatttgatctttagacttttgcttaattgccggtgtgagtaatctggtatttacgccatgctttgaacttttacagtcattttaagtttgtctacaaatatgtatgtataaatgtataatgccacatttctattcattcagattgccgatatacctaacagctcgttctttcgatcgtccgcttgctagaagccagttaatgttctgggcctcaggcccattagtagagtaggcctccatcctccttattgccttcaccatcaggcccatagtacaaagttaggctgggccatagcctgcaggcaaagttgctttaatcaattcctagtgattttgctatatactgtatttattagcaaattttctcccaaaatattgacatgtaaatataatataattatagtgtaactacatcgttagatttgcttcaagattcgtactaacgagagaaaaaaatcacaccgcatacacatctggggattcggtcacatgacctccattttatagaaatagcatattactaagagatttttaaaagttacatacaagttaaattttagttttatgtaaattaaaatgtattgtactatttattttatctaccaaaatttttgaagaaaatttataaacgaatatataggtagtaccattagaggaagctattagcagagaccttgagacattgactggtctctcttgagtagatagatatatatgtactttttttttccagcatcactctcgatcaatcagtggatggctacaataattttagataggatagtgctagtccttgacttatggtctcctgaaagcaactactacttgctactacaatagtttcagtcttcatataggctcctgtagtccttcgacttgcggtttcatgtgcattgcacctagctctactatcaatggtgattggtgatcagatgtgtttgtgttttggatatatatatctagatatcggtgcctaactttatacggtagtataattttttaaaggtagaggacaacaataatttatactatcaattattcaaaggatttttataactttgtgtcgttagaacgaaaccagtgcacgtgcttaaaatcaacatcagcataggctcattatattcctcgaagtctagaaaattaatcaaaccaatgttcatggaggcaatggttaattttcagtcacaattttgagaagtttgggcgcaccataaaaaaaataaaatacaccagcagttcttaaactagttaggaggtttcactcaggtttacgaacttgctaagtgcacatcgagatctctaaacttggtttactgtatcatctcggttcaaagccgcgtttgaccgtggtcttgcctatgtgacacgccacatggacgatgacatggaattcttttctcctttttcttttttttttctcctgcgcaaccgaatcgttaaccatgttcccttatacagtttcgcatactcgttcgtccagttgttagttattcacaggctgtcgcacgtgtggaacgaagaaggaaaaggaagtatccatgtgctttcctgatgggccacccttacctttcttctaaaattcatcatcatgtctccacactactgccactgcaaacagtatacgcattgactctattaatcagcgggggagggaacacggtggcgatcgatggccggcgtcttgccggcaaccaccacgacgaacaatattgtcgggctcatcttcttctgtcagatcgtcatctgacagtgctgaggaagatactgaagaagaactgagcttggaagcagagcaggacgatgatgagaagatgcaagctgaagctgaagatgcagagcagggaggagttatggaccatcaacccgcgttgcggcgcacttcaaggactgtcaagcccaacccactgtaccatgggccacagtgggccgtgtaactgaattcgttgtaacagctgtctaacagctagcgtgtcgcgtatgctgtacgttgagagcgagagagagaactatatatatgaattggggatgaactagagaggaggacttttggcaatctggtggcgaaggcggcggaaggctcaatcctgttggattggtgcataatacatcagtaatcgattgccatatatcttgttgctgttctgtgattgttctagttagattagatcctaacaatctggtatcagagcctcaatttgtctcgaaatcctcttgattttgctgtaaaattccttgcaagggattggaaccgacttcggttggattccgcgaaaaggaaacttgcccttctaggttagcgaaattcggagagtagacaagttcaggcctcggatccaggagtagcgccatggatacggatgggaagcttgatgtgttgctcaagttggtggaggggaacgagaagaagcgggtggaagcggatgagtgtacgagggcggagtaccaagagctcaagaagacggtggaatccagaattcctgtggttgagaagaaggtggaggtgttgagcgaggcgttgctcgagctgaatctcaaggtgaaccgcttggagggatagatgcagaggacagttaaggaagaagttcctcaaggcaaggttgctgatccgaaaccgaccacaccatctggtatgcgagatcttcacctgttttcctctgcttctactttcggaaacaattctaggaagtctgatcaaggaggtgaaattcccatggacattagtgctaacggtccacccatggtttgtccacaattcaatggtgataaccctcagatgtggaaatcaaattgtgagcaatattttgaagtttatggcacacatcctatcaattgggtaaaaattgcaaccctgaatttcgtgggcaatgctgcgttctggatgcaatctgttaggtctcaactgcagggaattacttgggtggggttatgtgaattggtgtgtagcaggtttgctaaagataggcatcaggcactgattcgccaatggattcatatttctcagactgggtcagtgagtgagtatgtggaaaaatttgatgggttaatgcaccaactaatggcctatgattcatcattagttcctgtttattttttcaccaagtttgtggaatgattgaaagatgagataagagtagtggttatggttcagaggccccaggatttagattctgcttgtgccatagccctgctgcaggaggaagctttagaaggtgttaaggccagtcattacaggaggtcagacccaggggttatgctcaaaacaaatagaactggacctattgtgggagttactcagcatactaagaacaatttgaatcaatctgaagacagaaggggcactgaatctgctagagctaaagatgataaggtggctgctctgagggcttataggaggtccaagggactatgctttgtctgtggagaacgatggggtaaagaacataagtgtgcaactacagttcagcttcatgtagtggaacaactgttggcagtgttacaacctgaaattgacagtgattctgataacattgaattgggaacatcaccagaacaacatggcactttattgaccatatctcaacaagctctgtggggaactgaatcaaatcagtctatcaaggtgaatggttgggtgcagggaatggaactgatcatgcttattgactcaggcagcacacattcgtttgtggatgaacaaattgcacttaagttgatgggagctagaaggttgcaacaacccctaactgttagaattgctgatggaggtgtcatgcagtgcactagggaaattgctgactgtcgttggtggatgcagggacagagtttctgcagtaatttccgactgctacccctgggaaattatgatgccatattgggtatggactggctcacaatgcacagcccaatgaaggtagactgggttcaaaaatggatggaattccaatacctgggaagggatgttcgaattcaaggaattactaatcagccagcacagtgttctcatataacacacaaccagttatctggcatgaacaggaagggttcactgttgtattttatccagttacaaaatatggccatacaggagaatagcactatttctgattcagtcaaacctatgttgttagagtttgctgacctctttgaggaaccaactgaattacctccgagaagagcttgtgatcacagcattaacctcattccaggggctaaacccattaatctgagaccttataggcacaatcctgctctcaaggatgaaatagagaggcagatagctgagatgctcaagtctggggtgattcaacccagccaaagtcctttttcttccccagctatacttgtcaagaaaaaagaccacacttggagattggtaatagattacagaaagttgaatgccattacagtcaaaacaaaatatctagttccagtgatggaggaactactggatgaactatctggttcaaaatggtttaccaagctggacttaagatcaggttatcaccaaattagaatggctgagggagaggaacacaaaacagcctttcaaactcattctgggcactatgaatataaggtgatgtcttttggcttgactggggcacctgcaacatttttgggggctatgaatgacactctaaaatatgtacttagaaaattcgtcctggttttctttgacgatatcctgatctatagtccagattttgagtcacatttgactcatgtcagacaagtcttacaactacttcagcaatatcagtggaaggttaaattaagcaaatgttcttttgcttagtcacagttatcttatttgggccacatcatcggtgcaaatggggttgcaactgatccacaaaaggttcaggatatactcaattgggagattcctaccaatgttaagaagttgagaggatttctgggattggctggttattacagaaaatttgtacaaggctttggtctgaaaagtaaacctctgaccaatcttttgaggaagggtgttccttttgtttggagtacagaagcagattcagccttccaggctcttaagacatctctggcctcagctcctgtcttggctttaccaaattttcaaaaaacctttgtggtggaaactgatgctagtgactatggaatcggtgcagtactatcacaggagaagcacccaattgcctatataagcaaagccctgggtcccaggaccagaggtctgtccacttatgaaaaggagtgcctagcaatgatcatggcagttgatcactggaggtcttacctgcaacatgttgagtttataatactcactgatcaccacagtctcatgcacctatcagaccaaagactccacaccccctggcaacataaggccttcacaaagttactgggtttacaatacaagatttgttacagaaaggggagtactaatgctgctgcagatgctctttctagaaaaccacagcaatctgaggaagagttcaatgctatttctcagtgtgttcctcaatggctgatggaagttttgcagagctatgatactgatccacatgctactcagttagttgctgccctgacacttaaccctaattctaagcctcatttttcacttcagcatggagtcttgagatataagggaaatatttggataggcaacagtcctgacttgcaacttaaaatcattaatgagatgcatgccagtccagtaggagggcactctggatttccagtgacttacagaagaatcaaacaattatttgcctggaatggaatgaaatcccaaattaaggaaacacttgccaattgtcaaatttgtgctcaagcaaaaccggatagatcaaggtatccaagactattgcagcctttaccagtccctaaaggtgcttggcagactatatcattggatttcattgaagggcttcccaggtccagtcactacaattgcatcttagtagtagtggacaaattttctaaatactcccacttcatacccttgagacatcctttcactgcaattgatgtagcaaaggccttcatgagtaatgtgtacaaactccatggacttccacaaattatcatctctgacagagataaaatttttacaagccaattgtgggagcagttatttctgagatctggcactaaattacattacagttctgcttatcaccctcaatcagatggacaaacagaacgaggaaatcaatgcctggaaatatatttgaaatgctttgtccagtcagcaccttccaaatggccttcttggttgcatttagctgagtactggtataacaactcataccattcaactattgacagaactccatttgaagccctgtatggatatccacctcgccattttgggatcagcatcagggactgtgacaacagtgagttgataacttggatgcaggatagaaaattgatgcaacagttagttcaacaacatctgcatcgtgcacagcaacaaatgaaactttttgctgataagaaaagaagttttcgacagttccaggtgggtgagtgggtctatctcaagttacagccctatgtgcaaagttcagtggcccccagagcgaatcacaagctggctttcaaatattttggaccatttcaaatcctggagaagttgggtactgttgcttacaaacttcagttgccagccacaagttccattcatccagtctttcatgtatcacttttaaaggaagcaaaggggttccagccatcagtgcatacaccattatctccaacttactctgctgtccagtatcctatagcattactggatcatcgtcttaccaaaaaaggtaaccatactgttcaccaggttctaactcattggtctgacactattccagcacaagctacctgggaggatctgcatgacttgaaggccagatttcctaatgctttggcttggggacaagccaaaactcaaggggaagggattgtcagatcgtcatctgacagtgctgaggaagatactgaagaagaactgagcttggaagcagagcaggacgatgatgagaagatgcaagctgaagctgaagatgcagagcagggaggagttatggaccatcaacccgtgttgcggcgcacttcaaggactgtcaagcccaacccactgtaccatgggccacagtgggccgtgtaactgaattcgttgtaacagctgtctaacagctagcgtgtcgcgtatgctgtacgttgagagcgagagagagaactatatatatgaattggggatgaactagagaggaggacttttggcaatctggtggcgaaggcggcggaaggctcaatcctgttggattggtgcataatacatcagtaatcgattgccatatatcttgttgctgttctgtgattgttctagttagattagatcctaacatcttcttcttgtccgtcttctgcgacgatctctactcgccggctctagtcgtcgtggccttgaccttcaaccacaccaacttcggcccggacgagcagacgaacatcaggcttgaaggcgacgcggccttcagcgccgacgtctccttcagcggcgacggtggcgggtgggttgacatcagcgccaacaggctcgacggcaacatcgaccacagccgtggcagggtgtcgtacgcccttccggtacctctctgggacgccgccaccggcgaggttgccagcttcaccaccggcttctccttcgtcatcaacccgccaaaagaggacggcggcatcaacaacaagggcgccggcatggccttcttcctcgccggcttcccgtcgaggctcccgtccgccggctcctacgcctacaacctcggcctcaccaaccagactgccgactaggtggccgccggcgacgaccggttcgtcgccatggagttcgacaccttcaacgacaccatcgtgcacgaccccgacgccacctacgaccacctcggcgtcgacgtcaactccgtcgtgtccaagaggatcttgaccttgccaagcttcaccctcgtcgggaacatgaccgccgtcgtcgagtacgacaacgtctccagcatcctggccatgaggctgcacctcggctatgggcttagtggcccccgtcaccggccggattacaaccttagctacaaggttgacctcaagagcgtgttgccggagcaggtcgccgtcggcttctccgccgcgacgtccacatccgtcgagctgcatcagctacgttcatggtacttcagctcgtcgctggaacccaaggccacaccgccaccagtggcgccgccgtcaccgtcaccaccgcctacctccggttcaggaagtggcggggttgtagcgggagccatcgtcggcgcagcactgttcgtcgtgctcctctttgccatggtagcagtcgtcgtactcgtacgacgacgacatcagaggaagaagatgagggaggcggaggaggcgaacgacgacgacgatgacacggaaggcgatcccatcatggagatcgagaacgggatggggccgaggcggttcgcgtaccatgtgctcgtcaacgcaaccaagagcttcgcggcggaggagaagcttggccagggcggattcggcgcagtgtaccggggctatctaagagagcagggcctcgccgtcgccattaagaggttcatcaaagattcctccaaccaagggaggagggagtacaagtcagagatcaaggtcataagccggctgcgccaccgcaatctggttcagctcatcggctggttccatggccgcaacgagctcctcctcgtctacgagctcgtccccaaccgcagccttgacgtccatctctacggcaatggtaccttcctcacatggccaatgaggtaattgatttccctaattcattagaatttttgctaatgtgcaattgacaaatggccatgaactgatcagttattgggtttggatgttgcaggatcaacattgttattgggctcggatccgccctgctctacctccatgaggagtgggagcaatgtgttgtgcaccgtgacatcaagccaagcaatgtcatgctggatgaatccttcaatacgaagctaggtgacttcggcctcgcaaggctcattgaccatgctgatggggtacagacaatgacgcacccctctgggacgcccggctatattgaccccgaatgtgtgatcactggtaaagcaagtgccgaatctgatgtctacagttttggggttgttttattagaagtggtatgtgcaaggagaccaatgagtctactggatgatcaaaataatggtctcttccgactagtcgagtgggtctgggatctatacggccagggagccattcacaacgcagctgacaagcggctcaacaatgactatgatgtggttgagatggagcgtgtcattgctgtcgggctctggtgtgcgcatccagaccgatgccagcggccatcaatcagagctgctatgatggtcctccagtccagtggaccaatgccgatgctaccagccaagatgcccgtggcaacatatgcaccgccggtggcctcatcggaggggcagctctcgtcatcgacgggtatgtcatcatcaagtttgacacaaacagcaatcacacctcgttaggggcataagtttgcccacttgtggtacaaaaataatccatgccattagattataaatgcacttgccttctacttattctcatttcagattgataaactgtaaaccaaatgaattagcatgggtcagccggcggataccttgagcagggatccttttctcagggatgccgctctcggtgaaatctagctagagatttaaattgcaaacaatgtttgactggatttgaatcaatttgaacaaaattcaagaaggacatgctcattgttgatagatgtcatacgataatcggcaaaatggaggcggacaactgcatagaacattacctactaaacttaggttttatccaaatgcatccccatctctgactgacaccaaagtatgtaacctcgaacgatatagaacacatggaacatcatcacaaaaagcatatcagtaattttgtaccacaccactaaaattcagaacaagaggtcacaaaatatattttgatacatggttcgagttgctgctatcattgtcagcatttcgtcaagcaaatagatgaattggaacttccagtgctgtttccagtcttcgttaccatggaagagcgaagtctaatgtttgtttcaagacaaaaaaaaaaggtaaactcaatcagaaaaagaaaaggtagatgaaagagagtacttttatggtacattctactgctagtatatactaccagtatatgaagggtagttttggtattagggaaaaatctgaaaagggctttttggtcatttaaattagagaagtattttcaccgggattaattttccttcggttgtttggatatcatcatccgcgtgataccgcttcttctggatacatctcgcgtcgctgctccttctgcagctccgcctgcccatcgcctcactcaagaactagggttttgggtcgctggaaaagacatgagaggaaaggatgagggaaattgattcgattcccgatggcggcggcgcggcggcgctcgcaagaggaagacatcggcgacgcatgggcggccatggatcagatttgactagtgaggaaacgtgaaatcataaaattacccccacacaattagataaaaagacaaatatacccttttcaatttatactgcagaataattagaagggggatcggatgaattttcgaccgttagattaaatatactggtagtatatactagtagtagaatgtaccataaaaatcctcatgaaagaaggcacctctttcaagttgaaactcctgaaagctataaagagtaaacaagcaccaaaaatggttgctataataattggctgtaactcttttgagtaaaggccgggatgctattttattccattatctaaaaaaatatattttcacatgggaactgaaacacaacagataaatgcgcagctcaaagtcaaatgcaaacaatatgaaacaacaatggtggtgtaaacaacaggaacctcgatataataaaagtggagcatggccactgcctactgtaaacaggatagcctgcaacaatttactactacagagttattcaaatgcaattttctcaaattacggatatttatgttcgacactttggttttgacttcagaatcaaggtcatcgaaagcagaaaaaaaaaacattaacgcacaaaacattagagcacgatagtccacccaaattgtaagatttaagaaatagtcaatcattcagcaagcatgtcacccaggactgatagctctgccacttcacggagtgatcaaactaaatttggaaataaaagagttgattcttatagtgtcagcagtggttctgctgttgcaatttcctcaacaatttctgatcaaaagtgtgaaatcatagtcatgattaatatttgtaatgaataattggctttgcaaaatgatttattcgaagaattggtttgagagtatgtgtgaatgttggtgtgagtgcgtgtgactaatttgggtcaggttgtgatatctgtgcccagaaacggttgttttgtctgattgtgtgcaggtgacttgaggtcagccttggtcaatggtgaggaccgaaactatgctcagggtggagcagaggtctagtgcggtcatgataccatgtgagaaggtgactagagtcaggattcttggtgaacaacttcggtcaacggtggggatctgaaacgctccgcttttcgtgaggcgttaaaaactaactcggcaaaatcctaattgcgaaaattttcgttctctgtgtgagagtctaagttgtgccaaggatcccaatttaatcccgttgttccctctcatcgaaatcaaaaaaatcctccccctcatccaaattcctcttccgattcgagtctttgaaatcaaattctgaaattcaaatccttcctttgaatcctcgccaaatacttctacgaatccagaattattcaaatcccgcctcgaatcctttccttgactccaccctatgttcccgagaacaaatacccaagtattccttttgaatcctttccatgacttctccttgagtttcccctgatacatccctaaaccctcgagtttgaatatcaaatttgaattcgaatccaaaccctaaatctctccaattctatccaaatcagttttctctgtaaaaatctactttacctccctatgtttttggatggaccgattctcctcccccggcccatctcccctcccagcccatcatctccccccctcgcacgtgcgttacacgcatgcgagccgagagagagccgtcgctcgctctctctgtttccctctctctctctctcgttcgatctccctctcctcggcgccgatttcccgccgtcgccgcccaaaacctccaccgccttcgcccattcccgcgcgcacctcgcgaggtggccgaccggcctgtcaccgccgacgccatgcgctgccgccttgccctcgctccatgccaaaccgaccgccgccgtcatcgtcgacgtcatccatgacccccccgccgctccacgccgcacccgtccaagagtgggagaagcagctgctctccctctcctcctcctcactctccctcccctcattatggcaagggaccaagcccctttttccccttctttttccctttcccgaccactgccggcgtcaccacctctgcgccgcttgaccgaccgcgccagcccgcgctccagcggttcgatttccgccgctcgatccaccgccttcgccactcaacgcatccacgccgtcgccgctttcgcaccgcccacgaaaccgccactaccgccagccgagcacttgaccgccaaggtcagttctcccctccccaaaccgacctcgtctccgctataaaaccaagccaccccaaaccccttcctctctcgttttcactcgcctcagtcctcacacccgccgcgccattgccgccgaaccaccgtcgccgccttgttgctgctcgtcccgctctcgccgttgccgtccgttgccgaagcaccggaggagccggtgcgtgggtgacgaggagctccgggcaccacctctccctcccttcttccccggccgcgccctctcggtgccgtgccgcctcggcgtcgcgaacacctcgccgcgacaccgaccgcgccgccaatgctgcctcctcttcgattggtgagctccccaccataatcctcctcctgccgcgcgatgcgccgcgcccgccgccgctcgccatagctcgccacgcgctcttgctctgtcccggaggccgcctctcgtcgccagccaatctcggtgccgctccgtccaatccgacgccggaaacggattccttgaaccccggagatgctcccacccctttgaatcgaaccctcgtcgtctcgtcgtgttttccccttttgatctccggtgattgccgccgccgcaatccaccgtcgtcggctcctctcgcgtcgattcctctcgccgccacgctcccggggatccccatgacctccccctggctgccccaaggccgtcggccttctcctttgtctccgcgccgtgtcgccgcttccgccgccgcctaacgccgccgtgcgtgcgccgccggtgaccatcgggtcccgcgtcaccgcgtgcgcgtcgcaacaccataccggttcggctaagcccgagcccgcgcacccttcgctcttctcgcgcgcggccacgtcggcgtgctggcgagcttggtcgccgccgccagccaccgtcatacctcccctctcaaatccgtgccgttaaacggattccccctgacctcctctagctgccggcggtggccgctcgctccggttcgccgtcgctcgccggaacgcctcgcgcgtcgtcggccgtccgatcccgggcacctcctcctcctcctccttccctttcgcccctgcccgcgtggccgaccacgtggcagccacctcagccccgggcccgcttgactgggtcaagtcgcgcccagtcagcctcctccctccgtcttccctcccatgcgcgcggtccacggcaagccgtgcggctgcacgtgggcccgccgccatccgtccacccggcgcgccgcgcccgaactgcgcgcatccgaaaccctagcgcccgcctccgcgtgcaccctccccaccgtgaacccaaccaccgccatctgggtcccgcgcggtggaccgcgcccaccccgacgggcctccctctctccccgcgcgccctcatgggccgcctcctcgcgcccgcgccggcccatttggtttggccgagccgcgttagcctttgggccgcaccaatgccaccgaaacaagtctaatatacatccctccttgatttcctttttccacccttgttccataaatcaattccttattccaaaattccatgaatcattttccttggtcccggattcaatgactgtcaataatattcttgagaatattatttctataaattccataaatcatctctcctattccagaaactccaattaaactttcaaaattcatatcacccaattcgcaactccgattgactccattccacttccaataattccgtaaattgagctctatttaatggcactactaattagtctaaataggatctttcttttggtcttttgtttaggttttcgattgtttgcgtatagttgcggttatcggattttcgtcgatcgcgggttttctcgaagattcgtgaagcttcgtgaagaccttgagcaaggcaagtcaccatttgatcaattgcccctataattgaaaagtcattattattttgtttgcaacttgcattattagaatcacacacttaacttgcttggcctcggtttgcgtgccaaaccgacggacctacccagtagtcgcactaatttccgtaggtcgtactaccctgattccttgtcgctccacccttgtggtacctcggtattcgtgctctctgagcgcgtataccaaatatcccacatacaccgttgtttgtcgaaaacttgggaaatgggtttgtgaagccttcaaaacccgacatgtggtgtcggtgtgtttgaaaataaaatgaattgtgaaaactcgcgatgcgggggttgtgcctatgtggcactgtcccgtattcgcatataaggaccgattcctgtgggaaactcatcgaacataatcaaagtgcaaccacaaggtggaatgggacaccctggctaagtaactagtcggttcagggaaacctcgcatgccaatagttgggaacgccggggcggggtcggacaaaccgggttcctggtaaggcaaggacgagaagcttgctcacttaccgatcaaggtggttggagtttgatttgtgaacgcctaaaatggcctatgtttatgtgaggatttgatccttctatgtggcatgaggtaaccctgggtcggctcgggaaaggctttgttgcgaacctccgataccgacgggtgttcggaataagttcgtatcttgtgggtaaagtgtacccctctgcagaggttaactaactgttcgaacagccgtgcccacggtcatgggcggatgtgaggtttttcccgttgcgtagatttgtttgcctgtgctttgtgaaaagttgttgtggtgtgggaatcgtaaccagaatcagcctatgtggcagatggacgacctgagtggtcagaaacgaatctgtgtgattcgggatgtctgcgggcatcatagactaggcttcccgagtggaagcggattgttgtgctgctgggcagctggactctgggagtccgagaaaatgaaaaaggctctgggagctgattaatcaagtggaatggctctgggagccgagaagtaatgaactgacccgggaggtcggtacattaccaaatgagctgttgaaaaacatctcttaaagtcgaatcgagacgcaagtctcttttcgtcccaaacttagaaagaaataaatcacttagtgatttcaaaatgatttcaaacaaaagatttgcaaaacaaccttgcctctctgccaagcttgcattaaacacctaagttcccgtgacttgctgagtacgaaagtactcacccttgctctatataaatatatatatatagttcctccgccctgaagggaagataaagtgaagtgaagatttgggtttcgtcctggttcccagccgtcgcctgtggtgttgggtgttagaccgttggttccgctgctgctgctgctgttggtgttttcctcgtccgcgtcgtcggttgtattctcgggctgtctgagctgcaacctaagttaaggtaaataagtcctctatttattttaaggattgctatgattcatatttgtcaccatgggtaccagcactatgtcctgggactggtaccgagatcgcggtttcgtaggaagcggttcgcgccgttttccctacgacacgctcctgtcaggtgccgttgtacggcggtatcagattggggtgtgacaggatcgggactaaactcagggaggagttgaggtccagacagtcaaggataccgggtgacgaagttggatacgagatggcacacagtgaatggatatcgtgtgggagagatcttcgcaacgggcttcacgagatatgcgtgcaagtaccggtgttggcgaaggagattggagtgagaaattgaggaagagtatatggtgatatagtacacgtggtactgtagcatgcatatgtgtggtattgatcgatgcatgcaagtgtactgtagtggttggcagtacatggatgcatgtatgcatatacatgtgtgttggctcggtgagtccaaggcaggagcggcgctaaggcaggagaccgaggccgaccgggacttcgtatgagacggacatgtgtccatgtcgggtttgctatgacacggattgactgtagtcggttgtgaggctgcaggctttaggagactaatttggatagagtcatagtttgacgagtggtactcctatttcgagtaggagaattttcatgtataaatagagaggaagcgtgaggcttcccggtatcggttttaggaagctgagtttgagagattagatagggtttcgtgagaaacttttgaggggtgctgtggctgcaccttgtgaacaatatacttaagcaataaagatcatattcaatcatcaaggcattaacgatctattccggtttcgtaagttttacgtttatatttggttttggtattaacttgtgattgttcattttgctgcgattttgttcaagttaattcatccaaaacttttctaatacttcaaagatcagatctggaaagtttcgttgattggttctatttgatgatattttgtcacgtgcaaggaaaaattgcagtggccaaagcaagcaaataatgtgatccctatatgggatgttcagattgcatgcagagcagtacgagctgtgagcagcaaaccacaagagatcggccgggcagctggttgtatccatgcatgcaagcccgcacatacgcacgcatgggcttcaattacacctgcgtacactcgcatacgtgaccgtattttctagcaatacggccgcgtatatacatggaaaaacaaggagatgcgaagctacggtgtattttacgctatacggttaagttagctcatgcttgcccggatcaacaaattaaatttatgaagagataaaatttatctgaatgaattcaacacaatccttgcaagccacgcgcatacgaaagacggccttccgccggactctcaccggcccagcaacggaagagtggcaaggaatatcggaaaccgccatgacgcgctccggcggatgcgcacacgtacgagagttaaattctatcctgtaggcccatcagaaattaacagaaccaatatttgacgtcaggcggatcgaagagataagattaacaaaccgatcgattgatcaagtatatccgcacttctccaccgacctcaggcccctatataaggcgtcgacgtactctcggcagcctggaggccatggacgccgatcaatccataaacacccatcgacacacatgatcatccatctgtccatctcctcctggaagacaactatccaccggcgacctagctatccatcgaccggcaacgagcatcaagatgtgatctcggcggccggcgacctcgtccacagcacccctgtgtccggcaagaggcgcacatgaggaggaacaacgacatcttccttgggcagatcaaacgctgcaggagatcgtactcaaaccttcaggaggagagcaagtctctgtcgctttcttttctctcgtttcaggtgggagatgagcctgtacgcgacgccgccggggttatcgtggctgccatgactatttctgaaccatctccgctgccatcgagactcatccgcccgccgtcatccacattcatcaacatctccatctcatctcagatggactcatccattcatctacaaatcattcaagaagcgacaccaaagaaagtcttaatggccactacaggtaaagctaatttagattggttcctttcttttggttccagtgcctacgtgcatgcatggaggacggccgggtgtgctgccatcgccggagtcgtcgcgtagaccaatctgttgacgctgatcgcaagcctccgtcaagatcgatgccgctcgtcctcaagctctgatgttcgagctgccggtgacgatgaccctgctcattgctgcgatctcgcctagatgttggatgacgttgccttgccgaccgctgcctccactcggcgacgccgtggatgtctgctggccatcttcgacgatgctgccaccttcctcacactcatcgtcaaggcgctcgaggagaaggccggtcggagtgccgctacccggcactgcgacaccaccaacacccatctgccggagaagaccatcgtgatgccactccgcccgacgcgacgcgccggagatcgtcggagcagccgcggatgctgcctagtcacgctgatccagaagctcttgttgagaacaacacaacaacacggacgccgctgagctgcccgcgtccgtgaacaacatatcgtcatcacgccggtggccgcccacgccgtcctgatagagcagcgggaggccatctcgtccaccttattggcaacgcacagacgctcgccatccccgtcaagctgctggtgacactgtccgccgagtgccaccctgtcaaaggctgtcgttgtaccgacgccaagctctaaggacgccgccattgtgatctctactgtgtgaggacgtctcaccgagactcaggcgacgccttcacgctcgtcgcggtttcttcggtcaccatcaacgtctactcaatcatcttcgacggtgctaccaccttcctcacgctcatcatgaagccactcgaggagatcgccattcggagtgctgctgcccggtgcctgcacgccgtcttgccggagcgtaccacggatcgtcggagcacccgcggatcgacgttgccgagctgtcctgatccaggaggtctggacggagccgtcggggacgcccgccgagctgctcttgcacttaagctcgttacaattatcatgcaactgaggcactgccatgtagtgttcgttcttgccgatcaaacactgtcacactgcctgccggagcacgttggattacgccagagtgccattgctaggggcccgtacgccgtcatcaagactggccgtgattctttctcttcatcaagccgaggtcgttgtgccgtttgtccgcgacgctttcacttcatcatgctggagttgttcgtgatgtcacgtgaacatcacgtcggagcaccactgcttggtgcctataaaccatcgtcaagccggagtcgtcgtgccgtccgtccgtgacgtctccttctctctacaccgcatgatgagatgccatctgtctacgatgctttcacttcatcatgccaagatgagatattgtctgtccgtgatgctctccctcttcgtcgagatcaacgacgctgtattggagcgtcgctcgtccacatcaacataaagcaagaatggtgccgtttgtgatgtcagggaaccgttcatgccagatctacaccaataatttcctcgaccgttctgccgacaaggcatttacttctacaaaggtcgccgttgctaccggcaccctcatagagccccttttatgggctcgtcgtcatatcaactggatcaatagtagatccatcatccgaaggatgtgctatataagccacgttcgtccggctgctgtctgcactgacttcttcatcaacaccttcattacaaatccctgttgtataagggacatgacgggtcaggaggtgcccagccatgtttaatccggttgccgtctacacctactttcttcgtcaattcttcattactttgatcacatctagtcagaaggtgcccatccatgtttattcggctcttgtgtgcaccaactgacttcaccaactcatcttacctttaacaccattccgatgttgttgctatgacgtcgagccgtccaagctaggcgattccatgcgtgtcttcttcaaacaatctacaccgacacgtcgttcaagaccgacgaggctagacgacgagggtgcgcgaagccgacgctaaggctatgtcaccaacactggcgcacggaccgacgaggccgtggatgcgttgccggcgcccacatatatatcacacatcttcaccaacattcatcatccatggagaacgtgaagcaaagacgatgagacgaccacaagcagcttaatcgggggttctcctgcaggcctagacctgcggaggtaattaaccaggagcttctcgaggccctaggaaccagaagacaacatcgctgatgtcagatctgtccaacgacaggcaatggcacgtgtattttctattatacatggaaactgtatcttgataattcaattaataaagatcatgtgtttttgtgtctcttttatgtttattttacatttgtgtatttaggtacactggcacgtccgcacttattttctctctaaacatagagggacatattcgtatttttctaccctaaacaggttcttgttagatttgaatttgcttaagttttaggttttgttcagatttgctgaaattttgatagagctgattttcaagggtattttctcttaaaccgtttattagtttacaaatccctccggtggaattgttctttaggttgtttagtgtcaagtttgcaactcgatccaacggttggtttaagagaaatcgtgtttttaccgaagcgctgtcgtgttgttttcaggctgacggttagaccgcgagaggaccagcggtcagaccggtcaagcttcggtcagaccgaccctagtaggtcggatagaccgccaaacgtgtgttccattggcttttgtgggatgtgttttgatctattaagattcgattatttgacttccgttgacgtaatctaacattcacccctctctggtaggcttggttacttatgtttgattctaaaaaagcaatccgttggaccctatccttacaaaagaaagagcagatctggaaacataatatcacaacacagtagcgtgtaatccattctctttcacatttgtccttagccaggatcagatgcgcttttttaaacctatcaggaagatgattgcgaaaacagtgatgagaatgaattttgacagcaacagctccagttatttatacattccaaatctaaagttacaatagtttcagcaatttttcatccccaaaagtccctgcataaccaattctgaatgtccaagttagttattcaacactactgcagaagtgcagaattgagtcaccctaaagtgaggttgaagcccttaaattcctttattgaaaggggaataaaaaacacgccaaggcaataaatatgaagtaattctcacatagacgtcacaacaatccccatccagccatccttgaattctccatttgcagatagactagaacagctagcgcatgagagtatgtgttcaatggttatggttttgtgggtaaatacaaacatataggcaaagggataaatatgctgttctaaatttgtaaattagagtatcatcaacaaaaaaagcaatgcaatgatctccagggctaacaaacttcatcagacagaggacaaagaaggaaatttaacacaaatcaattatctcaggtcaaagaaggcgatttcaacattagacaagacaaaaggaaagcaatactactgtaaccaacaaccactaaggctatgtacatcctttgggtgcagagtaaggctgggaacatgatcctctgacgtagagcaatctaatctacgtcagaggaacctattacgccaggccacggacatactttaagtgcacaggccggaacaatcctttatttatgaaaaaccagacaaccactaccagctttcacattgattaccgacgtaaaggaatgcaaagcacgtgaccttaggagaggccgctccggtaggacgaatcggcggcgatgcacgaccgcagccttgccgccgccaccgcgctgtgcagcggcatcaaagaatccacgctcgccagcgccgctgccaccgccacgaaggacctgaaacagtcaggatctaggtactttgggcgtgacctgcggaggcggggaggagagaccggatgcttcgccgcctggaacgagctcgtaaccggagatctcgactggcgcgcggcggcgcggtagaaagacgccatcttgtttcgtcgtttgctgcggccttcggttgaggaagggaagaacaaaagctcaaaactgggcctgcgtttattgggccataaagggatcgcggtggcgtacatgagacccatttaagttggcccttcttgtggcccatatatacaatgggccagagatacctcgccgccacgggtaaccggaactaactgcggcggcggccgcgggggagcagcagaaactctgaaccagcagcaagctagcttcatgcttcaggcttcaagctttagttgctagcctgctacattgctcctcgttgcaaattgcaaacaggcgatggctgatctgatgcatctgatggcaacgggattagatcactgtagatgatccaaaaaccaatcgtttctctttgtggatttcagattcactagcatcaacttttgccctaatttcctccctccttttgacttgaactgtctccttaatttatcggagacgtttggttctcagctggatgagagtgaaactgatgaaatcatataaaacctattgcttttgcctacaacttttgcccccaggtactgtattactgttctactgttctctcaacagttgatcgatgccatctgcaccgtccaatctagcgtgtgtcaaggatccaaatatccaatatctcttccgcttctaccctcccgtgaccgtgagcagctcgagattagtttcttctcgaccatcgaaccctttcccgctgcttctgttcgccgccgccgtgctccagcgcctagggttttcttcgccgccggcgagtgctccagctcctagggtttcttcaccgccggcgagtgctccagctcccagccctgcgcgtcctcctcgccggacgctgccggtgacgtctgggccaagctaggtgcggccaccctcctcctccccccttcctttttcttgggtttcttccgcctcacgggttcttgattcttgaccttttcgttggtcttgggcccttggccattgcttgcacagcaggtctgtagtgccctccgattccgtgttcccggaggtggagctggccgaggacgacgccgtggtgtgctcccgggtcaccccggatggcggcggggaggtggtcgcgtggtgcaagattaggcgcggcggcgacgtgtcggcggcgacgatttggaatctgaggtatctgttgtgattggtggttggtttatccccttttcgctgctttgctcttctggactgtacatcgtaggcaagatgcgctttttttttttttgcaatcctgttttattggattgggggtacaaatgccattcattgatgatgcatgtttgggcgaaggctataaaatgcagaaaagttcttactgattgcgatggaatgcgagttgttgtcgtttggattatgtgaattgttgcggtgtcgcactatccaaaattaaagaaaggtttcctgtggataaaaaagattcaaatttcctaatgattccaaagtgcctcattttcttatccataagaccataataactcagtttccaaacttttgaacctgattgattttgagtcgtgctgatctgaaatcgatagatgtgagcccctgaagacagggaataggcagagtggccatgggtgagttttttcttttttagggggtggagggaactgtgttgcaaccttccgttaatccttttatcaaattctcgctgatgttagatgcctgtcttgtcatccttgtaatgtatgtttcattcgaccgctatcttacgttaacattatccatgtgccattgagaaagcttggatgcaattattgtcgatggaagagttatccagcaagaagcagttgacatcaaaccggggagtgaaattgttccagggccccagaaagatggtgagacaattatgtattttgagtttggcattttgtgcatagattggttgttatgtttatttagtggtcttgtattttttttaaatagactattttattcctttatgaagccaaatgagtgtttacacatgactctgaatatatgtactcattgagtcatttggaatgtttattgtttcctagacctttctgtttagaaagtgaaacttctatggttgcatgtttgtaattgtgcttctgaaaaatttaccaaattacaaatggttttccttttgtgatttcgttatgttggacaggtgaactgtaccactatgtaatgcatttatgctatccattttcttgcagggtatctgttgtacacctttgatataactggcctgaatgactaggacaaaaataatatcaaggtattttgttgaaatgaatgttgatcaacagcaataacctgggtgcataaaagtcactaacttctatttaaatgacgatgtcagattgtgctaggtattgagaatgcaaagtgcagcatatgcttaaatttgtgggatgatgttgttactgttgcttcatgcctccacaacttctggtacttttgccaattttcctagctacttttgatttatctcaaaattctgattggtgcttattcctgtattccttttaagcaatggctgcttctttgagtggttaagaaggtcttcagctaattcgcgtgataaaagttagagtgctgcctgtccacaatgtaggacgacagtgcaattagttggtgggaatcacttcctacataatattgaagaggtgtgatagttgggtgtgatgacttaactcctcaatactgtttaagtgctacatattgtacagctgagatgtttatttatagttctgcttttgtaggctatactgtaagttttttcatcgctacagcggtctgatgaggagattgcattgttggagtcatatgccccggtcaagacaaatattgtgagttcaaaatcttactaagaaattgttgattcccaccattttctcaatggattgtatcaagtgttgtgccagtctcatatttgccagcactgatatttgtccctgttatctgccataaaatcgaatattgttttaaaatcatcatctttttttcaacttgtaaaccttattttttttcctacaaactttgcccatgttactgtattactgtttaatcaacagctaatcaaggccatctacaccatccgatgtaccacgcggcaacgatccgtcccctcttctgcttctaccctcccgtgagctcgtggttgaaagttacatttgtcatgaatttggattatcattctattttgaagatatccttgattgataaatgcactgccatgtttcagataacattttattctcttatttcccccaattttccttccatttggcaattctcgtggtgttggtttgtctgtactgcactttgacacattatatttaatttacaagacttgccaggtgcctaggattgtctttagtattcaacttttgacaagataatagtggatgaaatgaaaatctgtttacaattagtactggcctcttaataaactaattagtaaaacaaaattccccaaatggtgggctcattccgttagtcgggtacttataattgtagaatttcctttcagtgcaggttgatctagaatcatggttctctctctaagtcctattttgcttatcgaatacttgcctcttaataaactaattagtaaaagaaaattccccaaatggtgggctgattccgttagtcgggtacttataatggcagaatttcctttcagtgcagtttgatctagaatcatggttctctctataggtcctattttgcttgtcgatgatattgttaaatgttgccatggaatgttagcatctgatacatgggcttctcatctatagacatgttgtgcttgtcattacctctaaccatatcatgttatttaatttatatcacatgattgaaaatgcattttagcatgaatgactcataacgatttagaattttctaacttacaattagcaaaccatggcagcacaatatggtatttcaaattttcatttagttgcactacttgagaatgagtttagtggtttggttggattgtctaagtgcaaatgttgctgtcatttgtgggaatcaggaaaatataaaatgccatatataatatcctctatattttagttcatagagagtatagtttccattcactcccaaagaaaatatgggtataatccggagcaaataatctggaagcagatatgaatatggatattttttgctggatatgaatacaaatactatgacgttggcgaaagggcttgtagcctagtggttacaagagcatcagtagcatctgaggtcctgggttcgactccccatgggagcgaattttccagaatttaacggcgttgtgctttcagtagtaggcgacgtacccgtcgacagcgaggctcctgtgtagtcttcgaagatgctcacaggggtagggtttgcgtgcgtgtgtttataggggtaattctaaaaaaaaaagaaaagaaaatactatgacgttgtttccagtggatggggatacaaataaagatgcatgcttattgtttttcaaccacatttgcttaagcaatgattggtctattccagtattactattgttggcccctttggaacatataattgatatgccttttgcatgactcttctcaactaaaatgcattagattgcatcatgtctgtggttcacaatatgttacatatgttatctggaaagaatataattaaatttgctacagttctgtgctattgttatgttatttttgcattgttgcatgtggtgtttgggatccaactaaaactaagttggttattttattatgtaatctcaaccgatatacggaatttatatgttgtgtatattcatggttgttaaattgctacattatgttcagtatatatacagttttttttggcttcaattttatgccgtcctttccagctttcccgccgcaccgcgcggggcaccctctagttatatttgttctctgcacttctgctaggctgcttagctaccactagccttttactacccagctgcagataaactaaaacatgtatatatgaacatgaattccctaaccatataaactaaaacgcctccgatgatcgaaccatatcttggtccatcgatttaagtggaaaccaatgatcagttgttttattttatttattatatttatagaacaattactccctcggttctataatataatgtacaaccactttctttatatgttccataatataaggcatgcattcaattaattatgacatcttcttcattaaattattaattttttaaacaattcactctcacattctctaattctattggatgcatgcattatatttattaggatgatccaaactacaagatgataataactatttctttatctttgggttaatgttggttgtgccttatattttggaacggagggagtaatttattagagtcacgtgacaacttaggtgtattttgtcggaacactactactaatagtctcagtttacttgtagtcaactactgttggttgtagcttggtggcatactctacctacctatcagttgttgatgttactcgcggagtatcgttctttatctttggtgctagatgacatgcatgcatgctcattggatatcagctgattcttatattaggtacattgtgcatgaaatgtcttgtaagcaatatgacttattagcgatcggtggatagtggtttgtatgtagaactcgtatacgtggggattagtgaggacatacgattccacatgtggaggggagtatcgtggtgggtatacctgattttttttctttgagatggagatctaatgggtaaaattagtaggtccaccgatttttttttcctaatttattagaacaccatgtggcggtttacgagcgtttgtaggagaccacatggcggcttgggagtttttgtaggaagttaatttaatgaacttttagtatatgatagatagatatagatgtacgtttacaccaggtcacattttctctgctgtttcctaattggttttactttcatgcctagttaattaattatattagctatagggttaaaccaatctgcatgagcacacagacagtaaagtggaggaggggattagctaacagttgcttgcacaagcaggtggacagaaagacatgcattcgctttaatcacactgctctgaatgtgacatttctgtcatgccgctcatgcatgattagtggccggagtaggagtacacgttactagtggaaggagaaaatcttgttgtcggaggctgccgcgaacgggtcatgtgcacacttaattaccgtgtagtcacgtccaaattccaaaaacatagtaagacgttgaagaggatattgagcaaaattcgcatacattatattaattattatactcacgtcacatgggctggagcctatttatacggaggaggagcaaaggatcggatgaaatcgaccaagatgacgaagatagcaggtgttcttattttagttcttgttatctgtccaactattacttccgctaccgaaacccggggaggtaaatccatccatccatctcatgttttctcacaatctagctgagcttgattctctcttcctaattagtagtaattacttgtgcatgtttgtattgtgttagcgcttctattcctaattaattacttgtgcatgcatgcgctaattaattctgtttgtattgtgttaacaggccgggatgacgaccttagtgacgacaaaatctggacatctctgattgcattccactatcctggattggtggttccgccaatctgcatcgaggacattgcaaagaaatgcgggtggaataatctgacccctgcatgcgtgatggaagagatggacagctgccactaaggcgaccaccggccactctccatcagtctcaggctgacaggctctcagccataataattaataagctgtaataaggggcctaattaatatgtactacttcatgcctctgattttgattgcaagcaccactagccatgcatgcatgtcgtatattctaatagaattaattaatggtaataatataaagctagctagatgtgcctgtgggtttgatttttaatcactaggagtaatagagtagtactcctctatcagaatgtcagggtgcagtcagaaccccttgaatttggacgctacaactagctactacttaattaccgatcgatttggggcaaaaacaactactgtttgccagatcagagagatggtcatccaccatggtgaagaactagcttaacagcggcacaagcacgacctcgtccaagaacccgtgtctagctcgtgtggccggccagccggtcaccatggccgtgcaaatcatatatacaagtcatcgcttgtacaaagttttcattgtttgattaaacaaatctgtacaggacatggtgatacagctggattactcatgatgtacttaaaaaccaacttgcttcaagattgcccatggaacataacatcaaatcacatgccttactttacatttattacctatgaaagtaccttcttgcaatgtttatcagagcataagcccatgttcacatttttacctttgaagtacctccttgtaatgtttatggtagagaaagatccatactatcaaagataagacatatatttttacgtagaaacaatataaatacataattataagtgattgaatttaacatcacatatgctttaaatttctaattaccaggctaattttgcacactccaacatgtccatacatttttcttccaaaacaacttcatgcaggtagcaccctgaactacttctattctcaccctgatcagcactgagatggcctcaggaagtcaggaagcagtgccggcagtagatagggaagccaaacctgccatttgaaattccctggaacttaaggagacagctagtgcacatgaattgcatccaataattaatcagctactacaaaacaatgtgagaattgaagtagaagtacgagaaatataagttaatgaaaggaaactaagtactgtctcacgacatgattcaagataaataagggggataagaaaatcgcaaagaaaaatcggtttggaataaaagattgatttagtagtagcattttgtcaaaacatctttgggcaataggagcatcaccgatttgttatctttctcttttctactgttgcaaatccaacaaagaattgtgaaagcaattataattattttttttttaaaaaaaagatggcgtagagttttctcaaatttttacaagctttacttcacaaagcacatgacttatcagctatagccagaagatcgcatgattgaaactgatttattctagagagtaataggcaatcatagaaccatccatgacatgcaatcggcaaccaacagatgatggtctatcactcctccatatgttcatctccagcatattcgtgtacagcttgtaatgtacagtcaatagtggcaccttttatagcatgtgtacatgccaacctacaaacagaaagatgaaaaggaacattcagcaacgcgcaaaaaaagatccattttttattcatacagtttgaaaacttttgaatttttacctagcataagaatctttttatatgggtcaagctttaaaccaccagtgttatagtactacctatagctaagatataggtatacttcaatagtcctaattaaacttaattcggtaaaaatctacatagaaaaggttgtgtgctaccatctacggaatgtggaaaatcatttagatttcgatacaatggagttctcaagctgctaaataaatgaataaatttgttcaacatatttttcctaaaaaaatgatgcatagagatgaagtgctgattaaattaccaaaaagttggattgtggtcatcactttaaatccaaaattcataatgacttgcttaaatatagttaaaaatcgaatgtcagtatataattaattgattttgttggaagcctttcatgttcctaggaataacgttaaacattatttagtagagtgtgaaaatcatcatttcagctctaatctgattcttgggagtagcatgtgcgtgagtccaaatttcttagtggcaagcacatggcatgttcatttgtatacatatccgcaccagaaaatacatataattgcccacaaattcaaactgtatgtaccatcgctagctgatgagctcacctcgttaacatgtcaatctgcatatcaggcaaataatctacgtcgttataagaaacaagaataaatttatattataagtgacagtaatgagtgcagcttggaaggaggacaggcaggccatagagctggacgcatacttcatcaaacatgtattaattgggcgtttagattttgtttaaagtccaaagctgaattcaccacgcacagcaaaatataaagatcccaaatgttagttctgttgagggtgttcaattcttcggttccacattgcagaagcttagagataataaaagtgaagattcaatcttagacatgatcaaccaaggataacacaatgaatatcaataaaaaatgtattattgtacaaatatgcatgtacaggctccggcctagagatgacaaccagggtttcatttaccgccggggccgcggttatcgcgccccggcggtaagcacggttaccgcacggtaaccgcggtaaccgtgacaaaccgcgacaaaccgtacaaaatttatcaaaaattcaaattatttttcaaatttatttgaatttgacgcggttaccgcggtttaccccttaccgtacccccgcggtaagcgcggtaaccgcggtaaccgcgcggtttaccgcggtaaatgcaaccctgatgacaacacacctgcttatgatccattcatgcagcaatatgcagtgatagaaaaatgtaattttcgaccatgaacatatatatttattactaaataactcttctctctgctacatgatgcctcatactgagcctagtgttggaatgtgcacacatatgggcattacttcgaacaagaggaggacatacggagaggcgagattgaattctcattcagtctgctccacctacttgcagttcctcttaattgtttgtggttctaggaaaattagggaaaagggggcaagaagaacatgagacacatggacaaaatataaatcaagcagcattttcttttttttttaaaaaaaagaaaagagagaagaaaagggagaaccttttacagggacaagagcaagaagccgacgtttgaggcaatggatggggtcaatctgttggcaccggattagtgagttgcatactcgcattaacgttcaaccgtagttgttgtacgatacgatgggccttcatccctgcagttgacacccttgtctctgactgccggcgccggcacgacgtacggcatgaatggtccatctggcttatgcttacctttccaaaagagaaaaaaaaaacaaaagagttgagtttattttatgtatcgtcccacgcagaacaaacttattcacaacggggtttcatcaagcaccttgaccttgtacaggaataaataaatgacgaatgaatacaaatgaagttgtcggctgaggaataaagctgcagagttagaccctagaagcttcaatctcctaagatggagaggaggcaaagccatgataaaggaagatgaaaatcatctggctggaggagcagatgttgagacttgaggccaaggtcagaaatctcggcgaatggtggaggccgtggcaacgtgaaacactgtggacaaccacgccaaatctagagatggaagtaacaaatactctctccgtccctaaatatttgacaccgttgatttttttagcacatgtttgaccgttcgtcttattcaataacttttgtgaaatatgtaaaactatatgtatacataaaagtatatttaacaatgaatcaaatgatagaaaaataattaagaattacttcaattttttaaataactagcaaaaatgcccgtgcgttgcaacgggtaaaaagaatccaatgacaatatacacttttcatgcataaccatattaatgataatgtttatatggatcgttgtagttaccacaattagaaaattggatttttccgccccttgtaccatataatggttttttattatatacggacgacggaaacttttttaactttttaagtaaaattagggattagagattagatctgttcccttttgtgattaggaatttagattgtttatttacttttctagaaataaaaagaaaaaaaagagatcgggagatggggaggagatttttttccacctccgattcgcttttgtttttctgttgccgcgtttttcttttcaggatcgctcttttttttaagttagacggacgacaaaaacatcataaattttttaagtagtaacagaaacgaacggtcaaatatattttaataaatcaacggcgtcaaatatttacctcgccaactgccccgaggcttcctccattgtcacggttcaaatcaatagcagccacaaccttccaatttagcgaatgacgagtgaaacgacggccaacaggcaatgtaacagagcgacagagcggccaccggtcgactccaccacaccagcacacgctctcgtgaaaccctaggctcctctcccgcaggccgcagccatgtcacagcactctgttgtctccatgctcatggccacgagtggccttccctgagaccatgccttcacacgacggtggaagagatgacctggccactacttaggggaggatgtgaggcgcatcatggtccggtgttattgctcggtgcgtggggatagcgcggcgcacatccgctcggctggatggggaatcggtgatttcactgtcgcattgttatcacaaagatatctacatccgtttctagccgttggatgaatagatcgaatggctgataaaagagataggaagttttgtgtaggttctcctaggtgcatctagcaaagagaataactcctcctttttatatatattagtaaagatgagtatgtaggtttattagactaacatcataccacttaatatcactggtagacaaa

SEQ ID NO: 9620 - DNA, 14000 bp, Oryza sativa
tcgaccagtctggacagaccgtatgaaattgagatgtaaaatatttttggtcataaaataatagttatttaaattatgtttgcaagactgataaaccacttgttttttcttgtcgacacggtctggacaagccgtataaaattaggatgtaaaatattttttctttaaataattgttatttaatttatgttagcacgaccaaaaaaaccacatgttttttcgttgtcgtctcggtccatactgatcgcatgatcaaatccataacatattttgtcctaaaataatagttgctgtggccaaaaatatttatattgaaaaaataagttttcgatcggtttaattttaaaattaaaaataaaaagttcaaaaaattctcgttatctggccagctaagaaggatagggaaaaaaaagaaatggaaaaaatgcatttgttaggatttgaactacagtcttcaatacggctgaagaagccatgtaccaccaggccatgtccacttcatgttggagttgtccgttcgacttacttattcacattaggtgccattgacaacataaataattttctccaggtatttatatagttggaaatggaataacataacacaatagatgcaaagattataaacgcccattcctttttctcatcatataaacaatatgatatcctggatatttaaaaataagatctaaccaccaattctgtatataactaatgtagaacattattacaggacttatgtatgcaaataaaaagttgaatcgatctggctcaatcacttagacaatccaaggaaatatacgaatgacattttcatccagaaaagctattgtggtgaagaagccttcatcgcagtaaatctccatccaaaattactgccataaaaataaagtgctccccaagtgaagatataaacaatataaggaaatcattgataatggatagatagatagtgaaaaaccttcataacctcacctttaattagttaccatgttatcgacagttgttccttctatatctcttcgaatccatgtctgaccatcatgtgcactgtcaaatagctccccaagattactgacatggtatggttcgcattccacatcattccattcttcgcccagttcaaatacatctctgggtttcatcttccttacaatagaccaccctggatttaaatggtcttcaatgtaaaacacttggtcgacttgatttgcaaatacaaagggctcatgctcaatcttttcaccggtatgaattttatttgagaaattcacaagtgtgcagccaaacttatctattttcactccttttcctttagttacatcgacccattcacatttaaacaacacaactgagaaatttccatagtagtctaactcaattatatcaagtatccttccgtaatacatgatatcaccaaggacagggttagtatcactggcggacgtgtagctcgatgtttttgcagtcacaacaactccactgttttgagtcaccctgtcataacgctttgatctgaacctatacccacgggtattgaatgctctatgtcgttttgctacctcaattggtccacgtgccaaccatctaatatcctcgtcaatactatcgatacctctttgattctccaactgcaagatctacaccaaaccaaaagatgtattagttgtactcatatttgaaaaagagaaacctaaattttgagacttacatgatctctgaaccaatcagggaattgttcattttgcatgttctcaatgttttttggagttagccttttgcgtttcttcctttgtaaatcagcagcatgttctctgcaaaacaaataaacataaatttgaagcaaaacacttacaacacataaaaaaaaaggctatgtgtcgaaacatgaattcggcaataataaaaggggtagcgcacgagacctaaaagtggatggatgcggagacaaaggatttagacaggttcaggccctctcaatgagaggtaataccctactcctgtttggggatttgaatccgccgagtatgtattgatgtgacgatcaggttgtctcatgccccctagagggcctcctgcccaccttatatagggtggggggcaggattacaagatagaaaccttaaccaatacggtatcggtttcctaaatctactttacaatattatcaaaccaggactttaggctgttccgtaatatataaggaaacgtaatacccgagtcatgatctattacatattccatagatataagttatcccctatgactagtcggataaccatgccgtatgggtatggggtacccataatatccacagtagcccctgagaccttcgcagtcgaaaagataattttctctcgaaccagattactccaaagccgagtgcttcaatcatctttgtcatggtctcccgagtacttttaccaaatctgaagactgtggaggctgtggagggctggaaaataaagtcaggtgcaccgactagatgcacctaataggtgtagcccccgacaatgtggttaattgaacaaaccaagcatatagtcaaggaataaataatccaaccaaccgagtggttttgataatcgtaatcaaccaagtgacttgatatcaatatatagcatatgcggtgtgaatcctccaaataacatgatccgagtgatataccaactgctttgtaaaatatgatgagtgatatagcaaaatagctataaagaagcttgtatattgtgaataaagaaatttccaaagtattgggcatacgccatgcgcacactgctttaacagatgtgcttaagtccctagaagacacatggtttcaccacacctggaaatatatggcatatgtggtgtaaaatctgagtaaataaactcataaaggatttaccaaccgcctagaaaatgaccacaatatataatcagcctaagccataatattggtcaataaaaatgcacacttacgtggcgaaaagcaatgatattgtacctaatcaattgcttaaaaacccaaacagcaccttgacttatatataaaaaagtcagcgggacagttatataaagctttactgtttgacaccttttaagatgcattgtaccaactcctaaaaagttaagtaactgcggtataaaaggattttaaggtattgggcacttgatcacgcgcactttggcctaagcaaaaagtgcctaagtccctaaaagaacgtgacaggccacacctgaaaatatgggctgcagacatattaggcctaggccaaaaaatatgccttcgacaccctttaaaggatgacgcatgtgacatgctcccgagtaataaatcttccgagtaatatagaccaagcgtagctcatatgaatagcttctgatctgagtggttatcccttatgggatactccaaaatagatgtaacaattgaatcccgactggcgcaagtattcagttgataacccttacggggaataataaataatccagtctttgagcatataaaatagacccatgatcatgaattcatgttgcatgtatccggagcaagtccaaattgaagatataatacttgtatttgagctaataagcccctgaacacgtagtcacaattgttcattgatggtagctgacgcagttggcatagagacaagacaaccaatatagagagaatattgcccaccagaggtggcaaaaatattggtggtagtgaagatagtgataccaatcaaaagtactgaagtcgcatagccatggaggcgaagaaaccagtcggcggcagtcaggtcagccagcaatgaatatgaaggcgctcagcgataaagttgtgtagttgacgacgacaaacgcaaccgacatgatgaagatgacgatgtcggtgatccagccaatagcagtgtagcaaccaatgataatgacaaagacgctcatcagcatttgcatagtaggtcaaccgtgaaggtgaaataataagtcggcgaaaacataatcatccattagcaacagcagagatgtcagggtcgatgaagcagaggtgctggtgatgatgtcagtgacaataatccatcaaattaatgttataactgttgtagatgcttcacttggaggagagttgatgttgttgcccaactcgtctaaaccgaaatatttgaagttgttgaagtagaatgtctgctccgaagcaaagatgaagataatgactcctggagttgactcgttggttgatgaattaatttcttcagcttgacataaaatttgtcaaattttgagccttgtatttgtgtagcccccgactctttgattagttgggaaacaaatgaacatagagtcgagaattatagcttcttgtcgtcgagtagtcattgcttgattgaagatatgtgttgaagatgtccaagtagaaatccggtagtgaagacgcgcagttgtgaagataaaagcaccagtcggcggcggcataatcagtcggcgacggaagatgatgatgtccatcagtagtggtagctgtataaaccagatgtagaggcgaggacactagtcagcagcagacgagatgaccagcgatgaagatggtaaggccaatcaacactggcagaatcatgcagccatggaagtgaagaaaccagtcggcagccatggcaaacgtaggcagcttgtgttgaagatattgatgcctattagtagtgacagcgatgtagccagccgtgaagaagatagcatcagttggcgttataacaggccagctgtgcaggcggtgacaccagtcagcggcggatgcggcggccggtcggtgaagacgtagacgcccaacaacggcagcataataggccagccgtgcaggcggaaacaccagtcggcggcggtcgaggcggccggtcggtgaagacgtagacgcccaacaacggcggcataaaggccagccgtgcaggcggaagcaccagtcggcggcggacgaggcggccggtcggtgaagacatagacgcccaacaacggcagcataataggccagccgtgcaggcggaagcaccagtcggcggcggacgaggcggccggtcggtgaagacgtagacgcccaacaacggcggcataaaggccagccgtgcaggcggaaacaccagtcggcagcggcgaaggcaagccggtcggtaaagacgtagacgcccaacaacggcggcataaaggccagccgtgcaggcgaggacaccagtcggcggcgacgaaggcaagccggtcggtgaagacgtagacgcccaacaacggcagcataataggccagccgtgcaggcggaaacaccagtcggcggcggcgaaggcaagccggtcggtgaagacgtaggcgcctaacaacggcggcataataggccagccgtgcaggcggaaacaccagtcggcggcggccgaggcgagccggtggtgatgttctgactgatccattcctggagcgtaagagataagcttaaagccatgaatcccttttatgcatatctggatctggatcctgcagaacaaacatataggatgagtagtatctgatataaatataatactcgagaaaaaatcaagtattttaaaatatttataaatatgtatttctcctcttgtcaattttgatttccccgagcagatgactctgtacgtttaaacactctgtccgactagtcatagcccacaagcatcgggagtcggcctaggcatttcccaaacatgcatatgagtgatatgagttcgtcattaatggaacaaagtttcacggatcagaatttactactcgggtacttttgcaattattaagagcagaaaataaatttatctcatctctatgcttttgatttattccgaataatacttagcaccttgcgttactcggtccatccaacgagcccccgggtgctaggaatcggcccaaaggcaaccatccattagcaaaccaaacggaaagcataggaagatagaactccataactcgataggtacttttgtactcagattatgtcgcaagcaatcaagataaatattataaaaaatatgatataacatctgtagcccccgactcactactcaatggaagaccaattggtgtagtgaggcagaggaaaaggaaaaatatcatataaaaaataaaataaatgatgacttagctttgtaatattccccttggagatggcagaagtggccaatgtgggaacaaagtcgtccatcaataacaatgaagacaccagtcggcggcgacgaaggcggtcgacggtgaaagcgaaaatgcccactaatggcggcataataggtcagccgtgcaggcggaggcaccactcggcggcgacggaggcaggccggtggtgaagtcgtagacgcccaacagcggcggcataataggccagccgtgtagacggaggcaccactcggcggcgacggaggcaggccggcggtgaagtcgtagacgcccaacagcggcggcataataggccagccgtgtaggcggaggcaccactcggcggcgacggaggcaggccggcggtgaagtcgtagacgcccaacagcggcggcataataggccagccgtgtaggcggaggcaccactcggcggcgacggaggcaggccggcggtgaagtcgtagacgcccaatcagcggcggcataataggccagccgtgtaggcggaggcaccactcggcggcgacggaggcaggccggcggtgaagtcgtagacgcccaacagcggcggcataataggccagccgtgtaggcggaggcaccaatcggcggcgacggaggcaggccggcggtgaagtcgtagacgcccaacagcggcggcataacaggccagccgtgcagacggaaacacaagtcggcaagagtagtgccgcggcgttacatgcaaaaagcagaaaataccaagagagattaatctgacatttagagatcaatctaataaacaacaataagttgaaaaggaaaaaaacccggtgaagtcggagattaaaaggaaaaaactcgccgagattgatctcttcgactgactccgagacggagcggaggaggcggaggtcgcagtcgcgggcggcgttggtgtccatcagcacgacgcaggacggcaggaaggcatcggcgtggctgcagccgtctcctatgcatccgattagatcggttttggcatgcttcgtgtttgtagatccatcttgcaacaccatggcatcctcgttgggtagattggaccagtaggcttggtggtggacgaggacgaccatcaaatccgtcgaactgtcgttgccccgtcgttgccgtcgtgctgatgcgaacaagatcaggcagagaatagcagcgacgattcgtcttgttgaagtcgtcggcggcgaggaatcaaggagctcccaaagcgaagacgaagccggcgactcataaagttgattccatcgcactcgtcgtcaggaaactcggcgtttacccctacctggcgcgccaactgtcgaaacatgaattcggcaataataaaagggggtagcgcacgagacctaaaagtggatggatgtagagacaaaggatttagacaggttcaggccctctcaatgagaggtaataccctactcctgtttggggatttgaatccgccgggtgtgtattgatctgacgatcaggttgtctcatctgccccctagagggcctcctgcccaccttatataggatggggggtaggattacaagatagaaaccttaaccaatacggtatcggtttcctaaatctactttacaatattatcaaaccaggactttaggccgttccgtaatatacaaggaaacgtaacacccaagtcatgatctgttacatattacataaatataagttatcccctataactagtcggataaccatgccgtatgggtatggggtacccataatatccacactatgttaggacaatacgtacttcagatatggcactacagcatcacagttgtatagcacatatctatgtgcttgcaatttctctctatcagttaaggagtacgccgatggttttcccaatggttttcctactggaggaaacaaagtggattcttgcctactcatgggagtctcaaattgatctggtttgtcattattccttgatggtatgttatgcttggtagggaaaccttccaagtatcgtgaacaaaatgccatgcactcatctgccaaatatgattctgcaattgaaccttctggacgcgctttgttgcgaacatacgacttcaatttacccaggtacctgtaatatacatacaaggcacaaaactaataagttagtattgtatcatatgacatatgagaaatattataaattgtatgctaatatatttttagtacctttcaataaagtacatccatcgatagcaaactggcccagcaatcttacattcagtagctaaatggacgactaagtgaaccataacagtgaagaatccaggaggaaatatcatttccattctgcacaatgtgattttaattgcttcttccaaacggtcaagctcatcaacatggagaacttttgaacatattcctcgaaagtaagcagataagtcaaacaagacagatgtgatttcatcgggaagaatacccctcaaagcaattggcatcaattgttgcattagaacatggcaatcatgtgttttgagcccatgaatttttccttcagcagagttcacacatctagatatgtttgaagaatagccatcaggaacttttatatccctaagaactttacagaacaattgcttctcacttttggacatagtaaagctggcaggtggtaagtagaacttgcttgaagttctttgttgtggatggagctcccctctaatgttcatttccttgagatcaagacgagcttggagattatcctttgactttccttctaaatttagaagtgtaccataaatattatcgcacacatttttttctatgtgcatcacatcaagattatgccgaagaagattccatcccaataaggtagtgtgaataaactacttactgccttataagtttttgacttcttaaaatcaccgatagcatttatttcatccaataccggacgcccatagtaagtcataggctctgtactaatctctgtggttccatcaaaagaatttctatcaaaacgaaattcatgattaggtggcaaaaatcgacgatgacccataaaacaagatttcttcccatgtgccaaacgtttggaccatacatttggaccacaaggcgggcatgcaaattctccatgcaccatatgtgaagcaagcattcctaaagctggcaagtcatttatagtccacagtacagctgccctcaaattaaaagtttcatttctagatgcatcatatgtggaaatgccattgacaaatatgtctcttaaatcttctagaagcggctggaggaaaacatgaatgttatctccaggacttttgggcccaggaattattaatggcattagaagattaggttccttcatgcagagccatggtggaagattatatattactaaaacaactggccagcaactataggtagagctcaacataccatatgggttaaacccatctgtagctaacccaaatcgtatattacgagaatcagatgcaaattgcttgaaccttttatcaaagttcttccatgccggagaatcagctggatgtcgaagcacaccatcctctactaagcgctcttcatcatgccaacgtgggagcgatgctgtttctctacacatgaacaatcttttcagcctctcctttattggaaaatatcgtaagactttgcttggcgttgctttctttctttctttcttcgttaacttggtttctggttttttatctttccatctagaagccttacaagttgaacaaaaatcatcattaaccttctctttccaaaacagctgacagttattgggacatgcatgaatttgttgataatctagaccaaattttgaaaccaccttcttagcctcataaaagttttttggcaattcttttccatttggaattgccatgtgaagaatatcaagtagatctccaaatgatttatcactccatttgttcatggatttcatattgaacaaaagcactagcagagataagtgtgatagttcacttccatcccataaaggcttctctgaatctttcaccaacttataaaatgcttgagcttctaaatttggtccatcagtgtgtgtacatggcgaatctgcagaatcactcataggcatgtcgtcatacacagtcctaagtgcatcattaattaattcgtgcatgttagcacgcatgtcttcattgtgaggctgtggttgttggttcctaatttgctcctctgaagactcaccatgaaaatcccattggtcataactctgaagcattccattgcacaccaaatgatcatagacatcattttttgaaagtagcatagtatgtacgcatgtttcacatggacaataaatcaataaatctttgtatcctctaacttaaatcaataaatctttgtatcctctaacttatctttatatacaaattcaagaaatccatctactccagctaagtactcaacagaacctctagggtagcgcaaaagaatcttgatggtttctaaatccatttcgacctatataaaaaaaattgatatttcaggttcttgtagataataacaatgacaaggaattgtctcttatgatcatgatgtagcaaaaatagggcaattagaaaagtaccagtataaaatcagtgtcagctaattttgtcacaacctaatagacctcctttatacactgaaacaaaagcttttactctgcaaaaatagagaagagctaaatcaatttacagaaaaaacatccagcaatctaatgtcaaagctgtcatctccaagttaaattccttactataaattacctctagttaatctacagatgatgactccagaagcacatgtgtttaaaacctatgttccaaatatccgttcggatgaacaagaaaaatctgcaggtgttattaaactcaatcagatagactcatgatgcaacaaacctgaataataaaaaaaaaagctgacattgacctggatctgacactgacctggatttggggccaaatggggaatcaacctatgagaagtggctaagaaaaggaccgtgcttgccgttgacccgctgtcgtcggcctcggcccgtcgccggcctgccgcggccgatcccctcgcgggctcgccgccgccgctgctgagaacgcgccgctggccgccgatgcgcgctgccgccgccgccgtcggtgtgcgccgtggcagtgatgtgcgagagcgtgagaagaaaatgagatgcagtgtgggaacaggatggggcggcgctctcgtgcgtgttgggtgaggtgagagacacgagaggagaggagagaaggtgggagattaaggttgcctgctaaagtgcacagatcgtattttagttgttataatataaacaactaaagaaatcatttaataagaaatgtgattagctcagttggttcggttgtgcatattctatcctagagacctaggttcgaatcatctgtttgcatctttgcccccctaatttattcctatcaggtatcagcagcctatttttttcccctatcagcagccacttcgcttgtggcatttttttttaaaaaaactcgcttgataaattttttagaaaacaaaaacagcacgcccagtacacaatgtaaaaaaacagctcgctcaattattattattttttaaaaagcatgcttagtccaaaagttttaacaggaaaaaaaaaagcaactcacttcataatttcttttaaaaaacagttcgctagaggtccgaaatgtaaaaataaatatctcgctcgattattttaaaaaatacaataagttcgcttattctaaaagtttttatagggcatcaagaccattgcaacgcatgatatctgttgtaaagtggattcggccgttgcaagatactcaatctctgcaacgcatgttctgcaacacatattatctattgcaaattgggctcacccactactaagcgttgctagggtcgcattttggcaacgcatgcttaatgcgttgccaagcatgtattgctagaggggggttcttgttgtagtgttgcaagaatgaaaaaaacaaagtcggcttgatgcatcggctcattcgagcagctccagttcacaccgaccagattccaaagaataatagaatgaacattttaacaacttgatcaatcgagttcaatcatagaataaacattttaatcggctcgattcaatcaagttcgatctaacataaaagaacaaaatcaacacacaacaacacatagaaagagttgatgaagccacactaagaacacaagaacactaagaacacaacaatagtaagcctgccgctcaccgttgccaatgtcagggagcacgctgctaccaccacctctgggtggggaacccaccgtctccccttccgttggatctggcgtcggggacggcgccaccgctactactcacgggaggagaggttgttgcctccgttgccaccactgggtggggagcccgccgccatccctcttgctggatctggtgaaggggaaggtgccaccaccgccactatgtagggagccccatgcctaccctccaaccagatttagcggtgggagggcgtcaccgctcgcaggtgggaagagagaggcgcgatggagagtgtcgttcacttctcaccttatctgttcgtgaggataaagatgaacagtcggcttggtttgtcttttactggtgctgtttttagaaaaccgacacctacaatatattataggtgttggtttttaattaactgaacttatgataaattaaacgtgttggttttttttaaaaaaacaatgtgcacctataatattggtttcaatttatctctagaaccaacacctatagtcacttaaaggtgccggttgtttattttaggtgccggttgtttatgttttcagcctacgggggtgggaaaagttatgggaaattttgctacagaacactttttatgtatggttttacccataggacattgcccagactcacttttgggggaaaacactccgtaaatatggtaatttgtcaatggacaccgcgccgattaaaataataatttccggttgaagaggatagagaaatcgcgtgaaatgtcaaaaatgcccttgggcccacatgtcagctctatctcctatttctcttctccttctccttctcttttctcttcttctcttcttcagctaccacggcgacgaagcatgcatagagcggcggcggcggctagcggcaagcgtgagccgcggctggtgtcgtgtcccaacacaactctaaaatacatcctctaaattatgcctagaataattaaaaaccgtgtgaaagcctccaacaattaaaatgtgcaaggttaaaagtcaaataaggcttagaggatttttgtatatttcctaaaagcctaaaatacgtaaataaattttagtggaattttcagagcacaaataataattgttaagaaataaacaaagttaaaaagattttataaaaagaaaaaccctaaaaagtcccccttccctcccttgggccggcccggcccatctctccccccctctctctctctcctctccccgcggccaatccggcctctccccgcgcgcgccgctgacgggcgggcccgcccgccaccctcgctgactggtggggcccacccgtcatccccttcctcccgccgctcccgccgcctcccccgtgccctagcgccgccgccgccacgaatcccgccgcctcccgtcgtccccacgtgcaataaagtggggggaattactccccgtgatcccctctccctttccccctatttttccctctctctctctcgttcaaacgggcggatttgcccccgcaaatctcgccggcgccattgatggcggccggacctcccgcgccggtttccttccccgccggcctctctctccctcttccaaccctatttaaacc

SEQ ID NO: 9621 - DNA, 5454 bp, Oryza sativa
atggtgatgtttttctggcctttaattaattacttctcatgttatttgtggatttaaattgaaacaaattattaagacatcaacgagtgcgagcacaaagatgagtacccctgctacggcgtctgcaccaatacggcaggcagctacgcttgctcttgccccaagggatccagtggaaatgccagcgtggagggtggctgccgccgcgacgacaagttcactctagcactcaagacggtcacaggtacctacgaaagattttttttatatattttatatattttttatatacctttccaaaaagtatttttaaatatgaattttgactacgccagcctgtggccaaataactttgtcacgtcacgcacagctggcgcggcagtgctgtcctgccacactagcctcttgccacgctaccatggctggcgtggcaaaacaacgcttcaacgccaaaaggtttagtttttgaaatattttttaagaacggtatattaataaaattaaaaaataaaaagtctaaaaaaataaaaaaattctcctacaaaacgggattcttcaccttaacaacaaataatcttgactttatatcactatgtcactgaaccgaaaatcacctgacactgacgttacagcagaggatccatatctgttgtaccaatatatgatacctctgtcccaaaatattaggacaagatgatattacttgttcggattcgtaatattaggaaatatcaccttctacactagtcgtaataatttgagtttggagaaagcagtgacagataagccagcagcttagtaaaaagctaatccctccgtcttaaaatttttcagatgtattttgtttgattaggacaagactttaaccaataattgcttcattagtatattatttatgtggcacaaacttatgatcataagaaattacttttcactataaatttggtaaattttactacaatacatctaaatcaatctatctatatatctatctattatatactaaaactccatgaaacttcctacaaacgctcctaagccgccatgtgtactcctacaaatactcctaaaccaccacatgacatcttaacaaattggtgggcctaatatttttatctattaaaattttattaaaaaaataaccccacaaacttccctcccctcttctctccccatgggcccatccttcaaccggacgaacaactcaagttcgtacgtacttaggtacggtctccctcccctcctatccaatctcttcttcttttttttctttagttataaaaatttttaaacaataataaatcttaaataaccatattttttctatagttatttgcatgttgtctatcaacaattaaaaaatataaggtgttctttaacctatatgaaatatttaatttttttatcacatcctaaactttgcatatcacgtaaaactgtcatataaaataggtaaaaattgataatgtagattacacgatcatatatcaattgacagaatatacataaacaaattaagttagatctattatataacaaacgtttctaagccaccacgtggcatcctgcaaacgctatgtactacgatgccacgtgtcactataataaattagagaaatttttaaaatttttaagaaaaagaaaacatctagacattaatttttattaaattaggtagacccattatttaccactattatatttatctttaaaagaactccttaacctccaaaccggatccaaattggacctgtacgtagcgtacgttttcttaaggatagtacgtacgtacgttagtaacgtacttccaccccttcttccctcaatttcttcatatttttgcacatatttcttcccctattatcatatactttattagttagaaaatatattttgtgttaaacaattcaacaactataacatctaaatcatacaactaacttttaattcgcttatatcttaaaattattttatgactaaatctacaggcaaataccaaatttccacaataattcaactttgagaaagaaaatgacactttggattatatttccagacttttgcgtaccgttgaagcaattacaaaaaaaatgaaataataatattgtagactctatcattgtgcataacttcataagaattaaattatatctacaatcataaaatctaaaataaaaatagctatgagtaatgttcccaaaatatataagttagaaagcaagagttacacgaaaaaaataagcagctataacatctcaatcatgggatcccctaaatcatacgagtaatatttttcttatgtattttgattattttacatttaaaaacccatatttgaggttatattatctgacttttatatgcaattcaaacaattataaaattgtgaatagtaacgatatatattttatcattgtatatgtcagggttacgggtcagacataccctctacccttcgatatacgttacatatcgacatggcatacccacgcgcacgcggatgttttctacatatcctaaggaaacctttgacgaaatctacagatgggaagagtccttctcggacagaactgggtcgtcgacgtatcgtattgggtctgatatctctgagtcctacttgaaaacctccagatctatgatataaaagggaccccccggggagggcatggatcatcgaatctcagagccaacacaacccacacagcctacaaagccgaagtctgcgaggagccaagtcgtcgagagctagtcgaatccactcgactacaatctcgccggatccgacaagttccatcgttccctttgtaacctgtgttttccaccatataatcccatatcaactggattagggctattacctaccaagggacctaaaccagtataattcttttcttttgattgttcgatgtcgtactacgtagatccttgtaccaacgtaccccaataccctctatatccggtctacgggtatcacccgtcgacagtatataagttcacaataattcaattagacctgtaatgacaaaaagtaaaataaacctaataacactatgtattgttaaaaaaatttactcctcccattctgatattataataaataaaaataacattagtagatttttagtgttcacattttcaatattgtatactatgtaggaaaagacgagtagaaaagatagatcttaatcaatcaataaaatttttattctatttttagttaataaagtaatagtaagtaaaacacaataaatgtaaaaaaataattatatgtgcacgtactttgtcccattcgactttctcttcttctcctatctcactcaactcctttttcttataatttttaactaattaacaaaataataaaaaatgatcaataattacaaagctaaataattatgattcttatgtcatatctgtttttagtttatttgaactgttattttgtttataattaaataaataattcaagatgcatattactcatatttcacttcgtaaaaatgaaaatataccatttaagcatacacacctatcctttgcatggtaaccaaatagaaaaaaaatagagcattataaaaaaatgacaataagtattacatcacctcaaatcattatacatcctctgtagcgcatgtagcgcatttacagtggtacgtaacttacgtgctacatcttaattaaaagtaagaccttagaaattgtaagaaaagacatttgaccatcaattttcacttaataggtggatccattattttaaccaatagatataatattagagaaaatcttaagctgccatgtgttacgtcttaaaatttagacgcaaaggatatgaaaaattttgacaaaaaaaagcggatcatcaattttcacttaaatcattagaaaaaaagcccccccccacttcgccctccctcacatgtgcacaacacaacactacccgtgtcccctcctcccctcctgtctcagcttgagttctccactctctcctttacccctcctttctatagtgagaaataatcaataatattaaacatgcaaattttttagctgtacatctgatttctaatctaactattgctctattcataattaaatcaacaatttaaaggttcataacctctatagtttgaactggtataaaataaaatttaaaatataaaatatcaatagggactaaattgaactatttggagaaaatcaaataagttcgcacctttcactaaaattagacaacccattacatgttccatttttataatattttttaaatgcttacatgttaatggccttgcatctatcctatactatagtattatgagtttgtcagcctattaagccacactatggtagcagtatagatatagttagttgaaaagatatatttattactattaaatttaatttttcgaactcatgttaactatattttattttagaaaagatactataggtcaaacgtattactacgatatgtctttgttaacttatatgtaaatatgtaacaacttgcatgaatctaaaccaactaaggctatgttcgggagtgagggtgtcgcgaccgggaaaattgccttttcccgaacgctagtgtattaatccccgtcccaggaaaagccggggtacaccacacaaacatgatataaaagacacatctttgctatatcgacaatatttacattattacaaaggcgcttcaggcctgacaatcaaaaataaacagcagcggactagcgggcctacggctccatcttcacaggcgctcaactggggtataagccaggactccacctaagacatcttctccaaagcttctcttactgaaggggggagaaagatagagcaagaatgagtacaaccacagtactcagcaagccacaccggagatgcacaattaatgcaagggagtacaaggggataataatataggggttacgttttgcagtaaacagcatttaaaagtcacttagttgcccaaagccattttgtaaagacgattctagagctacacagtattattaaacaaggctgtgaaccctcacgaacctgccttaacccaaggcctacgatgatttggaccgaactggcaacccgacctgggtcccagctcgtcccaagccaacccaggccaaccattccatgttttagttgttgagcaaattttaagaattaaaacactgacttgggtacattgctaggcttgcccatatccgagggctcggctattcgaatagatttactctgatcagaggtgtacatctttacccacaagacacatcttcctcacgtgttaccacgcgccacataccaccacggtatacagacggaagacgtgacatagtttccaacccatcctagccataaacaagagtaccgacccaatcctgcctacggccgggatacccgggacaggcaggcagaactgagcccctagcattgggcaccaacccttcgccg

SEQ ID NO: 9622 - DNA, 9458 bp, Oryza sativa
  unsure (1)..(9458): unsure at all n locations
tttatgttctacctctgtttcaaaatgaagatgttttgttttttttaagtaaaacttcttcaagtttgctcaagtttatagaaaaatgtagtgacatattcaacaccaaaggagtacttcccctctgcaattcctgatgaccactattaaaaatatttttataatacgtttgtttagcattaaaaatattgctatggcctatggtttctataaacttagccaaaaagaagtttaacttagaacaacactaaaagaatctatattttgaaacccgggagtaaaaaggtagccttgtttgaatttcttttagcaaactattcccttcaaattcatgtgatttttttgtgacgttaggcgatattgttatacccttcaatttcatgtgattttttttgtgacgtttgacaatactgttatcttatatagatcaaggttatcaataatggccactcatgtattagagtggctgatcagctttcgttttcgatgtgtcaatagctttggcacatgatgctccggttgcatggctttttgctttagcatgcaacggctggctactatttgctatggataaatttatggtcggctatgcttattttgagaaaggggtgtcaccactcaccactattaggtgttctcttgtatctttgacagagtgcacattattaaaacacaggttgattaattatagaacatttgaaacttaaatctgaaagaaagaaaatctttttatttactactaagtgaaaccttcttttaatataatttgaaaattacacacaactagatcctttctattaagaaaaaccatttttgtttatgcacaaaattaactctgtttttcccagacaaaaatgaattttgtttgctattagggggcactacaagtaaatgcaaactcatttctatgagatagccttctgtaaaactaaaattcaatacaaattttacaagtattgtaaatttaccgctaatatccgacttccaagggctcctttgaatcgcatgtgaaaaaacggaattatatgaaaacataggattttgacatgaaagcaaatgcaaaatacaagattacacctaggaatcagatgattgaaacttacggctccatcatttcgcttattattgaatatttgcaaacgaaaaataatttgtgaatagaacttttatatatgtgttcttagcgacctaaagcaaaggatgaaaataaacttcactgaaaaactccaaaaacaactccaaatttaagcttgataatttaaatttcgactgataagcataattataagcgaaaatataagaccgttagaaggaaatttttcaagatgttacaactctgactaacttcctttcaaaatctctacatgaatgttccttctataagaattccagagaaaatgagagtgctgtagaattaaaatcctcctatagtataaataaagctactttatgtgcttatatttttttttctaaaagtaaatattaaagaaaatgtcttttgtggccctccaaccccaatgatgcccattgcgagggttttttttttttatatataaataagcgacccaaccattccccgggagtcaaggtggaagagacggacagaggccactacccgtgcaccacgccccctctcccacaatctcgcaaaaaagttgattttctttttcagcttcctcctcccctcctccgcttctcatcaatccactagcatatcagatcagattcctgtacacttccctttcctcgcatccaatcccgactatcaaatcatcaccatccttttgcaaaaccaaaaaaaaaaaagtagataaaagaagaaggttcttgcatccaagagaggaggacactgtccgtcgtgcagcgtttcttgcttggttgaatcgggtggttttgggggggatggcggggaaggtggagaagatggcgtcgatcgacgcgcagctgcggatgctggcgccggcgaagctgtcggaggacgacaagctggtggagtacgacgccctcctcctcgaccgcttcctcgacatcctccaggacctccacggcgacgacctccgcgagctggtatgctggtgctactctctctattcgatccccaatgactgattaaatctttttcatcatctgctactcctactctgctacctgcatgttcatgctccagatcagcagataatgcttgcttgtttgcttgctgcctgcgtgtgcgcgcttgtgaatatcttctttttttttaatggagtgatttggttgcttgtggactgattgactgactcactcactgaatgattggattagcttttgtgagtgggattgtggggattctgtgcttcagcataattggaacatggagagtgcccatgtttttgggggtgctttctgctttttctttattttaatttgggggtaaaaaaccaaaatattccaacagtttcttcctttattttttagtttgtcggttgacaagttggtgcttccagtgagggtactgagtggagttttcgttctggggcctgcccctttcttcttcttcttttttagagtattcggattatgtttctgggttaaaatatgtgtttgaattattgtgttcgtataatggaaattcagaaaaaaaactggcatcttttgcatttggagctgttttccaggggtgtatgtactgaaatctgaatatttactgtttgagtcaaatctgagctgaactttaattatctatcctgaattcctgattgattaacaactgccactttgtataaacaacagtttcatagacatccatcgtaactgaacacttcatttttatcaaattttaagcagaggaagtcaaagacatgggtgtcaaatgtttgtgttttttatttttgttgtttcgtcaaactgaatgtgacatgtactcattagttggatctttaggatatcaggaaatgacaactgtatattaaaagttttatattgacaaaccaacatgaattctttggtattgctagagccttgcttaagtacttactcctgtgcaaaaattttgaggtttagtgccctagtgtgctcaggtttggtgcttttgtatttgaagtcttcatttgcagacgtggctgcaattttttatagaagggtaaattgtgaatgaaatctgagttgatctttaattgtatattctgtatatctatcaaccactttaatgattacaacaaaaattccagctttacatgaacatgccatgaacttccgttgaaagtgaataacttggctttgtcagttccccgtgtggccaatgttcatgcacgagactaatattgaatacaatttgttttgtcaaaataaactgatacctttgttgcagacccttccatggatgtatgacaaggaattttttttttactttgatgtatagtcaattagtttgatttttttttgttctgaattgattggaaaataatgcctgtatttacaattttatatcaacggaaaaaccatggattgctaatttgttattgatatgtgtaggtccaagaatgctatgagatcgctgctgagtatgaagggaagcatgactcccaaaagctcgatgaacttggcaacatgttgacaagcttggatcctggtgactccattgtgatggccaaagctttctcccacatgcttaatttggctaacttggccgaggaggtccagattgcatacaggaggagaatcaagctcaagaagggtgactttgctgatgagaactcggcactgacagaatctgacattgaagaaacttttaagaggcttgttgttgacctgaagaaatcaccagcagaggtctttgatgcccttaagagtcagactgttgacctggttttgactgcacatccaacacagtcagtgaggaggtcactgcttcaaaaacactcaaggtgagttacagaaacaatactatgatatcaaacatcctatggtttcttatcatctaattgtgaaatttcaaatataatttaggataaggaattgtttggttcaactatactcaaaggatatcacaccagatgataaacaggagcttgatgaggctctccagagggaggtaagataatcaagttaatcactgactcatttatagtcttgattttttttttcaaattgtatgtgccttttcgattatttatagaaattataaattactttcagcatgatgctcaacatgccagattttgtgctccaactaaatttattaatgcattaataaggtgaatcagaacatgttcttatttttcagattcaagcagcctttagaactgatgagatccgaagaacccagccaactcctcaagatgaaatgagggctggtatgagttactttcatgagacaatctggaaaggtgttccgaagttcttacgccgtctggacactgccttgaagaacatcggaattgatgagcgtgttccttataatgcacctctcattcagttctcttcttggatgggaggagaccgtgatggtatgcaaaggatggcttttgacttctgtatagttcagttcttgtgcatttaataattttgtgcattgcaccaatttaggaaatccaagagtgacaccagaagtcacaagggatgtatgcttgcttgctagaatgatggcttcaaatttatactgctcgcaaattgaggatctcatgtttgaggtaagaattacttcatcccttatcttccacacatataaatcaattttattaaattctccaaattctggcagctgtctatgtggcgatgcaatgatgagcttcgggcacgagcagatgagctgcatctctcctcaaagaaagatgcaaagcactatataggtaaatatcgactacccattttaatagtgatggctatctgttatgattgacaatgttggcataatatcgtttccttgttcgtcttagaattctggaagaaggttccgcccagtgagccataccgagttgttctaggtgatgtgagagacaagctgtacaacacacgtgaacgagcacgccagttattatccagcggatattctgacattcctgaagaaaccactctcaccagtgttgaacaggtaaagtattgatcaaagaaccattggatgcttgtaactctgaaatgggcattctttcttcatcacctttgttcttaagtctaaacaactgtcttaccttgcagttcttagagcctctggagctatgttacaggtcactctgcgattgcggtgaccgtgtaattgctgatgggacccttctggacttcttgcgccaggtgtctacctttgggctgtgccttgtgaggcttgacattaggcaagaatctgacaggcacaccgatgtcctcgatgccatcaccacatacctgggaataggatcataccgtgagtggtccgaggaacgccgtcaggactggctcttgtctgaactcaatgggaagcgcccattgtttggcccagaccttcccaagaccgatgagattgctgacgttctagacacgttccgcgtgatagctgagcttcccgctgacaattttggggcctatatcatttccatggcgacagctccgtcagacgtgcttgctgttgagctcctccaacgtgaatgccatgtgaagacaccacttagagttgtcccactgtttgagaagttggctgatcttgaatctgccccagcagcagtggccagactgttctccatagattggtacagagaaaggataaatnnnnnnnnnnnnnnnnnnnnnnnnnnnnnnnnnnngggtaaggacgccggtcgtctctcggcagcttggcagctgtacaagtctcaggaggagctcatcaacgttgccaaggagtttggggtgaagttgacaatgttccatgggcgcggtgggactgtcggaagaggcggaggtcccactcatcttgccatcttgtctcagccaccagacacaatccatggatctctccgggtcactgtccagggtgaagtcattgagcagtcctttggtgaggagcacctttgcttcaggacactgcagcgtttcacggctgccactctggagcatggcatgcatccaccaattgcgccgaaaccagaatggcgtgctctgcttgatgagatggctgtggtggctacaaaggaataccggtccatcgtcttccaggaaccacgctttgtcgagtatttccgccttgtgagtgttttgtttcttcataatcatcagacttggaacatttcatataatgcatttaaggcacttagctaaacattgttcatttcaggcaaaacctttgtaaattaattttctttacatttttcatgaaatcaggcaacaccagagatggagtatggaaggatgaatataggaagcaggccatccaagagaaagccgagtggtggcatcgagtcactccgtgccatcccatggatcttcgcgtggacgcaaactcgcttccaccttcctgtctggcttggcttcggttctgccttcaagcacatcctggagaaggacatcaggaacctccacatgctccaggagatgtacaatgagtggccgttcttcagagtcacgatcgatctggttgagatggttttcgccaagggtgaccctggcatcgccgcattgtacgacaagctccttgtctccgaggagctatggcctctgggagagaaactgagggccaactgtgaagaaaccaaacagcttctccttcaggtgcgtcgactgaccttgctagagctgattacactttggaaaccaatgatgcaacatctatgagatactgaaatgttccattgtcattcactcaatgaaattctttggccacttttgaccttcaggttgctggacacaaggatcttctcgaaggtgatctctacctgaagcagcgccttcgcctccgcaatgcctacatcaccaccctgaatgtctgccaggcttacacgatgaagcgaatccgcgacccggactaccatgtcacgctgcgcccccacatgtccaaggagatcatggactggtctaagccggctgcggagctggtgaagctgaacccgaccagtgagtatgcgccggggctggaggacaccctcatcctgaccatgaagggaattgctgctggaatgcagaacaccggctaagcgaactatcaactatgaagtgcctgaattcacaccgttttatatggactcttatcttgatttcggtcatttgctctcggccatttaattttgccgatgcagaggctcgtgcagtttctaatttctttcggaagatattttcaataatggagttgtacaagaacatcaattaatcaaaataaagtggatattatgttcattatcgtttagagcaacctggtaaagccatttttttgtgtagaccacatagtgagtgtgttgaaattccatttgcttaatgaaactgccattatctaagtaaagtcaaagggctcctttatattgaaagaaattcaaaagaattttgaaggattacaaacctactccctccgtcccataatacaagggattatggagggatatgtgatacatccctccaaaatattatgggacttcttgttcaaattcataatattagaatgtgtcacatctatctactatatactaaaagtccattaaacttcctagaaacgctatcaggtcgccacgtggcattcctacaaatactcttaagacgccacatggcactgtttaatctcaccgtcgattttcacttaaatttgtggacccattattttacatcattagattagatctattattaaaaataataataaatttctcctatacttatatcatacacatagtataactgttctacgtgcgtacgattgaaagcaattacctactgttcacaaaaagaatcatacaaagttagataaaaaaagacagtcaaaatacatgcatccataaaaatcgatggtcaacagacatacgtaggtgagagagaggacaggaagaaattatttattcaatctaatctaataggttaaaacactaaacccatcgatttaaatgaaaatcgagggctatgtttgtttaaaaactatctatctatctattatatgctaaaagtccattaacctttatacaaacacttttaaatcatcatatgtcacttctataaacactcctaagacgtcacgtggcgttctaataaatcaaagaaaatcataagaattctaataaaaacaaaatctaaccattgattttcctttcaataaggtggacccatcatgcattctctaccattagattcatcttaataaaaaaataagacacggaaaagacccatgtttttctaaggtggactcggacggtccatcatgctataccgtgcgtccggttacgagccggtttggccgcggcggcaagtttatcgctaattaatttatctctgtatatacgtagcacaagctaagattaattagctcccatattatgttactactaactcatagctatatttattatatatacgacaatatatataaatggaagctaggagattaacactaagattatacatatatagctaattaaattagttatacatgatttgtgaaaggagattaacggcaatataacatagctaattaaatcagtttgcatggtttgcggcaacattacatagctaattcgaaccaatgcatttggcagtctctagataaattgtccagcttaaatcgttgtatctaagatctgatctgttttaagtcatcgtgatgtctttaaaatttaaaaaagattttttaaaaaacaaaatgcatgataatcggttttaacttaaattgtttagaaaattagaaaaacaaagtcccctccacctcaccctcaccatcacatacgcacaacacttttcgccccatccatttttggcttgggttctccactctccacttctctctgtatcttttggagtagcaatgataaaaagagaaacaaccaataatatcgaaacatccacagttatattaagctacatgtcgcatatctattctaattgttgatctatacataattaaactaacaaattaagattcataataacttgtataaaatagaaaaaaattatcaatagaggctaaattgagccaattgtagaacatctaacaaattcgtaaagaaatagtttttaattttcacttaaactgaaacaaccgttgccatatcaattaaattggccttccctctatctatgatgccatggcattatgagttccttcacgtattattatatatgtaattcacactaaaatagcaatatttgttagtattagaataaaaatttaactcatattgactaggtatatttaaaaagctctataggacacacgtatcatagggaagcgaggtctagattatgtatatctccttcgcatttattgatcatgtagagtatgtgtaacaaattacatcaatatgaacaaattagagagagggttagcttgatagtaaaaataa

SEQ ID NO: 9623 - DNA, 17972 bp, Oryza sativa
agaaagaaaggggggaaaagaggacttcttttagggttttttctttttataaaccttttcaactttgtttatttcttctcaattattatttgtgctctgaaaattccactaaaatttatttacgcattttaggcttttaggaaatatacaaaaatcctccaagccttatttgacttttatctttgcacattttaattgttggaggctttcacatgaattttaattattctttgcacaatttcgaggatgtattttagagtcgatttgggacgtgacaaacctaccccccttaaacggaatctcgaccccgagattcggaagaactggcgaagagaccgggatgggctgccttcagctcgtcttcacgctcccaagtagcttcttcttcggcgtgattactccactggaccttgcaaaaacggattacccggttcctggtcctgcgctccatgatgtccaggattttcactggcctctccacgtaggtcaaatcttcacgaacttcaatttgctctgagtcggcctgctcggatggcactcgaaggcatttcttgagttgcgacacatggaacacatcatgcacgttgcccaaggaggcgggtagctccaactggtaagcgacttctccgcgtcgagcaacgatacggaaaggacccacataccgaggtgcaagcttccctttcgtctgaaacctgtgtacacctcgcaatggcgtgactcgaagatacacaaaatcatccactgcgaattccaggtcacggcgacggttatctgcataacttttctgccgggactgtgccacctttagattatcccgaatgattctgactttagcttcagcttctctcaggatatcagtcccgaacacttgactttctccaacttggtcccacaatagcggtgtccgacatttgcgcccatacaacgcttcatatggtgccatttgtatgctggcttgatagctgttattgtaggagaactcggcataggggagactcttatcccaggtcttcccgaaatctagtacacatgcgcgaagcatatcttctaggatctgatttagacgctcggtctgtccatctgtctgcgggtgataggcggtgctgaaatttaatcgggtacccaactcttcttggagcttcttccaaaagtgagaggtgaattggcttccccgatcagatacgattttcttgggaacgccatggagactcacgatcctggcgaagtagagttcagctagcttgttccctccataggtggtcttcacaggaataaatcgagctaccttggttaatcgatccacaactacccatattgtcgcgaccgggaaaattgccttttcccgaacgctagtgtattaatccccgtcccaggaaaagccggggtacaccatacaaacatgatataaaagacacatctttattatatcgataatatttacattattacaaaggcacttaaggcctgacaatcaaaaataaacagcagcggactagcgggtctacggctccatcttcacaggcgctcaactggggtataagccaggactccacctaagacatcttctccaaagcttctcttactgaagaggggaaggattgagcaagaatgagtacaaccacagtactcagcaagccacaccggcagatgcatgattaatgcaagggggggtacaaggggataataataggggttaggttttgcagtaaacagcatttaaaagtcactttgttgcccaaagttattttataaagacgatcctagagctacacaatattattaaacaaggccgtgaaccctcacgaacctgccttaacccaaggcctacgatgattcggaccgaactggcaacccgacctgggttccagctcgtcccaagccaacccaggccaaccattccatattttagttgttgagcaaattttaagaattaaaacactgacttgggtacattgctcggcttgcccatatccgagggctcggctattcgaatagatttactctgatcagaggtgtacatctttacccacaagacacatctttactccgcattccatggccttggaacccgtcgtaaagatgtgacataacccttcacccatcctagccgtgaacaaaagtaccgacccaaccctgcctacggccggtatcccgggacaggcaggccagggttgagcccctagcaacaagatctagaccgggtgcgccacacacataggggtgagaccacccgcgtactagtccagtgccatggcatctcgactaacgggcaccgacccgtgtagtcttcatttgcctagacatctcgattaccgagccgcagctcgcgtagccttcatttgcctcagagatatccatcgtcgcaacgacttcatccatctctatccgtgtccttttgttcaggactagactgagcaccgagttaagccttacccattagacatgtggttagtacggtagtgctttgcaacagaggcccgagcttaatccttatagtggccggggtgctacttcccataactggcatgcacccaaaccccaccgaaaacaggttttaggggttttgaaagaggaagagaggtgtatgtccaattccaccataatccaacaattccatagtgtccaaatgatatgagaattcccaaagtctaaagttataaaaccacctaatgttgcctaattaatcagcgaagcatctacctaaattcatactagtggaaccaggaatagagtacccactagttggggttttgtttattctagggtgaacaaggtaataataacaatagcaataataatgtcataacaaaggtaaataggcagggctaaataaaacagtgataacgcgggaatttaaataaagcggtaatgcattaatttaaatcaaaataattttataaactgggattcaatatgctcaaggatgatgtgacttgccttgctcgctttcccaaacgccggcttcaacttccgcgaagagcggatcttccgaagctgcagcgtctacacgaccaacggaaaagaaaaggcttttactctaataaactccatacaacaagcaggaacaaagcacaaaaataggttcttgacttcttaaggaaaaattagagacttgaacggtccaattccgagttcaaatggccaagatatggccatttgaaatttatatgctctttaaatggatatttacgaatttcttcatttaaattttaattaaaaacccatttattgcgtcagccgagagagagggcgcgcggaccgggtccacgggagtggggcccacgcgccagcccctcggtccacggtggaccgggagcacgcggctggcggcggccggcgccgtgggtcccacgcgtcagccgcacccgcgggcgcgggcggctgacggctgggcccacttggcagccgcgagggcgcgcccgaaggcggcctcgccggcacggccgacgggagggggacgcgcccgcgccccgatggtcaccgccggcgaccaccggcgcggcggagcggcgcccgagagagcggagaggagagggaagcgaaagggacggtccacggctcaccccgagacacgaggacggcggagacgacgaacggagcggaggaacgcggcggcgcggttcgggacggcgagggcgacggtgctccggcggtcggcgggcgaaacgaaggagcggacgaggtcgacgacgacgcggcgaagccgatggaggtgacgccgagtggggaggaagtccggagcgacggcggcggcgaaccggagctcggcggcgacggcggagagagaggaagacggcgcgagcacgaatccgacggcgagagcgagcggcgagcggcggaaacggaagagcgaagcgcgggggacgattatatagcgccgggagggggagagcgcggccggagagggaggaaacgggcgcggggatctcggccgccattgaagacgccggcgacgattgcgggattcaaatcggacgaatccgagggagagagagagggaaaagagggggaaacgggagagggaatcacgggggtgatttccccctctttattgcgcgcggggacggcgggaaacggcgagattcgcggcggcggcggcgctagggcacgggcgggcggcgggcgcggcgcgaggtcggggatgacaggtgggccccacccgtcagcgagggtggcgggcgggcccgcctgtcagcggcgcgcgcgcgggggaggccgatgggccgcgggggagaggagagagagggagggagagaagtgggccgagccggcccaagaagggaaagggggggaaagaagacttttagggatttttctttttataaatcctttttaactttgtttatttcttaacaattattatttgtgctctgaaaattccactaaaatttgagggctccttttagaccaaggagaatttaacaaaaattctccgggccacatttgaatttttcttgtacgtattttagggtttgccaatttcttttcgaattttaattaattctattattccttttagaaaatgatttttatttcgggatgaatttatcaggacgtgacacatatagaatcatatccaccttgggtctttggaagtccggtgatgaaatccatcccaatttcatcccatttccattcaggtacttggagaggttggagaagtccggccggtcgttggtgttctgccttgacacgctggcacacatcacatagggccacatactctgcaatttcccgcttcatgctaacccaccagtatttctcccttaagtctaagtacatctttgtactgcccgggtgaatggaataaggactttcgtgagcttcctgaagtatcagctgtttaagttctctgttatctggaacgcatacccgctttccgttccatagggttccgtgttcatcctctgtgaaaccagcggccttaccctgtttcatattcttgaggagtccatgcatgtccggatcattcttctgagcctcgcggatttgatcgagcaaggtgggcttggcttccaatgcagctaagaatccacgacccactatgcttagattcagggcttccatctgttggttaagttcgggtggaatgcctcggacgttaagagtgttgcaatggccctttcgacttagagcgtcggcaaccacgttggccttaccaggatgatagtgaattcccacatcataatccttgatgagttctaaccatctcctttgccgaagattcaggtccgactgagtgaagatgtatttcagactcttatggtcggtatagatttcacagcgattcccaatgagatagtgccgccagatttttagagcatgaactactgcggctaactccaaatcatgtgtagggtagttgccttcatgaggacgtagctggcgtgaggcataggctaccacataaccgtcctgcatgagcacgcaccccaatccttggcgcgaagcatcacaatacaccatgaagtccttgcgagtatccggcaagattaacaccggcgaggaaaccagcttttccttgagagtttgaaacgccttctcgcattgcgggctccacacaaatttctcttctttcttcaacaactgtgtcatgggtcgagcgattttggagaagttctcgatgaatctccgatagtatcctgccaaacctaagaaactgcggacttgagtaactgtcttgggttgcttccaatcggtgacggcggtcactgtttcgggatccacagcaactcctttagcagatatcacgtgccctaagaatttgacttcggacaaccagaactcacacttgctaagcttggcatacaattgatgttcccgcaactttcccaacaccagacggagatggtgttgatggtcttcctctgattgtgagtatatcagaatgtcatcaatgaaaaccacaacaaacttatccaagtattccatgaacactttgttcatcaagttcatgaagaaggcaggcgcattggtcaaaccgaacgacatcaccgtgaattcatacagcctgtatcgcgtggtgaatgcggtctttggaatatcttcttcacgaatacgtagttggtgatatccggaacggagatcaatcttggagaatacagtggcacctttgagttggtcgaacagatcatcgatccggggaagagggtacttgttcttgatggtgacttcattgagagctctgtagtcgacgcacatcctcttcgtcttgtctttcttctctacaaaaatcacaggagcaccccatggggaagtactcggacgtatataccccttttctttcaattcttccaactgtttctttacttcggctagttcatttgctgccatacggtagggtcgcttgtgcagaggagtggttcctggagcaagatctattcggaactcaatctctcgcttgggcggcataccaggtagttcttccggaaacacgtctccgaactctctgacgatggggatttctgacagttctatctgatgaagttctgaacttctgacagaggttgggggtgcaaagaaaacaaccggttgttctggccctcggtacagagtgacagtgcgtcttgcgcaatccactactccttggaattgagccaaccaattcatcccaagaatcacatccaagttcttggtgtctagcagaatcagatccgagggaaaaggaatcccctgaatttctatagggacggcaggactataatactttgctgtcataacccctccaggggtggtgatgagcagagggttcctaagcctttctacccccaactgatttctccccacgaatggcacagatataaacgagtgggaagctccagagtcgaacaaaattgtagcagggatggaatgaacgaggaacgtaccaacgatgacgtccggagttgtcagcacgtcctcggccgtcacgtgattcacacgaccccgaatgacatccttcccgccgttgttggagcggggaggcgcttggccttgctgacgccttggctttgggcatttatccgcaaagtgcccgggctcgaagcagttgaagcacagacgctgcggacctgaagcgtccctgcggccttgaccaggctgcaccgttggcgtaagaggacggggcgcacgagtcccttgctgattctgctgctgctgcggctgtgggacgcgcaccacgaattgaggtcgaggcgcggagcgaggttgctgctgctgttgttgctgctgcgaggaggatccccctggatagggattggtgtagcgaaccctctggttagcaccctgttgattgcggaaattcgccaagcggcgcttgtgcgattccagctccttgtgcttggcttccaagcggatgctcttgtccaccaatcgttgaaaatccggatagtccccagagactaggcggacggacagctcggggtccattcctgccaggaacttctcttgcttctcctcatcttcccgcacatcctctggggcgtaacgggccaagttgttgaactcgtgcaaatactccatcacggagcggttgccttgcttcaactctcggaattcccttttcttaagagccacgactccagcgggcacatgggttctccggaaagcggcggtgaagcgagcccaagtaataggttgctcccctggctgcgtagcctggaaatggtcccaccatagagatgcgggtccccgcagctggtgggcggcgaagacgactttctcctcatcgctgcactgcaccgtgtctaacttcttccccacggcatgcaaccaatccaaagcatccacggggttgttggagctggagaaggtaggtgggcggatgcggaggaactcggcgagtttagagtgttggggaggtggtggtggagcattctgttgtggcggattttggaggtggtggaggaaagcggtcatcatgttggcttgctgggcgaggatttgggtgagaatggcattggtgtctggtggtggtggtggaggcggaggaggaggtggaggtggattgccttggtggttgtggttgctgccttcaggttgattgccatcaccggtagcagcgtttctcctggtcgtcaccatctgaaaaccccacacagaaccagcaaacagagaaggagctaacaattaaaactaaccacccacgactaccattattcttacatttattactgctattaaattggttcattaatgttcaagttgcttaggcgaataaaataagacaggctccgacatagttatgccacacaccggcataaccatgtcccacacgactcaacaagaagacaaacgagaaaaacacacgcgcaagcctactaactgctcgtctactgctgcgacgggccaggacggaaggtgagcaacagcgcaccctccgtgctaccaacgccggaaggcttccccctcctggggaaccacgggcgcaggctcggcacgaggggtctcgacgaagcaagtccacgccagggactgacgaacaagctcgggcctggaggtgctcttgcgggcggtgatcttctggctgcgtgtaacgtcccgccttcccccaggccgggcccgcttacatctgatagctttcacaggtcatagactgccctcacagaccaacacatgtcttttctgcacactttgtcctcactcgtgtgcaccgggaagaatttcccggtcggtcacccatcccaaattgctccaggccaagcatgcttaaccttggagttctttggagattggcttccggaaaagaagttgcaacttgttgatatgaatattctattaatcctattaagccctagaccgggatgttacaccctcacccccttaagagagatcgacgcccccgtcgatcaaccctaggccaggaacgtcctctcttggccacgtccatgtgtccagtgccagcgcatgtgccatgctgtgtaaccactcccggtctacaccagccatgcgcaccatgcctgcgcaactgcgacacatgcgcccgtgaaaccgcgagagtcggctctgataccattttgtaacgtcccgccttcccccaggccgggcccgcttacatctgatagctttcacaggtcatagactgccctcacagaccaacacatgtcttttctgcacactttgtcctcactcgtgtgcaccgggaagaatttcccggtcggtcacccatcccaaattgctccaggccaagcatgcttaaccttggagttctttggagattggcttccggaaaagaagttgcaacttgttgatatgaatattctattaatcctattaagccctagaccgggatgttacaccacgcttgtcgcgaccgggaaaattgccttttcccgaacgctagtgtattaatccccgtcccaggaaaagccggggtacaccacacaaacatgatataaaagacacatttttattatatcgataatatttacattattacaaaggcacttaaggcctgacaatcaaaaataaacagcaacggactagcgggcctacggctccatcttcacaggcgctcaactggggtataagccaggactccacctaagacatcttctccaacgcttctcttactgaagaggggaaagattgagcaagaatgagtacaaccacagtactcagcaagccacaccggcagatgcatgattaatgcaagggggtacaaggggtaataatataggggttaagttttgcagtaaacagcatttaaaagtcacttagttgcccaaagccattttataaggacgatcctagagctacacaatattattaatcaaggccgtgaaccctcacgaacctgccttaacccaaggcctacgatgattcagaccgaactggcaacccgaccctgggtcccagctcgtcccaagccaacccaggccaaccattccacattttagttgttgagcaaattttaagaattaaaacactgacttaggtacattgctcggcttgcccataaccgagggcgcggctattcgaatagattatactctgatcagaggtgtacatctttacccacaagacacatcttcctcacgtgtaaccacgtgccacataccaccacggtatacggacggaagacgtgacatagtttccaacccatcctagccatagacaagagtaccgacccaatcctgcctacggccggaacccccgggacaggcaggcaggactgagccccaagcagcagggcaccaaccctctgccacgacatctcgactaccgggccgcagctcgtgtagccttcatttgccctggagaatgtccatcgacccccgacttcatccatctccaatccgtgtacttttgtttataaccagactgagccacaaactaagccttacccactagacatgtggaagtacggtagtgctttgcaacagaggcccgagcttaatccttatagtacccgaggtacgactaacaaaacccaaccacgcacctcgagcccagcctaaaaccattttgggggttttgaatagagggggaggtgtgtgtccaattccaacataagccaaccattccatagtgtccaaatgatatgagaattcccaaagtctaaagttataaaaaccacctaatgttgtcctattaaattgcgaagcatctacctaaaatcatactagtggtaccatgagtagagtgtccactatttagggttttgtttatcctagggtgaacaaggtaataataacaatagcaataataatgtcataacaaaggtaaataggcatggctaaataaaacagtgataacgcgggaatttaaataaagcgataatgcaataatttaagtcaaaataattttataaactgggattcaatatgttcaaggatgatgtgacttgccttgctcgctttcccaaacgccggcttcaacttccacgaagagcggatcttccgaagctgcagcgtctacacgaccaacggaaaagaaaaggcttttactctactaaactccatataacaagcagaaacaaagcacaaaaatgggttcttggcttcttaaggaaaaattagagacttgaacggtccaattccgagttcaaatggccaagatatggccatttgaagtttatatgctctttaaatggatatttacgaatttcttcatttaaattttaattaaaaaaacggatttattgcgtcagccgggagagagggcgcgcggaccgggtccacgggagtggggcccacgcgtcagcctctcggtccacggtggaccgggtgcacgcggctggcgctgaccggcgccgtgggtcccgcgcgtcagccgcacccgcgggcgcgggcggctgacggccgggccccacctggcagccgcggggcgcgcccgaaggcggcctcgccggcacggccgacgggaggcggcgcacccgcgcaccgatggtcgccgccggcgaccaacggcgcggcggagcagcacccgagagagaggagggaagggggaagtgaacggagcggtccacggctcaccccaggtcgacgaggatggcggaaacgacgaccggagcggaggaagacggcggcgcggctcggggtgacgaggacggcggcgttccggcggtcggcgagcgaagcggaggggtggacggggtcgacggggacgcggcgaagccgacggaggtggcgccgagtcgggaggaggtccggagcgacggcggcggcgaaccggagctcggcggcgacggcggagagaaggtgcgacggtgcgggcttgattccgacggggagagcgagcggcgagcggcggaaacggaggagagaggcacggggaacaattatatagcgtcgggagtgggagagagcggccggaggagaaggaaacggccgcggagatctcggccgccattgatgcgccggcgacgattacgggattgaatccggacgaatccgagggagagagagagggaaaagcagggggaaacggagagggaatcacggggagtgatttccccctctttatggcgcgcggggatggcgggatgcggcggattcggcggcggcggcggcgctagggcacgggcgggcggcgggcgcggcgggaggacaggaatgacaggtgggccccacccgtcagcgagggcggcgggcgggcccgcctgtcagcggcgcgcgcgcggggaggaggccgatgggccgcgggggagaggagagagagggagggaattgggccgagccggcccaagaagggaaggggggaaaagaagacttttagggtttttctttttataaaacctttttaactttgtttatttcttctcaattattatttgtgctctgaaaattccactaaaatttgagggctccttttagaccaaggagaatttaacaaaaattctccgggccacattcgaatttttcttgtacgtattttagtgtttgccaatttcttttcgaattttaattaattctattattccttttagaaaatgatttttatttcgggatgaatttatcaggacgtgacactgcggcagacgcggcgacgcttggggcggcagatctctccctgggcgatcttgagctgatgcagctgcgcctccactgcgtcgaggtccttcttgagctgcaggttctcctgacgcagctccaggatcttcatgttgttctcgaccatcccgcggcgcaccatctgatggaagtcgatacgagccgcgtcgtacgcctccaccatgcgcgccaggtgcacgatggtagcgtcatcctccgagctagcatcccggaaggtggcgtggtcgcaggctcctccgcgacgagggtggtagcgatagggcgagtgctgcaactcatccgggtagcgctggtgaagggtgccgatggcgaggagagcggcgttctggcaagcggcggggaaggagtctccacccgcggtgactgccagcgaagtccgctcgggagagccggagaggatcactgcggtgacctcccaaccagcgtggggctccgcgtcgtctccctcctgatccggaagcgtcctggcctggtagtccactccgtgtggataccctaagaccacgcacatgccccgcagctccaagacgaagccagtcatgtccaaaccacgacgggtgacgctgccggccatctacaaacaaaaacaaaaagaaaagcaagatttcaaaggtcagattttgatgataagtgaagcagcaagacagagagagactagacagttttcacaaataacaaaggatttttatttttgaaaatattgctaaggcttgggatctacggctcgtcctagggtcaaggatggctctgataccaacttgtcacgaccagaaataacccaacgggcgttcctgacgtgcgtgcattaatccttgtcccaggaggcaaggtacaccaaaagttgatacaaatcagagtttaacaagcggaagcgtaaatagttaacttattacatgggcagcgaaggcccagcacacacagagacaaacgaaaaacagcggaagactagggcgacgaccacaggcgcttgacggcaggcacgagctagacaccaaagccttcatcttcaaggagctcctcttctgggcttgggaaaaaattgagcaagactgagtacaaccaccgtactcaacaagacacacccacaaatgcagaataaatgcaagggagtacaagggaattataacataaagggttcgggttgcagtaaacagcatttaaagacatttagttgctcagggctattttgtaaacactatcttagaactatacaatgttattaatcaaggccgtgaacccacacgaacctgccttaacccaaggcctatgatgattcagaccgaactggcaacccgaccctgggtcccagctcgtcccaagccaacccaggccaaccattccacattttagttgttaagcaagttttaagaattaaaacactaacttgggtacattgctcggcttgcccataaccgagggctcggctattcgaatagattatactctgatcagaggtgtacatctttacccacaagacacatcttcctcacgtgtaaccacgtgccacataccaccacggtatacagacggaagacgtgacatagtttccaacccatcctagccatagacaagagtaccgacccaatcccgcctacggccggaacccccgggacaggcaggcaagactgagcccctagcagcagggcaccaaccctctgccatgacatctcgactaccgggccgcagctcgtgtagccttcatttgccctggagaatgtccatcgacccccgacttcatccatctccaatccgtgtacttttgtttatgactagactgagccacaaactaagccttacccactagacatgtggaagtacggtagtgctttgcaacagaggcccgaagaccggtccttatatggccgaggtgctaccatcaaaaccatgcaccccgagcccagcctaaaaccatttttggggattttgaatagagggggcggggtgaacccaatttcacaattcaccaacaattccacagtgtccaggtgatatgaatatttcccaagtctaaagttataaaaccacctaatgttgcctaattaacttgcgaagcatctacctaaattttaaactagggataccacgagtagagtgtccactagttgaggttttgtttaagctagggtgaacaaggtaataataataacaataacaataataatatggtcataacaaaggtaaataggcatggctaaataaaacagtgataacgcgggaatttaaataaagcgataatgcaataatttaaatcaacataattttacaaactgggattcaatatattcaaagatgatgtgacttgccttgctcgctttcccaaccgacggcttcgacttccacgaagagcggatcttccgaagctgcagcgtctacacgaccaacggaaaagaaaaaggcttttactctaataaactccacataacagcagaaacaaagcacaaaaatgggttcttgacttcttaaggaaaaattagagacttgaacggtccaattccgagttcaaatggccaagatatggccatttgaagtttatatgctctttaaatggatatttacgaatttcttcatttaaattttaattaaaaaccgggtttattgcgtcagccgagggagagggcgcgcggaccgggtccacgggagtggggcccacgcgtcagcctctcggtccacggtggaccgggcgcacgcggctgacggcggccggcgccgtgggtcccacgcgtcagccgcacccgcgggcgcgggcggctgacggccgggcccacttggcagccgcgagggcgcgcccgaaggcagcctcgccggcacggccgacgggagggggacgcgcccgcgccccgatggtcaccgccggcgaccaccggcgcggcggagcggcacccgagagagaggagggaagggggaagcgaatggagcggtcttcggctcaccccggtcgacggcgacgacgggaacggcggccgaagcggaggaaggcggcggcgcggttcgggacgacgaggacgacggcgctccgacggtcggcgagcgaaacggaggagcggacggggtcgacgacgacgcggcgaagccgaaggaggcgacgccgaggggggaggaagtccggagcgacggcggcggcgaaccggaactcgtcggcgacggcggagagagaggaaagcggcgcgagcgcgattccgacggtgagagcgagcggcgaacggcggaaacggaggagagaggcacggggaacaattaaatagcgtcgggagagagggaaagcggccggaggagatggaaaccggcgcggagatctcggccaccattgattgcgccggcgaactttgcgggcacaaaatcggacgaatccgagggagagagagaggggaaagtgggggaatcgggagagggaatcgcggggagtaattccccccactttaatgcgcgcggggacggcgggatgcggcggattcggcggcggcggcggcgctagggcacgggcgggcggcgggcgcggcgcgaggaaggcgatgacaggtgggccccacccgtcagcgagggcggcgggcgggcccgcctgtcagcggcgcgcgcgcggggaggagccgatgggccggaggagaggagagagagggagggaagagaagtgggccgagccggcccaagaaaggaagggggggaaagaggacttcttttagggttttttctttttataaaccttttcaactttgtttatttcttctcaattattatttgtgctctgaaaattccactaaaatttatttacgcattttaggcttttaggaaatatacaaaaatcctccaagccttatttgacttttatctttgcacattttaattgttggaggctttcacatgaattttaattattctttgcacaatttcgaggatgtattttagagtcgatttgggacgtgacaagggattatactggttcaggccccttgataggtaatagctctaatccagttggtatgggattatataatggaaaccacagattacaaagggaatagcagaactcgatgataccgacgagaccctagtcgagttggttcgactagatcacccggtgacttggctcctataggctctgacttcgtaggctgtggtggttatgttggcggtaagattcgatgccttaggtcctcccgggggtcccttttataccgcgggtcagttggtctccaagtagaactcagagacatcggaccccacacgatacagtaacgacccagttctgtccgagtaggactccttccatccgtggactccgtttctattacgtgatgaatttccttaacgtgtacaggaaacatccgtatacgcgtaggtataccatatcagtatacggcatacatccaagggtagagagtataccttaactgtaaccctgacaaatggttttagtcaattccataatttgtacttattaaatttaatatttatatagactcatgtttttacccccacaaacggatttacttctattgtcgtgacaagttactttccttttgttttaagttacttctatatatgcaaattacttttcagctttattgaatttacttttatacgtctaagaagtaatttaatgaaatctaaaggtaatttatatatattgtaaaaagtattatgtaagttttcattaaaaaaatataatcatgtgatatcttgttataaagatttaattgttatgaacacaacagtgtaatcggatcgtagatcagatgagtaatttaagagaaaaatttatttgaagcatagttggtaggaaaatatttctctacttatttaagtagattcttccggtcaatgccccgtcgctagcagtggcagttccaatgggcggttcaggtgatccctggaccaccctagaattttgcccatgaggacaccccctgagctgtgctagggttagggagaggcacagacaaccgccagccatagtcgcacgcattgctggctggcagctgcctcctttgtcttcgcgtcccgactccgactccgactccaccttcaccttaggcttggcacgatggtcccgacacatcgcctccccggttcccgcctttgcctccgcgtcggcatgccacctccccatctcctgcctccctcctcaagtcctcctcggcaccacccgactccgcctccgcctcggcgccgcctctatgcctcctccagtcccccacccctgtcgggcagcgccggtacgccagcgggaggcggcaagcgcctataggccggctgcctaggcgcttgggcccaggtgcccagtccggcggtcgcccccaccccttggaaagggaagaaagggaggcgttgaagcgacgtcgccattctgccggcggccggtgtcaggtcccctccctctccagctctcctgctgcccgacaaagttcaaaggtcagtagacatttattgttggctttttgcaatgttgccctatgcagtagtgagtagacagtagtagtgttaggg

SEQ ID NO: 9624 - DNA, 9317 bp, Oryza sativa
gatcgtctttataaaataactttgggcaactaagtgacttttaaatgctgtttactgcaaaacctaacccctattattatccccttgtaccccccttgcattaatcatgcatctgccggtgtggcttgctgagtactgtggttgtactcattcttgctcaatccttcccctcttcagtaagagaagctttggagaagatgtcttaggtggagtcctggcttataccccagttgagcgcctgtgaagatggagccgtagacccgctagtccgctgctgtttatttttgattgtcaggccttaagtgcctttgtaataatgtaaatattatcgatataataaagatgtgtcttttatatcatgtttgtatggtgtaccccggcttttcctgggacggggattaatacactagcgttcgggaaaaggcaattttcccggtcgcgacaagctggtatcagagccatctcgactgtaggataagccaagtggataaaacccaaggacatattttataaataaaaaaattatttgcgaaagttcctttttctccttcccctaatgctatttgcaaaaggtttactccgttcttccttcttcggattttcaactagtactagatggtcaggtcagtgaagaagaggacatcgtcagttgtttgccgaagctccagaagactgcaggatctgctagtgaagtggaggaagcagtgaagccagctgtgaagcaggagtgaagatcttggagaacctgtcgctgaacctaagccaccctctagggtagagtcgttagtcgtgtgtttccttgcttgtgtgtgtagcgcgtggtttgcatcagtggggtgtgatgtaaccatgctaggttgtttgcttaatcaacttgcagaataagcctaacatacatcataacagcaaaagacttagatctgttaaggtcctatccttagtttctaatctgtctctcccctttgttttccctctctccctctccaaacctttgcaacagatggctgacaatgagaaaggcaataaggtcagaagtcaggacattggtacctcaaactcccgagtgaatgaagcaccagacaccagttgtgtggcagtggtccaacacctgattaaccagaacaaattgcttatagagatactacagcagcatcggatgccaattttgaacccgagtcagatgcaacctcaagtgcagttggaggcagtccaagcactcacaccacaagtcagcgcaccgccaacatcccagaaggcccctcatgccatgccacatgttgacccaaaagaagcaagtatcatctgttttatgtgtgatgagcaagggcactacgcaaggaactgtcctcagcagaaaagaaaagcaccaatgcgaaccgaagatgaagtccgtaagatgatcattaccagcacagaatggcctccaccaggaatgacaaaacatcagagaagaaattccttccgaggtgcacaacagttgacagagcatcttttagctaatggaggtagagtgtctgatagtgaagattcagatcaagtctcctcagatgatgaaggtgcgaagcctccccaaggttttaaccagaataaaatagaacttaaggcatgctctcgttgtggagaaatcggtcatgttgccagctcgtgtgcctctatatgcgttcattgtgaggaagaccatccacccgacaggtgtccaacgagcaggatcacttgtttcttttgtgaaggaactgatcatgtaccaaaagattgtcgattcagttttctgctgacgaagaagatggccaaccaacccgccagttccaacggagagaagcatcaaggaaacacaaatcctcgccaagattccagtttcagcctaactccagtgccaggacagaggaatcaaaatgagaaaagaaaatgccgagtccgggaagatatctgttgcttcaattgtcaaggaatgggtcatttcgccgacaagtgcccaaaaccgagaaacgtagctgccagcacgtcagtccacgcaaacccccgcaatcagaagcttgctcctcaacgaattgtcatccatgcatcccgaagcagtccgatagcccgcgttgcaacagctccaactccaatgagtgcactaccacaaggtgtcaatgctcaatttcagccccagccaccagctgacaagacagaggccagtatctgcgttgtacctttggaagttccaatacagcagctgagaaatcaagtacaagatgaagaacccgagtgtaagaaagttattgtttgttacaactgcaatgaagaagggcattactccaaaaactgtccccaaccaaggcaaaatcgacctccacattaccgccaatttacacgaagcagacattccaatcgtattgtggtcactggagcaaacgctgtacccgtgaggcctcgtgttaatcagaacccatagcagaaacaatgcaccagtgctcctcctgctgcacctgactctgcaataaatcatagcaaccattctctgcaccgacagccttagcaaagaattgtcgtcgatggaagaagttgtgtctctcccctacctaccccaggccgagccaagggcaatcaacctccggagggcgataccaagcagaagaccgtcatccgcttcaaccagcaatcagaaggaagcttctcctgtgaatgatagcattatgcagtcctgtcacatcatcacagaaccaatcaaggatgcagtcactggaacaatgccagctatatctctccagaatcaaaatgagcagccatgtttgtggttttcagtccgctacttatcatggtgtaatcgaaagtttgcagcaatcatgtaatacataaatatattcatgtctataaacagtgagcttgctatgcttatggatgattcatgttgaggatacaatgtaccgatgttaagcaccgtccctttttgtttaaggcagtgcctcgtattcatgtaatgagggagaaatgtgtaatacagacaagttccctgaggattcgtttgaaagatgcggatatgtgatcatgtgtataattgtttactgacaaaggagacctagggtctcgtgtcagaggaactatattctaacctcgagttaataaccaacctgtggatggaaaagaaaaacaattaaactgtgttgggttaaaaagccaacgagacagtagttgaggataggagtttggatacgccttttacagatcaagataaggattgttggaggaaacccctaagggtacccgccatgcctctacattgataagatcggatatacctgccaacagttaaggagatccaggagacatcaatatttgagaacataatagtcgatggttggtaattagtttatctggtatcagaaaaaggtcaaaggtgatgtggcagaagaacaatttggatgctccccatctcgaggaagcactaaagatgaccatcggcaattaaaccctagtggtatagatacagatagcaggcaatgtatttcccctgaaggtagtcagtgcagcttttgacgcaccacatcaaggtttcactgaaaggcagcaagccaaaggacctcatcgtccccagaagcatccgcaatccacattaaagaataccacctgttagagataagccgaaagatgattgataaaaagagattggcaaagatgttctctagcatgaaagaagtaggccgaaaggtgattgataaacagaaacatgctctgcatcgctcaaggaagacccctgatagtaattgccccgcaacagtcatcttgtcattaagtaagcgagatgacctaggtaaaaatgtttctatgaaggcaaggagcgaaatcttcaactcggtatcagatgctacacggagtgaaaagtgcaagcaccagttaccaggtaatgccatgtcttgggagatgatccaatgggaaagaacacatcaaggttaaaggtgtaaaggaatacgttgaatgctaactgaggacaacctgaagataataatgggaagtaaactgaatgtaaagaaagtgaatccgagctgcttgttcgtgagagccattcccagttatagaaccagtgatatgttcgaagatagtctacagaggtcagattaaaatcacctctaacaacgaagcttcagatctggcaggatcacgatcagacaataacaagtccagcagccaagtcattcgggaagacgtcaaagcatgtcaagcgggataaattggttctcttgggaagcataacttatagttagagtggttgaccctggcatcgaatagcagaagcacctagcactggagaccaggaaagccaatatgaggcagttaatggcaagttgtcaatcatggtatccttagtaagcgggatatcatagtctaaagcgtatggtggtaagctggaaggaaacgccaagcatggtattctcatgatgacaagcatggtatcctagtaatgacaagcaggttacgacgcatgacatgaagtggtaacttgtgtgaggttgacgccgaagatatgaatcgtgagaagttctggatctgaagccccatcatcaagtgccacaacccagtcgaagtcggctaaaggttcaaccggagataagtcaggtgaagagaagattccagctgcaacaggagatcgagccaagcagtccagagtggagaagttgtgctaggcaagttgttataaaagacggagcggaagaagtcagacaagaagagaagaccgcccaacctatcttcttgctagcctcctcgaatctcggggacgagattcttgtaaggggggtggatttgtcacgtcctgataaattcatcccgaaataaaaatcattttctaaaaggaataatagaattaattaaaattcgaaaagaaattggcaaaccctaaaatacgtacaagaaaaattcaaatgtggcccggagaatttttgttaaattctccttggtctaaaaggagccctcaaattttagtggaattttcagagcacaaataataattgttaagaaataaacaaagttaaaaaggatttataaaaagaaaaatccctaaaagtcttctttccccccctttcccttcttgggccggctcggcccacttctctccctccctctctctcctctcccccgcggcccatcggcctcccccgcgcgcgcgccgctgacaggcgggcccgcccgccaccctcgctgacgggtggggcccacctgtcatccccgacctcgcgccgcgcccgccgcccgcccgtgccctagcgccgccgccgccgcgaatctcgccgtttcccgccgtccccgcgcgcaataaagagggggaaatcacccccgtgattccctctcccgtttccccctcttttccctctctctctccctcggattcgtccgatttgaatcccgcaatcgtcgccggcgtcttcaatggcggccgagatccccgcgcccgtttcctccctctccggccgcgctctccccctcccggcgctatataatcgtcccccgcgcttcgctcttccgtttccgccgctcgccgctcgctctcgccgtcggattcgtgctcgcgccgtcttcctctctctccgccgtcgccgccgagctccggttcgccgccgccgtcgctccggacttcctccccactcggcgtcacctccatcggcttcgccgcgtcgtcgtcgacctcgtccgctccttcgtttcgcccgccgaccgccggagcaccgtcgccctcgccgtcccgaaccgcgccgccgcgttcctccgctccgttcgtcgtctccgccgtcctcgtgtctcggggtgagccgtggaccgtccctttcgcttccctctcctctccgctctctcgggcgccgctccgccgcgccggtggtcgccggcggtgaccatcggggcgcgggcgcgtccccctcccgtcggccgtgccggcgaggccgccttcgggcgcgccctcgcggctgccaagtgggcccagccgtcagccgcccgcgcccgcgggtgcggctgacgcgtgggacccacggcgccggccgccgccagccgcgtgctcccggtccaccgtggaccgaggggctggcgcgtgggccccactcccgtggacccggtccgcgcgccctctctctcggctgacgcaataaatgggtttttaattaaaatttaaatgaagaaattcgtaaatatccatttaaagagcatataaatttcaaatggccatatcttggccatttgaactcggaattggaccgttcaagtctctaatttttccttaagaagtcaagaacctatttttgtgctttgttcctgcttgttgtatggagtttattagagtaaaagccttttcttttccgttggtcgtgtagacgctgcagcttcggaagatccgctcttcgcggaagttgaagccggcgtttgggaaagcgagcaaggcaagtcacatcatccttgagcatattgaatcccagtttataaaattattttgatttaaattaatgcattaccgctttatttaaattcccgcgttatcactgttttatttagccctgcctatttacctttgttatgacattattattgctattgttattattaccttgttcaccctagaataaacaaaaccccaactagtgggtactctattcctggttccactagtatgaatttaggtagatgcttcgctgattaattaggcaacattaggtggttttataactttagactttgggaattctcatatcatttggacactatggaattgttggattatggtggaattggacatacacctctcttcctctttcaaaacccctaaaacctgttttcggtggggtttgggtgcatgccagttatgggaagtagcaccccggccactataaggattaagctcgggcctctgttgcaaagcactaccgtactaaccacatgtctaatgggtaaggcttaactcggtgctcagtctagtcctgaacaaaaggacacggatagagatggatgaagtcgttgcgacgatggatatctctgaggcaaatgaaggctacgcgagctgcggctcggtaatcgagatgtctaggcaaatgaagactacacgggtcggtgcccgttagtcgagatgccatggcactggactagtacgcgggtggtctcacccctatgtgtgtggcgcacccggtctagatcttgttgctaggggctcaaccctggcctgcctgtcccgggataccggccgtaggcagggttgggtcggtacttttgttcacggctaggatgggtgaagggttatgtcacatctttacgacgggttccaaggccatggaatgcggagtaaagatgtgtcttgtgggtaaagatgtacacctctgatcagagtaaatctattcgaatagccgagccctcggatatgggcaagccgagcaatgtacccaagtcagtgttttaattcttaaaatttgctcaacaactaaaatatggaatggttggcctgggttggcttgggacgagctggaacccaggtcgggttgccagttcggtccgaatcatcgtaggccttgggttaaggcaggttcgtgagggttcacggccttgtttaataatattgtgtagctctaggatcgtctttataaaataactttgggcaacaaagtgacttttaaatgctgtttactgcaaaacctaacccctattattatccccttgtacccccccttgcattaatcatgcatctgccggtgtggcttgctgagtactgtggttgtactcattcttgctcaatccttcccctcttcagtaagagaagctttggagaagatgtcttaggtggagtcctggcttataccccagttgagcgcctgtgaagatggagccgtagacccgctagtccgctgctgtttatttttgattgtcaggccttaagtgcctttgtaataatgtaaatattatcgatataataaagatgtgtcttttatatcatgtttgtatggtgtaccccggcttttcctgggacggggattaatacactagcgttcgggaaaaggcaattttcccggtcgcgacaatatgggtagttgtggatcgattaaccaaggtagctcgatttattcctgtgaagaccacctatggagggaacaagctagctgaactctacttcgccaggatcgtgagtctccatggcgttcccaagaaaatcgtatctgatcggggaagccaattcacctctcacttttggaagaagctccaagaagagttgggtacccgattaaatttcagcaccgcctatcacccgcagacagatggacagaccgagcgtctaaatcagatcctagaagatatgcttcgcgcatgtgtactagatttcgggaagacctgggataagagtctcccctatgccgagttctcctacaataacagctatcaagccagcatacaaatggcaccatatgaagcgttgtatgggcgcaaatgtcggacaccgctattgtgggaccaagttggagaaagtcaagtgttcgggactgatatcctgagagaagctgaagctaaagtcagaatcattcgggataatctaaaggtggcacagtcccggcagaaaagttatgcagataaccgtcgccgtgacctggaattcgcagtggatgattttgtgtatcttcgagtcacgccattgcgaggtgtacacaggtttcagacgaaagggaagcttgcacctcggtatgtgggtcctttccgtatcgttgctcgacgcggagaagtcgcttaccagttggagctacccgcctccttgggcaacgtgcatgatgtgttccatgtgtcgcaactcaagaaatgccttcgagtgccatccgagcaggccgactcagagcaaattgaagttcgtgaagatttgacctacgtggagaggccagtgaaaatcctggacatcatggagcgcaggaccaggaaccgggtaatccgtttttgcaaggtccagtggagtaatcacgccgaagaagaagctacttgggagcgtgaagacgagctgaaggcagcccatcccggtctcttcgccagttcttccgaatctcggggtcgagattccgtttaaggggggtaggtttgtcacgtcccaaatcgactctaaaatacatcctcgaaattgtgcaaagaataattaaaattcatgtgaaagcctccaacaattaaaatgtgcaaagataaaagtcaaataaggcttggaggatttttgtatatttcctaaaagcctaaaatgcgtaaataaattttagtggaattttcagagcacaaataataattgagaagaaataaacaaagttgaaaaggtttataaaaagaaaaaaccctaaaagaag

SEQ ID NO: 9625 - DNA, 15968 bp, Oryza sativa
  unsure (1)..(15968): unsure at all n locations
ttatttatggctctttgaaacgtaggaatcttacaggagaagtcctctaaaactcctccattccgaatgcgacctgaacttaaacttccactggataccttttgattgactataagactattttctgtgcattttgcagtgcatgagatgcaactttgcttgttacttttgataaccacaaaaggatttttgacaacaaacagtaggggtcatttttaaaataaattgatcaaacgaattcatgtgcagattaattggaaaggaaaagagggaatattggttatgttcttccctcttctttcgcaacttacctccattgttttccgtgcatgttttttaaaatgttaaatgtatgtcttttcaaaaaaaatattacagaaaaattgctttaaaaatcatattaatctatttttcaagtttttttagtttaataattaattaatctcgctctgatcacttgctttgttttccatgtaacttgcctcccgaactcagcccggtaaagagagctaacttggtgtatgcatggttgtcgttggcagtggatgacggcggggcgcggcgtggtgcacgcggagatgcccggcggccatggcgtccagaggggcatcaacctctggatcaacctctcctccaaggacaaaatgtactcttcttcctgtgcctctctcatcagccgcagcaatggcggctactacgtaacagttgctgaccactcgctgtgccgtgccgtgccgtggccatgatgcgtgcgtgcgtgcagggtggagccgaggtaccaggagctggcgagccacgacatccccgccgcggagcgcgacggcgtgtccgtcaaggtgatcgccggcgaggccctgggcgcgcgctcgccgctccagacgcgcaccccggcgctctgcctcgacgtcgccatgcggcccggcgcgcgcctgcgagcgcccgtcccgcccgggtggagcgcgtgctcgtacgtcatcgacggcgaggccgtcttcggggacgaggccgcggcggcgggcgcgcacacctgcgtcgtgttcggcggcggcggcgacggcgtggccgcgcgggcgacggagcgctccgcggcgaggttcctgctggtggcggcgcggccgcacggcgaggccgtggtgaaggacgggccgttcgtgatgaacacccgggaggaggtggagcaggccagggaagactaccggaaccgccgcaacggcttcgagatggccgccggctggagctccgaccacgttgccaccgccgccgcggcgcatgatggtcaccggcgacggcgaggccggtgcaccatggtnngtcatcagnnctcatccaggtcgcaggtcaacgctgcgtttgcgcgggaggataggaattttgggaatttcgttgcaaagttgatgtaagataaaatggaggattaggtgtgccgtgtgaaactcctgtaaaataaccttatgcgaatattgaatttcgttcaatttttgtgtttgaaacgatgttaaaacttactgatcaaatttatgggtggtcatcttgtgtgagaataacatgtatgccattgaatcatcttgcagaatatctacttgagctgctacattgctaatatgaatttcattgtttaaaatacaaatggagaactaagtgttcattatttctttttgttgttctgggtggtcatcttgtttatgtttccatggaacgtcaaacatgcctttgtgccaaaatgccattttagaaaacagagctagtttgttctctccatggtatatcctttgtagtgtcttgttaaatgcagaacataatgtatatcagtttgatgaaaaactaggcgataaacctgccgattgtgaataggattaaacaaacaatttaaggtgcaacacagctgcatggtcaaactatttttcacctgtttcagtgatatcctctctacagctccccataaattttgatacaaaatttgaacttgaatattaaaatcagttaaagcagaaaaaaataacaggccaaaaatatttggattcgtcatacttgagaagttctggagatgggcaccaacatttcaagaaactggtggtaccagccgttacactggtttcctgaactctgcttctgaatttgtaagataaggtcataagggaatttcacgatcaactgaactttggaacaataacttactgtttacttccagtcgaatgtcagttcgtttcagttttttccacctgttacatctgttgtttcgttctttgattgcctgcctccagatttttctttttttttttgcaactaggaaggtagcccgtgcgatgcgcgggcatgtatattaattcgttaaaatcatgcttgacaagttaaattaatatgttttttcctttctttttaattgaatgttcatcgtctcgctcttttcttatgaaatattaagaatttattaattaatgaatatattttatgtgtatccagctatccttacctctaattcatatgcatgcaagtatattcttgcacaagatctatctatctatgatatgtggcacccatatgatatttttctaaaaatacctagtcaacaggagtaataaaatgtaaatttaatatgaaaaatataacttttaaatatgaaaggccatcaattatgtaatgctattagtggcttatatacacgcaagagtaaaaaacccatgacacattggaatttaggatagcacatatttatcattggcttttgtgtctttatatgtgtgaaagcaaatatgactcgtttgaaatatatataaaaaagtaaataaaaaaatattgttgggacataaaatgagatattttgtatagttaagggagtacactgattcaaactcggtgtaagtgatctatataattgtatgagtaaaagcactgcgatgaatataattgtttaaacgattaaaaaagttggataagagacttaaaattatttgtgccaatattcgatagttcgtatgtgaaataacattagcaatgcatgctagatattataactcattcattgtgtcctgctctgatactgttaattttctatttcttttctcaaagtattggattttttccattgctaaaataaaaagtttcgtgaggtccaatttaattgtgcgatgtggaatacaacccatatgccatttcataaagattgtgcgaggctccacgtagttcgatggaaatatgatttgatgtctaaacataaccgctcacgtgtcattgcttttacaatgtgaaatttttgttgatatcatagattgaatatttttctgtaaaattatattagagttataatttatttactacaaattgacattttttttaattttttagctagcttgtagtgggcataaattagtgcctatcatctttccacttctaaatttttgttacatagttaggctttttttttatgttcgtgccaatttattatatctgctacaatcatatatataattatacatttaactctcactaagtatagttaatgttatttttctaatctctatatttctagcacctcgatgatttgtctggtcgaaaactctctcttttgtttcttctttcataaagccataccaccttagttttgtcttatgatgttgaatctatatttgatctaaattttcaaagcacataatcttaactgtgtttatagcttttttggatgattaactaaagatgcaaactgtacaaagtaacatataagattacgttgtttagctacgaaataaatttattttgtactatgtttctgtcattatcattcatcatttctgcagcaacgtttccttatacagggttttatctaattaggttagttgtgacttatttttcttgattgtcatctcatgctatgttaagccatacttcctccatgcatgatacgatcaaatttcctgttctgttcatttaggtcacgtcaaactttgtttgtgcttattctttgatgtttcgtatcttaatttatatgcagtgaacatatacaaaaattaatttttggactgcaacactgcattacgattaggctggaagattttatcatatgaatgatgcctctctctctctctcgttaacggaacatatgcgcggagtatgtgtggttgactcatggatagcgtcatcaagcgacagaacacgcgtgccatcttgaattttttaagtaggttaagattaagattagatctagtgattgaaaatatttgccctaccaatttaaagaaaaaaatcaatggtgagatgtttttcttttttttcttataatttctgtgtttttttcataatttattagagtatcatatggtggtttaggagcatttgtaggattgccacgtggtgacttaggagcgtttatcgaatctaaatttaatatttgtgtaatatggtgcttaaaaatttgctcttaaaacatttatattagaaatctaagctatttatatgtatatggattcatcaattaaagttgaatagttaagttagagaaagaaatgaaggaaagtgggagggatgaatgtacgtagtcaccgtgaggggaggaggtccaggagaaaagggcggtggagatgatttttgatgggttttgggatttttttaaaagatagatctgacggtgtaaaatattgggtccaccgtattaacttaaaattgatggctatatgtatttcttttttcttataatttcttcgatttctctgatttattgagtgctggttgttgtaaataatggacacatacaaggccagccacgtggcatattgatggtccataattggcacctataagtcggtataggtgtcgattattggtacaaaacaggcacctacacacattataggtgccgattctaccaccaacaccgatgactaaagtcatccgtgctattatctgggtatcggttagaaaaaccggcatgtaaaagggtttcttgttacctatggtgtagttgaatgtgctcccagtaaaattattgatttaaccccagtccacctggtccatcttgtatgagcacagctactaattaaaatttttgtgattagctggctggtttgcaagctcattggatgattttctagcaacagtgtagaagaaaaaaaaaatatcggtgttgtttttttttcaaaactccgtaataaaaaagagagttctcaaactactggattgacgtacgaaaaccatgcagttttcatggttttatttatcggtaatattggttcacagtgatgaccccacgtccttttttggttggctccaccgctgatggcaggtatagatctaatctaacgatacagaataatgggtccaccaatttaaatgaaaatcgatggtaagattagactctgccatgtggcggcctaggaacgcttgtaggagcaccacgtgacggcttgggagcgtttataggaagtttaatggacttttagtatataatagataatagaagataatagatagatagatagataagcttttcagcactttttttcttccctctatgttttccatttcctctttccgccggcgacaacttgtttttcttttcggaactggaagagtcacttaagcatcacattttactcgagattccgagagcgtctcaactgctgcgccagcttaccgtccccagagctcttttgtttttacaatgaaaatactgtcatggaacgtaagaggtctcggagacaaagaaaagagggatttagttcagtcaaccctgtttgagcacaagccggatattgtttgcatccaagaatctaagttaagcaatatagacagcttcacagccccagcttcttaagaaacttccactaccagtcttccaccggttcttcaggaggactgatcacagcctggagaaatgcaaagttcaaagctgccctcacctgctccttccattccaccatcgatcaaacatccttcctaatcacaaacatctatgctccccatgccaactccgagagacaagaagtgtttgatctgctcactgccttgaggaccacacgccttgagccctggatgcgcatcggcgatttcaacatatacagattcccacatgagaagaacaatgacagcataaatacaagaggaatggaagagttcaacagttggattaatggtgaggggttgtttgacatagacatccctagtagaaagttcacttggtcaaacaagagaagatgcccgacttcggtaaaacttgacagagttctgatcgacaccgcctggaaccaaactttcgccaacgcctccgccaaagcactaatagcaacaacttcagaccacatccccatcctcgctgagttctcggacaactgttcaaaatcagacatttttcgtttagaaaattactggttgcagatgcctgatttcatcgcgatgacagaaacaaactggagcagaggaaccagacccctgacagcaatctccaagctcaaccacaaactcagacggcttcgagccagcacgaaagcctggaacagaaataagcgcagcattccaaccctcctgtcagccaacaaagacacattggaatacctagacaaaattgaggagtggcgtcaactgactgatttggaatactacctgagacagaggattcaaaaacactgcaatgagctaaatgatttcatcacgcaaaaatggaagagaagagctcgtatcagattctgcacactaggtgatgaaaacacaagattttatcacactctggcttcagtaagtagacaaaaaaattcaatcagactttttattgaagatggtgttaaattttatgacgatagcaaaaagctagatattgtaacctccttcttcaggcagctgttcagtgaaacttccccttcggacccaacattcacactacctctgctctaccctcaacaagaatgtcttcagagcctgtgtacacccttcaccaaggaagaaattgtaaaagtcatccatagtgcgccaaataacaagagtcccggacccgatggattcacgaatgagttttacaagcgattcatcaacaatatttaaccggatctgcaagcagtctttcaagacctctttgacaacaacatagatctttcaggtgtcaaccaatcctacattaccctgattccaaaggtcacagcagcagctcacatcaaagacttcagacctatatccctactgcacagtgtcccaaaactgctcagcaaaaccttaaccaacaggctgcaaaaggaaatattaaagttgatcgaccctatgcagtcaggcttcatccgtggccggtcgatcacagagaacttcattctcgcctcagaactggtacagtcagctttgaagggcaagaaaccaatgatagtcctcaagctagattttcacaaggcctttgataccgtcagttgggacgcactgttccgaatcatggaagcaagaggtttcccggacaaaaggattggttggatcaaagcactattatgcacaggcaaagctcagatcaccaacaatggacaaaagggagaacagatacagtacaaaagaggggtacggcaaggagaccctctatcaccctatctattcattttagtagctgatgtgctccaaaaaatgattcagcaagcattcagcacaggaatcctaaagcacccacttgacattgaaggagcaccgcccaatttgcaaatacgcagatgataccctgatcctactaaaaggagaagctgaccaagcaacagcaattaaagaaattttggattcctttgcaaatttctcaggtctgcaaataaattaccataagagcactctagtacccatacacctgaatgaggcaacaaaaactatggtgacgcaaattctacattgccctgctagttcactcccttgcagctaccttgggttacctctttcaaccacaaaaatctcgcataacatgctgctgccagtcatctcaaaagttgacagatatctagccggatggttgcctctatcaaagggaggaaggctaactatgatcaacgcagtcatgtcagctatcccgacatactacatgtcatgttgtatctggccggaaaaatctatcgaagcaccggacaagataaggcgtgctttcttttggaaaggggaaaaatccataaaaggaggtcactgcttggtggcatggcaaacagttctactacaaaaacagcaaggtggtcaaagatctcagggcacataacacagctttaattttaaagctaggacataaggtactcttttgcccaaacaatccaatgactaacttggtttagaaggcgatatctgaagcatactgtacagttactccccagatccagtgatacccccacttggaagctcattatatctcagtttaacaccttaagtgctgcaactcaggtaacccttggtaacggcaaaactactctgttttggaaggataattggctgcaccaacggttacaattcacacacccaattctattctcctttgctctggatcaggactgcacggtagattcacagtttacacaaaactcctggcatgtcaaattgcatcctaacctctcctaccaagcagaattagagctgcactcgcttatgcaaattctgcacaggcttagccccatccctgagattcctgacacaagagttcttttgcattctgtacccaagttctcaacctcaaatgcctaccaacttctgacttaccatggagccctttggaaaccggcagaatatgtctggatacacaccatcccacaaaactgtaagatcttcctttggttggctttcaaagacaggcttaacaccaaggcgaatatggtcagcaaatgctggagcgaagatccgcactgcccgctttgcccggcattagaatcagctgaccacatcatcctgagatgcaagaatgctaatagcctatgggaaaaaatgaacctactgcacctggcaaaccattctgaatcatcctcagctttccttcaagcagtcgttgacagaaatcattcaaatagaggaattgaacctatctggtttgcagcttgcgcatacacgctgtggaaagcacgcaacaacatgatttttgagagacaaattgacaacatgcaatcatcattcaacaaatctcagacacactaaagctccggagcatgagagccaatgaagcaaccaaagaacgaattctctcctggtgtgcagggctgtagttgtgacattactttgtatatacccttgtaattccagccccctgttttgtttcttttcttttcttttcttttgtctattttatttttcccgtttcccctttcttaataccccctctgctataacctgtaacttgtaaacctcatttctcttaatgaaatgactataaggtagagcacgctctaccttcttgcttcaaaaaaaaaaacatcgcttattttccatttagattgaacatggaaatgcacatatgtgaaggactagatcattggcatttgaactgtgaaacacggtgtatagccataaaatttaaatggtgctaaacaattaaaactgtccaatgaattgtacatcatcgctcaatcagtatatcagaaaggagatattgacttattgcaataccattgacaagaacatactgtattcatgtttgtgtcttggaagtaccataaacctaactcactcttctagcttgagattttctaacatggaaatgattaaccattacagctgtatcttgatgaaggagagctaagctatcccataagtaatagaaaacacctctaaaaaagacgaaaataggtatggcactgtcatgaagagaacaagtcatcctataaaaaccacatgagtaacttagagaacaacagggcacatgaacacatctaagattctaagtaaaagtgtaactgtaatgtgagtgcaggtaccatgctacaataacaatactacctcttcaatttcctgtgggatatgattatgaaaatcttgaagcatccgatgcctatccaaacaaaagaacaaaactggatttatgatggaaagattgtagttcagacttcagacagtagagtccttaggagaagaaaccaagcttttgcttctcctcatctaactcagctgtatcattatcagcattcccttgcttagctacagcctcacgcggcagtggagaattccattttgttgtaactgattgctgatagagtaccccgccagccagagtgaagagcaagcaaaccaaaccaattgaactcgcatgtttatcccagatcataacattgattgcaaccgtgagaaacttgttgacaacacgcctgttactgtgaaagccgtggcagagattgttttccttgctgcgaaaccaaagaagctaatgagcagcccaaacacaggacaaggaaactgtcacaaaggcatcaagttcaaaccaactctggccccttgattcaatggctgatctgaagactgataagtgctctccagtcaaaaaccaaaatacaggagcgattaccagctagagaagattgttgtagagtacgaagccccatgtgttcagcccagtttatgagaacttaagattctgagaagtagctggtgagaagctagctggtaagaatctgtagaagctgagaaacccagcttctagcttctaatttatttttggatttcataactatagattcttataatctgagtgaaaatctggactatttggtggagcttctagcagtaatagcttctaaaaaaatcttcagctcctagaagctcctccaagcaggcccatagttactagataagcaactgcccatgggtaggctgtgaggctgaaccccgaatatgtcatcacgtaaccaacagcacctcctaaaatagtcacaagggacaaaattgtaagcttggaaggacatggctgcttcctgaatcctgaaggcagtatcatcagcgatggcaaccaaaagcggggtcaacgatctgaacactataaaggtatccacattagcacgcttcaggagatgtgtaggtgttggtgaagatggcaaggtagaacacaagcgccgccggcgcaaacttctttgcggtctggaagttgaagggatcatggtagagtagtccaagctttgcgagggtccagacaccagccactgatgtcaagtactgaagtgcagtcaggaggccagggtagctgaacttggtcatggcatacttgttgatgatcgccagcaagctcgagcacagagaggcagccgaaccacggagccctagcagctacaaacgcctctcaccaatcggccgagatgcagatcccgcaggtgagattcggattccgatcgcattcgtgaggaaaggggaaatgcagagcagtcaccgctccgacgaggggtcttaccaagaaagctcaagacagtatatatctcgggtggacggattcccgcgggagggggagggagagctccgccgctggcggccggccggcagctgccgcgacccgcgcgtgggcgaggttgagcggatcgggagaagagggaggggcatgtttgtggtgtaatttggcttctattatttaatcttggtaggccaaattatttagtttagctttcattatttattgaatgtttggagacgtatacgcgtcggacgtacggcgcgagccgaaaaatcggacgcctcgcacgaccgtccgatgcagcacgcgcgcgccagccgtccgattggagaaacaactgtcacccgacgcccgcgccgttgcaacacccaaacacattaatctgtttcattcaatgtgtcccgccgttgaccactagcacgaggggagatcttcgcggagcgactggcgctgcgctgccaccggcgattctctccagcgccggcgaccctatccctcgcgcccctatcctcctcgcgccggcgaagcctgcaacaacgccgacgtgccgccacaccacacgcagtcaccgccctgcaacttcgccaccgacgccatggctcatctgatacaccaagttgagagggatttttcgccgagctcatctagtgcaaacagaggaacaaccccaatgcataatgcaacgaatttggtgagtaaaaaatttctagggttttacttgtttcactttttttttgaaaaagtttcaataaaaaattgaagtatagatctatgaaacaatgtcttccctcatgcaacatttatattcatgtcttatttttaattgtaacttctgtataaatttggactggaatttgacttgaacaataatccttaacttgctaaaacataattgtacaagttaatgaaacaagataaaatgttacagattgatgtccaagcaccaagctcatctggtggcttccttgatgtgctattatccaaatcctctgggcatgaaactgacttggtgagttgtccttggatttgaaatatcacaaatgtaggggggatattttgctttgaaaacacagtatgtaacttagtgaaacttttttgtgtactaggttgtggatgtggaaagtgttgacaacacagatgtggctgctgtgactgttgaaattgatgaacaattggatgaagatgcatctgaaaatgatgaaaaagaaaaggatgttgtttgttccccaccaattgttccatacattggaatggagttcgatatagtggaagaggcaagaaatgtttacaacgcttatgcttataagctaggatttggaacaagaattgcatcatctagaaacagccaggcatcatcaggggaaaaaaagcatcgaagaaatgtaaagtatctgaaaatggagacaatcatgatgatgaaccgaagttgataaggagagaatttgagtgtgttcatgcacgtaagccagaaaataccacaaaagatagtgctggtggcagtagcttcatttctgaagagaacaaggaaaatccgcccctgcttgaaggtaacaaaaagaaggctcccttgctggtggaagggaagaggaaacgaccaaaggttgcaaagtatgattgcaaagctcatatggctgtagggcttagggacaacaagtggagagtcattgctttccaaccaaaacacacgcatccgatggtgaagcgccttggaagaaggagatattacagatctcataggcacatctcaaatgaagactatgaatttctaaagactttgcattatcgaaacattgcaacatcgcagattttggcgttgttaggagatttgcacggtggtgtaaggaatctaactttcattgctaaagatgtctcaaatttgaggacaaaactgagacaacaagtttcactcaaagatgttgcaatgactattgattatttccagtaaactcaagcagatagcccctccttcttctatgctgcaagatatgatgaagacaacgtgttgaaggcgttgttttgggtggatggcagaacacggaaactgtatcaaagctataaagactgtgtcttctttgacacaacctttatgactaaccgttacaacatgccatttgcacctattgttggaattaataaccacctgcaaacaatattgcttggatgtgctttgatttgtgatgaaacaactgaaacattcatatgggtctttgaaacatggatgcaagcaatgaatggacagaaggtaggttcagtgatgacagtccgagataaagcaatgagagcagcgattaaaaaggtgttccccggtacaattcatagatgttgcttatggcacgtgacaacaaaagcagatcagcaactcctgcccgtgtatacttcaaagaaaggcttccgtgaagctctgtatagatgcatatatgactctgaaacaatagatcagtttctatcagattggcaaaaaatggtagatgaatatgacctccatggaaaccaaactttgaataacttgtgggaaacaaaagaaatgtgggctccggtatactttaacacaagttttttcccttttactgggacgacagggagatcagaaggtctaaatggactattcaaattatttgtacacccacaagattcagtgtggatctttgtcaaacaatatgagcatataattgagacaaggcttgacagagaggacagggagggctacagagtagagacaacagaacctagaatgtattcaaggtaatgtgatatgcctgtcttgaaacaatttgaaaaagatgtgctttctgtttttaattagaaaaattgatgaaacaaataatatctgtactgtgtaacataaactgtgcaagtgtggaacaattgacattaatgggttgaaacattgaattatgcaggtcactgattgagaaacaagcatcgcagttttacactacaagtgtgtttgcagacaaattctagtatgaaatatatgaagcaacagggctggatgcagaaaaaacacaagaagtccccgacataatatataatgttatgccaagtgacatagaaagaacaggtaaaaaatatagggtcacagttgatgcagcacactcaacctactcctgctcgtgccacaaatttgaaagagatggacttctttgctcacacatcttgagggtgatggctgtccttaacatccatgagattccaagtaagtacttgctgaaatggtggtcagagcaagcgacattgcaaatacgtgatgagtacaatggtccagcaccatcaattggagtcccggcaacaagcaagctgagattcaacgcattatgcagggcaatgacaagccttgcttcagatgcatgtgttaatgaggaaaagtacttgattgtttcagctgggattcagaacctacacgcaatggttgcaacaccacacactgttgagacacaacatcagtaaggtatttttcctagtcaacaagacccatcaagttcagctaagaatccagcaaccaagaaaaggacagggaggctggtagaaaaaactcataggatgaagccaataggggaacaaataactgaaagcagcaagaagaggaggacaaaaaagaagagctcatgctcatattgcttcaacgagacacacaatgtttcaacatggccgtatctcaagatagcgaacatgcgagacgctctactaaaccaaaaatggtgcaagagacggagttgacactctgagaaaaaagagtttcaagagctataaatttagatgcgatgcactatactgttagaaaatatagtggtaattgccatattacaatataaaactatcttcttgtgttaggtgaaacaaattatgttgtgagatgcaacagacatattttttttaattcacatatgggcagaatgttggatgattatgtgaaatgagtctttcttatgatttatgtgaatgattgttaagtggaaagaagggaatgccaaaaaaaaaattacatctctgcactaatgattacagtggaaaaagaatatgtagagctggtgaaacattcattaagtgtagggtgagacaactgtataacagtaggtgaaacatttgcttcttatggaacagaacatgtggagctgtgaaacaatcattaagaacaggctgtaactattatgtaacagtaagtgaaacattgcttcttatggaacagatcatctggaactatggaacaatcattgataacaagctgaaacatataagtactagaaggtgaaacattgtttcactctaaaaagaacatcttgaactatgaaaacaatcattcatgactgccccctagtagatgcaacattatataaagagtagcagttcaacttgatagcacaacttcagtgcacaaacaaaaaacagaaaacacaacacacttcagtgcacaaattcagaccacacatagctacccagagcatccactttgcactattttttctaccatttttacaacttcagtgacacgactgccccctacactaatttgcttgaagttgatcatggttaacgaatttccggtagttcggcatgtccccttcattgaatgcttgcaggtttttcccatcccaattctcaatgtatctcaagctggggctgcaggaat

SEQ ID NO: 9626 - DNA, 11906 bp, Oryza sativa
tctaccttatttttaaataactaggaagaccgtaaataattagttgtatagatgaattaagtactattatatagtataaagctaacagatagcttagaaaatttatttgagcaataccgatacgataaagaaatttgtgaggaaaacgaacttacgaagcatggtatgtgccatctgtttgatattccaccgatataaattcatcaaaacgtaactatgatacatgcccgcgtgtatgtacgggctaccttcctagtttctctaaaatctcttatattatgaaacggggggagcataattttttcctatgtgtcatttggaacaaaggatttgatcatgtcaaattctctattgtatgcaccgaaaaattaccatgagctaaaattctcattttatttttcttttaagaagtccaatacagaactctttgtatttcctctcttaatccatcaaattcctatagttatattgaaccatccaaaaacaacatacctcaaattcttgtgttttgaattcctatgggacttatacatcccaacattctaactatatttttttctgtttctagtattcttgtgggatttatacatacgtgacattctaatcctatttattgtgttcctgcgtttctcaaatcagatcctgcattttacagaaaccctactaggaagcttgtttatgatggagctataagtagatatcatgcttataccattcgacatgtacttgtcattgatccattcatttccacaggctattgacattttcctgatacttggcataattaatactctgaaaatttttattgtaaattgtatttgaacaacaactattgaatgattttcttttaaacatatgtttatgggcatataaatgttctttttacagttaatagtctaacattttatcaaaaaaatacataatttaatttttcaatgttcttgaaatgatagttttattaattagttcaaaataaagttaataatcccttctttctataaaggtaatgcccactaaacacctaaagctcaacatgcaagcacaatatttattagcactcctaaaatctatatgtaagtacgtcacatcaacttattaagcacacaaaactcaacatgcaagcatatactgtagtaattatatctataattttttttcattctaaaactaaacatatacatgctaaatcatcactctcaaatcattttcaaaatatttcaatccaaattatttcatctagttacataatgcatttaattatagagttcatctaaacgtcgctgtttcggattggattcttgttttttcccttatatttacgtatttgtttggcatagctatctgtgcgcattgaatttgaaatttgtaagttaaaatataaaaatttgaaaatttatatttcattaaagtaggaagaaatataatttttcctcctactttaatgaaatataaatttccaaaatttttggatagctctcacttataaacaagtatacacataataatagtatggtatcaccgtataagaataaatggatgacttgcaacggatgatatgcaattaatgttatattagttattcaaagctatttgtttaagtatgcaaaatatgcaaaaccactatccaaaatcatcttaaagggtaatatggatggtattataaagttcagggggttagatatccggttttaaagtttagggtgctaggtggacttacatccaatgtttataggggtatttagattttttttatgatttattaactagtagtagatttgaagttcttaagtttaataagtttattagtggagtcatatctccacccacataagcaaaaaaaaaaaaatccaacctagcttttagcttaagggcatcaataatgtatatagaccaagtggtctttattattcccatttccacgatgtatatataaatagtaattgacattaagaatgggacccacactctaaaaaactttatatccaaatgctatagttctcttgtagaaaaagcaaaaggagggagatattatattttaatttatatggatgatccttatagctatgggtagctgatcatatgactctttctaatatcatctctcacaatggcaaaggtacctatataaagttataaggatggccttttgtcacattgtgaatgccctaatcgtgtaaaagagagtggcttattgctttaaaagaccaaacaaaaaaaactgtttgtttgtttagatttaaaatattcagctcataagctagcttataaaactaaacaaagaaggccagttaaacaaagcagagttactgcgagaaccaaattctatttcttataaaactttggttacctatgtttgggaaacttctgacaactacagtctttttttagagttcagctatcaaagtccctgaatagtttagatttacattcaaattctgagaaacgttattatagttataaaattcagaagatgaaatccaatttcctcatattctcaccgtgcctgcgtgccaagcaaacagggtgtagaaaactagaaaccctcgcaaaccccagacgcgttgggcgtcgtctccctgcgccgcctcccctcccttctctccccattccgcatcctccctcctgcgcgcaatcgcttccaggagcccctcccgccgcagccgcagatggattcctccgcctccgcctccgcctcccccacggcggcggcggcggctgacgcggaccggtacacgtacagcccgaggctgcggtggcagccggaggtcgaggagtacttcgccgccgcgtacggccgcgaccgcttcgcccgcatctccgaagccctcgcgtgagccgccccttccccctctcttgcttcattcctattctattcattgatgaatgggtgtgccttaacttttaggtcatctagtgtcttggtgttgtagtttgttgctttcctcgatttagacaagctggagcaaattctgttgcgtgcagctccaaaattttgcgcgcgcttggtcctgggcagagcggccattgcttgttttatactttgttttttctcagtttagggaacttggagcaaattctatccgaacagatgctctgattaacatgaaaaggattggctgttatgttatcctgtaactggtttagtaaaatgattgctcgagcggagttcgatcaagctaaaccatgctagattctggagctagccaaaccaagtatgattcgaattgatgtggcaaagcgattacaattagcaaaaggagcaaattccagcttccctccaaaaaatgaacactgcttaactgtaaatgctgtctcacgattatttatactcgttttaactttccaaaaaagttcttttcatttggcatttttcaaatagttgtcatgcaaaaaagcttgaactagtgcttgagaatcttctggctatcaggctatatagtgctaatagcacagaatattgatttgttagccgtaattattacatatatgacccatcatttgataaacatatcttatcacttttaaacaaaaggggaaaaccacccgttgctactaccattggattagcgaaggatatagatttagcttttgcgaagtttgcacccatttgctggattgtttttacttctccattctttttctccaaatttcatgctaatcaacacatccatcagagaccatttctagatttgctggattatgccatctaatcaaatgtaccatgtttcaatcagttctggtacttgcagttgctattttcttgttctgaactttcagcttttaaggacaatgtcttaatactcaggcaaatgatttgtgtacgaacaaaactgcatggatgtacttgattggatttacttagtgataaattctctgtggttccaaggtggtgaacaattcaaatgtttaggctggagaaaatgattcaaggaataatatcttggagcagcaatgcgtcaatctactagtgtttttttcgtagaaattgataagactcttagctaaagactgttactggttgttgacttatctggttccatgattttcatttagcttcctttttcaatgtaactaaagaacatggttttccagggaagagatgaaaatgaagaggcttctgtgatattggaaacgacaatctttatctatgctcacctttttattggattctctgttcttgcatgtctactataaagattcttttgctatgctcacctactcagtagttactaactacagatcagtgaaagactgaagttcttgatgacttgaccaaaacggtcaaataaaagattgagccagttctacagtttcatgctagtttccattataagtaaatagtgttaattttgtactaactattactttcttgattaggcatccttcttgttactcttgtattcgtgtcaatactctgaagtcttccactgatgctgtcatgcataaactgatgaatttggtagatcagaacggactctgtggtggaattaatggtttggagattggtcagcagaatggtggagagcaagcacatgaagggaattctgtggtgcataagtgcccatattctggccttgacaacgttttgtttgtacaaggttcaggaccacatgcactgcactacaatagccaacctgaccaatctattaaggaagtgattgtaagtcgaaaatgtgcagagtcggttcttagaggagcccaggtatgttttcttatgtttgtgtgtttgtgtgcttttgtatgtgcattatgttgagatgtaccgaaaaatggctagtcctagcataggagaataagttgtttcaaactttccgttgatcattctgtaattctttttttttttgctgcatcacctcaatcctatgtggagcatggggagtgctatataagtgtatgaattcactgtagtacttgctgttggactggatggtgactagtagccttcaatacctatcttgtttttttaaataatgcttttccgctcatgttgctgattgtcttttactttttccttttggatttggaaaattcaacatttcagttcgaggttgtatctttgcatgcttgttgccagttcatgctactagaaagtccacactcccaaatattttaactttccttttcattttctttatattcaggtgtacatcccaggagttttagcttgcagctcacatgttgaaaagggtgacaaagttgcagtgtcggttgctattgaacaacctgctgaggatggtggttggaccgttggtataacacgaggaactgttttacagggattgcagtcaggcaagcttttcaactgaaaaatttaaatcctttttgatagcttattgataaactgcaaatactctttttttttttctgtacttcatgtatgttagtcactgttacagttttaagtgtgaggttgttttccccagctaaaagtcatacacataacgctatgaaattcaattctttgcagatgcacatcatgaagaaagaaagggtttgtacattggtcaagggatcactgcaatgtcaaggtccggaatatttcgtgttcctcatggagttgcagtggagatgactgagagggtgtacaagctcccatctttcaatggtacatttacttctttgctgcatttcttggctatttgtatgtaacacgggtacaaatacactattgtatttcattcttttaatataaggatagaactggcaatttgataggtgaattattttcccccatatagtatgttgtgtgccaattcatgcaactaactttgaaagatgtgagatctccagtttggcgatcacattcatagctgacttctttagaaggagcattcattataagtagtcatgcatgggtttgacagccaccacgaaccaaacaatgaaggatatgaattagttcacgaacaaagtaattcctttatcttgtcatttgaattagactatttcttgaagatacagagttcagtgttaccgggacccgcgtgtccaaaaaagttttgccgcgtcgacacacatctctatgtcgacgcaggatgacatgcatcggacactgctagcgcgagtccaagtccaaaaggagagttgcaatcgctactgctgtgctgcagcctgcagggtgaagaaataaagctctagcagcagtcttgtagtgtggagtagtactactctactccgtagggataaagcatgtggggggagagagagcaggtggggggagagcagtgttactgggacttggactcgggtgtacgacttggcgagctctagaaaataagattcggtgactcgtctaatatatagaagttctaataaaaaatattatataaaataagataccaacacataaaatagttggttagacacaatactactgcacagaagatgccatttatatgaaacaaggaagtcaaaagtgcatgctctctgagaacagcatcctgccatctctcgtgaggcaaaagcctgtaaaactgcaaaaaggaacattatctctcctctctcccctagtgttaccgggactcccgtgtctaagaaaaatttgccgcgtcgacacgcatccccgtgtcgatgtgtatcagacgcgggacgacgcgcatcggacactgctagcgcgagtccaagtccaaaaggagagttgcaatccctgctgctgtgctgcaaggtgaagtaataaagctctagcagcagtcctgtagtgtgtagggataaagcatgtgggagagagagagcagtgagggagagaggagagagaatgtcctttttgcagttttgcaggcttttgcctcacacgagagatggcaaaatgcagcatgcacttttgacttccttgtttcatataaatgggatcttctgagcactagtattgtgtctaactaactatcttatgtgtaggtatcttattttatataatattttttattagaacttatatatattagaccagtctccgaatcctattttctagagtttgccaagtcggacacacgagtctgagtcggactccaactatcgagtctgagtcggattccgactcttgagcctgagtcacggtaacactgacagagtttgtatgcatgaaaaaaaacatctgagcttaattgttattaggactgtcagtgagttctgactgcaggcttgatcttggttcggattcggaggaaacttggtcaggcttgagcttggcttgtgtaagctcgtgaacagtatagcatatgtttcaagaacaatctcttgataaagacaataaatttattgttaatcacattggcaacaggacgaggactaagagaaatatgtgatgctaagctgctgtgtatgcatactaatttatacttgatctactagtttatcaaatacaaaaaaattgtgcgcacagccaggttggcgatctattcaagctcggttcaacaaagcctgagagcctaggctttggcttcggctaagctcatttaattttcatttcacttctgattgtagattatgcctactattgtggcctactgatcacatgaccacgcaaatcctcatattagagtttgggctttgcatattcttggtttgatgcatggtaaaaatattgcgatctctgcatagagccaaatggtatagggttgttgatgggcatccctacttttgaaggttgatcggttgacctcttctttgattcgaatttcttaactgaatacccttgttaatgcctctatgaatacttacatttttcatttcatatttgcattttatttatttagtattgactgatcttcaaatgcatgatcctaaattttgtttctttatgtcgtctagatgtgctcgaaggggagatatttcttcagaatcttccaagtgttgtggctgctcgtgtccttggtatgaatataatttttaagttagcaaaattttcaaatttatggcaatatggctgttttctgaaagtcttaagtcatcttttatctgatattatgtcctttgctgtgtgatgtatcgtatatttatgtggtagaaatgctgaaaatcttaggtttgaatatagttattgaagcaacaaataaataagcaaatgttactgctaaaagattgaactagcaaatgttacagtaattgaatagttgtcacttgtcagtttgtacatagcatatagtttgctgacttttctttctatgcagaatatgataaatatttttctttttagttctgaatagcttaggtcaaaattttacagcctaatttgttatgtacagtacataattttctatttatttgtagatccccagcctggagagcggattctggacatgtgtgctgccccaggtgggaaaacaacagcaattgctatcctgatgaaagaccaaggagaaattattgcccttgatagatctcacaataaggttaattcttatgtcagattgattatatgatgtcaaatggagttattctaaacagataaaatgaatatgagggaacttacctggttacgtttttccctgcatgtcgtgtctgggtcatggcttcatgaacagtctacaaaaggttatatactcagataaagacaacaaattgaagtgttaatagacttacaacggctataaaaatgaatataaaaatttattattcagccaaaacacaaagtttgttttagcatatgtaaagaacagtaaataatgtccctatgttttgcaatgcaatatggcatcttgtgaaattataatgtgctaaaagatatactacattttatcaccatcttttggctaatttttgttggttggaagctaaaatccataacatgcaagatggagcagcagcaacacttcttccagtttcttggccaatttgtttattatgtcttcttccagtttcttggccaatttgtttattaggtcatttagtgtagcatacttataaactattgttttgcatatcttatctcctacccttattgattactctctccatcccaacaaaaactcaacctaggataggatgtgacctatccttgtccagattccttgtcctagtataggccccatgctatcctaggttgagtttttttgggatggagggagtagatatgattttaggctaggtggtccagcttcatgcaagggcattttttttgtggggcacttaagggcatttgtctatgtaatttatgaaggaaatagaaagataaccccaagtctcctattcctaattacttttttctggaacatgcagaggaactggcatgtcattattttaagatgaaagacaaggccttggacaaggtcatggccctataacccaaactcaaacactaagtatgaagggaaacctacaagaaatacaaaaccaaccaaacaatcatgaaacagagctatctatctaataataatgcatcaatacaaatagctccaagccacaagagcatccttgaagttcttctagtctttcacttaaccagctattttggttatattccttcctcaatcagtcccccgtccttcacaaagtgccattttattaaagtaatcatcccccagacagatttttaccccttttttatgtactatcctgcatgccagcattcttctagaaaacccccaaaatatatttccacattttttagctgtatggaaacagaaactagttattatgcaacataagggtctttgaaggtcattttcatgtcacggtgtaggttgtttgaaggccattttcaaatcgacacattaggaaattttgtgtggcatcaagaactgagtaacacatgtactccctctggttccataattcttgacgttttggacaatgacacggtctccaaaatatatgttttgactttatttttctattataatatatgcaataaataaatgcatgtttacttttttcatagtactttgaaggacaaatttatatatgttgttctagttcctttaaactaaatacttttaaagttattgataatcaaagttacaaaagtttgacctcaaccttatccaaaacgtcaagaattatggaaccggagggagtaatgtgcaatgacgatacctataaaactaacccttttttcaatcatgtgctcccactttacatagggtgtatttttcatcttagaagtcatattactttgcactttcataatattgaagtagattacaggtgatggatattttgaagttggccgctgagatggacctaaattgcataaaagcttataagcttgatgcactcaaatctgtacggaagaccaatgaagcaaaatatattggcgaagcaggcagccgcactgatgcaattgtgacactggcagaggactctgagccttgtattaataaagtcgatgctgggactactaatgccagtgaagacagttctactacatcagttgttcagactggtaagggacatgcaaatttgtacccatttctcttcattttttattatttaattttataatggtgggtgaatgcgcatgacacaccctgggatcacttatatttaattttattatttattatttaaatctaacctttttttattactgaagttacagctattttatatggttacactttgcactttgcggagaccaactaaacactcagaacataattttccctaatagatatatgcacctgtgccttaagtatatgtcgttcttaagctgaattcagaaatttgataattttgttttgttagataacaaaaaaacagatgataaaagatatgtgagcaaggcagacctcaggaagaacttaaggcgaatgaggaatggaccaggaagaaataactgctcaggtggtagagttgaaaattctaaaggatttttgcccaatagctttgatcgtgtcctccttgatgctccatgttctgcacttggcttaaggcctcgcctctttgctggtgaggtaagggtattgctagtttgcctcaccatatttagagatgcggttggtcataaattgagaatgccttttagaattgcccttttactttgtctgtatgtactcgttccaattctaaatgtagattgttttagccttcttaactctttcctaatataggtcattttaaaacttgtatgcaccttgttcacattttcttgttttgccttgccaaataaatggtactactcccgcaaataaatgactcatcttttccaacgtaatataagtgatggacaacaaaatcttttcagttactttcttaatcctcgtgcacaagtaaaaagacttacaattggaacaagatggaggaccacttttctttcatttgtagaaaaggtgcaatgcaaatgataaacctatctttagcaagtaaacctacatgttcaggatctgtttctactctgacaatgggtatttatgtttagtgtccatactcttagctatgcatcagcacgcacacctacaatggtacattgggaaatgagttattttatcatgtgtaattcttttaacaaaaaatggatgtttttagtaaattaaaatattggacatccaggccaattatgttcattcataatttgtaatcaatattgaaaatgttaaccaaagattcgagtttaccatattttaaaataaaagaatggtatgtgtggcattatatgtatttgaggtattttaaagagtaaattgcattggtggtacacgaacttattaggtgggtgcaatttagtacatgaatttgtaaaatgcacgttttggcacacggacttatctaatccgtgcgaactaggtccaaaatggtttagcaaggttaattttacctagctgatgttaattaggatgtggcatgcatacgtatagtgagtatcataaaacatgctatatttataaatttattctctactttatcttgaattttgtatgtttctaacccatgcatcattgctcatttgcccggtattttatatctttctctac

SEQ ID NO: 9627 - DNA, 23974 bp, Oryza sativa
  unsure (1)..(23974): unsure at all n locations
tttagtaaattaaaatattggacatccaggccaattatgttcattcataatttgtaatcaatattgaaaatgttaaccaaagattcgagtttaccatattttaaaataaaagaatggtatgtgtggcattatatgtatttgaggtattttaaagagtaaattgcattggtggtacacgaacttattaggtgggtgcaatttagtacatgaatttgtaaaatgcacgttttggcacacggacttatctaatccgtgcgaactaggtccaaaatggtttagcaaggttaattttacctagctgatgttaattaggatgtggcatgcatacgtatagtgagtatgcataaaacatgctatatttataaatttattctctactttatcttgaattttgtatgtttctaacccatgcatcattgctcatttgcccggtattttatatctttctctacaatcactatatctcattatatctttttattgaacaggtgcatgtctaagtagcaaccttctcatatatatgtttacgtagtatcctaatcagcacctaaagcaacaaaattagtcatgtaatgtccttttgaccttagttcgcacacgcaagataagttcatgtaccaaaacgagcattnnacaagntcatgnannananngcacccacctaacaagttcgtgtaccgctgatgcaatttactctattttaaaagttgaaattacatattttaatatgttggttaaaattatctttgtaatgcttattctgattaaggaaacatttttatactgtaatgatatgctaggtacatgaaattcattaataagttgaaatttatcagcctatggcatctcatattctgtaaacctgtaccttgccatgttattggaatttccaaatatgtcatgttgtaataatcttctaattgttatagaagtttgatttgcatctttgcattccaccaagctcaagtatttatcattttatgagttgctacaacttctaatatttagtgcatttcaatgtggcaggaaacgctggaatcactgagaaatcatgcgacgtaccagagaagaatgtttgatcaagctgtcaagctagttcaccctggtggggtgattgtttattccacgtgagtgttcaacattttatgttattactgtgtatgagaacaaaaattatgttactaagaaagatgttaaacacacacacgtgtgtggtaatcagatatccattctatttgtacttgaaattgcgataaactacagagctctagacaaacttagtgttggatccagaagagtagtgttcaacggctatagacgtatcagtcgaggatattacttactgagcatagctttaaaattagataccttctgtattccctaaacccaatagtaggtctcccctttcctctgtttatagattgtacataaataacataatccagatttcgtgtacagtacagttagctagctgatgtaccagtactaaagaaaacataataatgttgggcatgacattctagtcatacatgcacattttgttggtattcaggtagtgaaacagtcaaatttgtcccatctatatgtattgatcggtatttggtggaagctttttatgtggtcattccaaaaaacacataacttacacggttattctatctggaatctacaattctacataccatttatcctagttgtttctgctttgtaggtgtactataaatccaggagaaaatgaagctttggtcagatatgcattggataagtacaagtttttgtcgctcggatcacaggtaagttccatgatgtaatttgctaaattgctatggtgaggatttttaattagtaatttattagatggagaacttgaaatgtaccagccaaattgtatgttttacaaattataattttgttcagtttcgttacagatatgatgactaatggattgatttgaaactgatagatctcactttagacaaagttgaaccaaattaaagtctgcacatatttaatcttgctcatgcacttctgtgacaaacatgcctttctttttcctaacttaggatagtaaatacttgccctatctctgcagttacaatcaattatatttgttacttttgtatgctctataatttcattgtcattgttaatcttttcagcacccaaaagttggaggacctggtattgttggttcatttgagcgatcaaccaagaaatatactgagtaagattcttgctatatatttcttggaacatgggacctgaacctatccaatttctgtgattatgttatcgcacacctatctgaaaacactgaaatacggtattatgccataatttaggaaaacttgtatgtaacggaatacggtagatttggattgcatcacaaagtaatgtagttttgtaggaccgatatctgctatagaggtgggtgaatatagcatcaaaaagttcttccccaaaataatcgttcaaaaacctctctgaaatatcacccttagaccatagttacgtgacaagctagatctaggaggaggtgaagaaaagttgcaaagaaccctactcagatgagggctttaccctctcaaaaacttctctgaaatatttccctcaagactatatatgacaagatagatttaggaggagcttaaaaaagctgcaaagaatcaaagggcctttttggggagctttaagattctgagaagtagctggttgatagccagcttctgagaatctaattcattttctggattctacaactacagcttctcagaatctagaccaaaagttggactgtttggggggagcttctgattctgggagaagctctagtagctagaagctccccaaacaggcccaaagtatctcgcttaaacccacaaaatccccaaatccttcgcctccctcattgctattccgtacttcaccacccactgctccctcgtcactacctcgtacttcaccgcctcagtcgctaacctaagccatcgggggagaaaggcgagggattttgtgggtttcagggtggtattgtagtgcgaaggggcaaatttgtaattcttccaccactcttctctgcggaggggctagctgtaaatgtgttgcctacgtggaatgccacgtcggtggttagctttggtcaaacgagatttggatcggctatggttcattaaaccaagattgtggacctggatgtgcaattttcaagtttacggacctaagtgacacccgctctcaagtttaaggactggccatatattttactcatttgaatttatttatgcagtttaaattcccgtcatttaaattccgcagaggtttctgcttctcttccttcctgtttcttcgtgaaccctatgcttgcacaccaaaccttgtgaagcccgttgcaaagatcgccctacacggtgtacgtccatcgtgtgccaccttgtgtccaatcttgtcacccggcgtactgatcgttctggaccccaactcctctctgtgtttagtcccgatccccgccactgaccaagattgacctctaaggatcttaacttcagttacaccttgtcacatggcatcccgatcgtgctagacctctgctcctcccttagcataattctggtcctcaccattgaacaaggttgacctaaatcacctgcacacacatagactaaacaactgattttgggcacaggggaacctgacccacgttagtcgcacgcaagtccataatcgccaacattccaaactaaatttccaaccaaaaccaactcgtggtgttcccaaattccttgccaattttccaccacaagtaaaccaaaacaacacttggtttcacaagttcctgatgagaataccattttgcatgcctaggcattagcaatctttgttagcttgatgtgttgtccttgtacaagagaactgtttttgccaaatgagctggtgggtcaatcaaactgatggatgggccattttaataatcctatcgttatgtgctatatggataataatctccttgctatttgctactgaaactatgtttttactttttccccccaacagtatgttgaactgatagaatgcttatgcagggagtggttgacaaagcatgaatcacaacttgtccagagattcgatccatcatcaactctggatacaattggtttcttcattgcaaagtttgatgttgggcagaaagacgactgacgtaaggggttctcttgagcattctattttggatcctacactctgaaacttgctgttcctgacttcaaatatctcagcattaacacttgctgcagttagatcatttcagggccccaatcatttttcagtatgaatgggaaccaatatcccatatctggtttcccagaaattttgtgctcaactgtcaatattaaattattctttgtccaagggattattgtttgttgtaatgaaatgccaagggtgactggttgaaagtagaaacatttgtaaacccaaaatgatagggacttgagattttagatgttgggtggtggggatatggagctggaagagtggagttgtgctttgtatggcttagcatatttaactaaatcaatttcttttctatcacatggcagtatagcatactttctccgaggaaggtggtttctgacctgcatttttaagaatattcttcatagtgtttgtgattttacatgtgtgcttccattggcttcttctcccagcaaaagtcattcgtgtgctttgcctctaaagtttaattctcattcctccgctaatttcttgtagcgtctcacgtttagcttcagtagactctcactgcatataaactgtcttacgtcttttccacgagagagtacaactaaaaaaaaatgtgcataacctgtatacaccacactcatgaccatcaaacttgcatgtgccctaaacattagtaccaaatatatcaaacggcacagacgtgcggtgcgcggatatacgcattcctacggaacagacgtatgcgacgagcagcctcgtgataggatatgctctgtgctcgagcttgctctcgatcatcaacaagtatgccatcaccaaggccgtgctgagttcccttcaaacttttaaaaatttcgtcacatcgattgtttggagacatgcatagagcattaaatgtagaagaaaaaaccaattgcacagtttacatgtaaattgcgagacgaatcttttgagcctaattacgctgtaatgtggtgctacagtaaacatttgctaatgacgaattaattaggcttaatagattcgtctcgtagtttggcggtatctataatttattttcttattagtctatccgtatacgtcacaattttttttggctaaacaactaaacacagcctaagttcagctacctggccacctcactgccatgcagaccacaaagaagtttgcgccagctgctcatattcatataaatgtcatacatatgttagaatatatatatatatatatatatatatatatatatatatatatatatatatatatatatatatatatatatatatatatatatatataacatctatataaatatggacaatgctaaaaagacttacaatgctaacggatgaagtaccttattaatagccgttattgttagaaaataaacagatcaatatttccttttttgtaaaatggttcatgttttaatgaactatcccgtatgggtgttcattcacaatggtaatatataattttatttatatagcaaaaatgtcagagggttctaatatctagaagagggttttcggaaaataactggtattaatatatttcgtaatcatggttctttaaataaataatatttgaaaccaaaatagacacatattaccaaatgctcatcatttagcccatgcataacaagaaaacgaaaaataaaatcaaataaattccaacatgcacgggagttagaaaagatttttgattattccgaatttttaattatgtatttcagaattgaaaatttcagggtgttacacttatcaatggcatttcttagattatctccaagttaatacatattgctttacttttcattgtgtgagccacgtatttctacgtaggcagttgtcgatcgacaacaattttcttaagacatgcttgaaaggaggcatcagttcgctgtagaggatagaaattctcgtattattcagtgaaaaatgaaaaggagagttcaagtatgaaaacaatttataaataacttaaattcgaaattaaacaaagggatattggaataacggtccatatataacgtaatacgagattaattaaaattcgaaattagaaaagaaaaaattttaagtaggaatgcaattttaaaaaaactgaaataccgagattaaaacataataaattcctaaattagaaaaggaaaaaaagtttaagtaggaatgcaatttcaaaataactgaaattcggaataaaaataagaaatattaaaaagatagtcaatctagaacaaaacacatgattaattaaaattcaaaatagaaagtaaaataaattcagaagttagaaaaataaaaataagaattgaagtaggaatacaatttaaaataactaaaatttggaataaaaacaaggaatattgaaaaaggtccatatagaacacaataagatattaaatattatttaaatttgaaataaaaaataaattaaattccgatattagaaaaaagtcaggataaaaaataagaaaatattgagacagtagactacctagactacaatgatggcaaataccaataaagagggggaggaccctggcatgctgtaagaagtaccgttgtggtaatggtagataggacacctaaaaaattataaaacaaaccccaatcatgactagattccattctaaaattctaatgactattaaaagaatgggccacgggtacagctgcgaaggagtaagattgcagtagttgaatggatttatagaagggaaagaagaactcaataatgatcaggtttgatttttttaagatcacaataacaatcatacagagtggtgcaacgggtggccgtaatggagtgaagtggtgttaacgataaaatttggcaatttccgttagtcaagaccgggtcaaaggaagatttcacatcgtgactttagaagattcggttagtaaagttatccaagttttggcatccttcggagttaacaaaggtgtatcttagtttctatttttttaatagactcctgagccgatggaatcctgttaaaattagactcggatgtgtttggcaatgtttagctgatatgagttgtgtgaaaagtcggagtctgtaataaattccttaattagagatagagcctagattaaaccgatcataatagaatcggacttggtatagtctatgggtataaatatgtacacccagggtctttataatttaacaatagttcgatatacaaatttcggtgcatcgccaacgtttagtctcgacgtgatcttgttttttgagttgggctacatcggttgagtttgatctccggcaagaagtaagtactgtcaaatcttcgcctggtatcgacgggatcagtactttcacggttaagtccgatatattagtttaacttttgcatggggttgcttatcaaatatctcgactctggcttggatcggttttacgttctttgttagggtttctatatcaaccacgctaaatagcatcaatcggctagtttaaaacctatccagtttatctttagatcacgaattgtcttgcttaacttcaatcttctaagatttagtttgttggataagtttactcaagtcaacaggtgctagctatcatctcattggtgtttcagccgataagttatctatttaattatcatatataaacttgttgtatcggttcattcacaaaatttgatataattggctagttgttgtttttactagattcaatctcggttaggcctgataaagattgagtttagtaaatgtaattctttatgatcatattttagtttgttataatcggtcttagtttatttgctaattacagggcaatgaaaagttttaattaatacttcaatacatcaacctatatttagagattatatatacttgttaaatccagttattattaccttcaatcttataatgtcttggttgggtctaatctatccagattgactgtaataaaattaaggtttagcaaatactccctccgtttcacaatataagattttctagcattgtccatattcatatagatgctaatgaatctagacattattttatatatagatttattagcgtacatatgaatgtaagcaatactagaaagtcttacattgtgaaatggatgaaatatatatatagagtccatattccaggtgatgttgatctagtacgtaatattcgtttccattgattatcgtcgatcgacctgaaattatcatcgacatcggctggacacatggtattatatcagctccaaagtcgtttggcccaaggactaacatttcttttattatcttgttagttgcaggattaaactaactggcacgctctgaacccgatttgataggacctacactagagtaaagcaaacctcttagacctttgtgtgtacgatgaatttcatgtaaacaagtggtaacattttacaagacttctaaaagttataaatacggaattcgattagacaataaactccaaaaattacatgtttgatttttagaggtcccaaagaatatgaaaagaagtcataacaggaaaaaagaacagaaataggggacgacaagtaaagggtgatggttggcgtaacctttaaaaactataaaattgaatcctgctaatggtaatgtttgattttttaaaattctaaaataataggatgactatataaaaaagcttaaataaaaccatacgtaaaaaataaataattttgtatgtgctagctgcacaattacaccgcgccacctgctagttactttgaaaatttcgttttcaccaggggtagtagcatgaagcatacgatatttggggcaagtgtgttcttacccctgttttgttttacaattgtgattttaccttttttttagggtttgtgattttgaaataaagcaccagtttacccttcctttggatgactgtttggtgaggtttggttgagtgaactaaaaacaatgatcaatataataagaaaacatgtacacctgccttgccgtgtattaaccgtcgctgtatctaacggctgacaagatccgatcgactagtccatatctagctgcgtggcatgtaacctgtccgtgcgtgcgtgcgtgccgtgtcggtcggtcatggatcgatttgccatgccatgccaggtctctgttgacctcgtccatcgccattcgccaatcggtgtagctatgctgctagctgatcgatcagttatggcgatccagcaaccacgagctctcaattatgaaggcagccgtaatcacacgcagcgagagagagaaggcgcaacgagagtaatggaggtgtttttagtttggagggcacttgtatggctggcgctgatcactccagcagcggcgctggcgcagcaggaggaggcgccgggatgccggcggcggtgcggcaacgtgaccgtcccctaccccttcggcatcggctccgagcgctgctaccgcggcggcgtgcgggggtttcgcctcgactgcgacgacgcccgacgcccgccgcgcctcacagttgccggctacggccacgaggtgacctccatctccctcgccgccgccgaggtcaccgtgctgctcaacgccagccgcgcgtgctacggcggcggcgactacgggcgcggccgccgggggcgggaggagcagcccatgtccctcaacggcagcgcgttcctcttctcgtccatgaagagcaagttcgtcgccatcggctgccccggcctcgcctacttcgtcgacgacggcggggactacgtcaccggctgcatgtccgtgtgccggccgtcggcgcgggcgctgccgggctcgtgccggggcgacgacggctgctgccagagcaacatcccgctcgggctcgcctcctaccggccgcgcctccgcagcttcggccgccgccagggcggcgccttccttgccaacgccaccgcctgcgcctacgctttcatggtggacgcatggtggttctggtacgccggctcaaacttcaaccggacgggcgacttcgccgtgcccgtcgtgctggactgggccatccggccggacgccgggagcgggagcgggagcgggagctgcgccgccgcaagccgcacgccgctgccgtcgtacgcctgccggagcgcgcacagcgtctgcatcgactccagcaacggccctgggtatatctgcaactgcaccgccgggtaccacggcaacccgtacgtcgtcggcgactgcacaggtctaaatctaatttttggttactcctccgttttagaatataaatcgttttttattaagtttgtagacaaattttaatatttacaacatcaaattaattttattaaatcaataattaaatatatttttataatatatttgtcttggctaaaaatattgttatcttttttactaacttgatcaaactttaaataacagtttgacttttactaaaatcaaaacgacttataatctgaaatggagagaggtacttctctccctctcatcatcatcccacttcagttcatcctgatggtgatgtttttctggcctttaattaattacttctcatgttatttgtggatttaaattgaaacaaattattaagacatcaacgagtgcgagcacaaagatgagtacccctgctacggcgtctgcaccaatacggcaggcagctacgcttgctcttgccccaagggatccagtggaaatgccagcgtggagggtggctgccgccgcgacgacaagttcactctagcactcaagacggtcacaggtacctacgaaagattttttttatatattttatatattttttatatacctttccaaaaagtatttttaaatatgaattttgactacgccagcctgtggccaaataactttgtcacgtcacgcacagctggcgcggcagtgctgtcctgccacactagcctcttgccacgctaccatggctggcgtggcaaaacaacgcttcaacgccaaaaggtttagtttttgaaatattttttaagaacggtatattaataaaattaaaaaataaaaagtctaaaaaaataaaaaaattctcctacaaaacgggattcttcaccttaacaacaaataatcttgactttatatcactatgtcactgaaccgaaaatcacctgacactgacgttacagcagaggatccatatctgttgtaccaatatatgatacctctgtcccaaaatattaggacaagatgatattacttgttcggattcgtaatattaggaaatatcaccttctacactagtcgtaataatttgagtttggagaaagcagtgacagataagccagcagcttagtaaaaagctaatccctccgtcttaaaatttttcagatgtattttgtttgattaggacaagactttaaccaataattgcttcattagtatattatttatgtggcacaaacttatgatcataagaaattacttttcactataaatttggtaaattttactacaatacatctaaatcaatctatctatatatctatctattatatactaaaactccatgaaacttcctacaacgctcctaagccgccatgtgtactcctacaaatactcctaaaccaccacatgacatcttaacaaattggtgggcctaatatttttatctattaaaattttattaaaaaaataaccccacaaacttccctcccctcttctctccccatgggcccatccttcaaccggacgaacaactcaagttcgtacgtacttaggtacggtctccctcccctcctatccaatctcttcttcttttttttctttagttataaaaatttttaaacaataataaatcttaaataaccatattttttctatagttatttgcatgttgtctatcaacaattaaaaaatataaggtgttctttaacctatatgaaatatttaatttttttatcacatcctaaactttgcatatcacgtaaaactgtcatataaaataggtaaaaattgataatgtagattacacgatcatatatcaattgacagaatatacataaacaaattaagttagatctattatataacaaacgtttctaagccaccacgtggcatcctgcaaacgctatgtactacgatgccacgtgtcactataataaattagagaaatttttaaaatttttaagaaaaagaaaacatctagacattaatttttattaaattaggtagacccattatttaccactattatatttatctttaaaagaactccttaacctccaaaccggatccaaattggacctgtacgtagcgtacgttttcttaaggatagtacgtacgtacgttagtaacgtacttccaccccttcttccctcaatttcttcatatttttgcacatatttcttcccctattatcatatactttattagttagaaaatatattttgtgttaaacaattcaacaactataacatctaaatcatacaactaacttttaattcgcttatatcttaaaattattttatgactaaatctacaggcaaataccaaatttccacaataattcaactttgagaaagaaaatgacactttggattatatttccagacttttgcgtaccgttgaagcaattacaaaaaaaatgaaataataatattgtagactctatcattgtgcataacttcataagaattaaattatatctacaatcataaaatctaaaataaaaatagctatgagtaatgttcccaaaatatataagttagaaagcaagagttacacgaaaaaaataagcagctataacatctcaatcatgggatcccctaaatcatacgagtaatatttttcttatgtattttgattattttacatttaaaaacccatatttgaggttatattatctgacttttatatgcaattcaaacaattataaaattgtgaatagtaacgatatatattttatcattgtatatgtcagggttacgggtcaggcataccctctacccttcgatatacgttacatatcgacatggcatacccacgcgcacgcggatgttttctacatatcctaaggaaacctttcacgaaatctacagatgggaagaatccttctcgacagaactgggtcgtcgacgtatcgtattgggtctgatatctctgagtcctacttggaaacctccagatctatgatataaaagggaccccccggggagggcatggatcatcgaatctcagagccaacacaacccacacagcctacaaagccgaagtctgcgaggagcgaagtcgtcgagagctagttgaatccactcgactacgatctcgccggatccgacaagttccatcgttccctttgtaacctgtgttttccaccatataatcccatatcaactggattagggctattacctaccaaggggcctaaaccagtataattcttgtctttgattgttcgatgtcgtactacgtagatccttgtaccaacgtaccccaataccatctatatccggtctacgggtatcacccgtcgacagtggcgcgccaggtaggggtatttggtactcaaggttctactactatgtcatccagcttcgtcgacaacaacgtcaacaccagcctcagccaagcgctccctgcttcaacaatgctggtatgaactcaagtcggcgaaatcgtcttcccggtttacaccacaacgccaatctcaaccggtcctccaatgaccggaaacgagaacgcagtggctacaaaccaaggcgactccatgtcaaaaaatccacccgtcgaaacggagaacggatcatcgacgacatccaagcacgggaaggattctgatacggccaaaccttgtccttccaacataaaccacgagccggcaaagatgacttccgaagccacaaggtcttggtgtcctatccacaaaaccaagaaacacaccttgcaagattgttgggttttcctcaacgtccgtgttgaaattcgcgcctgcaaagaacgtggaattcagcgtacttctccaactcgggatgtctattgtcctattcacaagacaaataatcacgacctctcgagctacaaagtcttcctcggcgccatgaaagctccgtctcctaagtcatacgtccccgtcagggataacggcaaggaacaaggagcgactccagcctcagatcgattcgttggggtaatcgatatcgatcctcacgaaccatcggtcttacatcttctcgaagactatgggtcatcaacaacgagcgtgccacgggaggtattggctatcgatgacgttggcacgtcagcgcaagccaacgcagaagcggcgaatcaatcgactactccagcccaacacatcagggtcgttcaagctatactgagggaaactccttacgatcccgttctgaacgatgacctcgagcgttggacagaacgactacgggaatcggtgaccaacctcagcaacgcgtttgaagaagccgctaccgcagcgcaccaagatcagccgccaactggcgacgccaatggtgaagatccggaacggagggaatcacctcaacgagccactcctccacctcgcggagctggcgatctctgagatcaaatcaatggccgccgagaagcacgacgcacacgagacaatgtaaatcgctctcggcgtcatgtctcttcacgactccatgataacggaaatcgaggagaccgctcaaacgaggaccgggatcacgacaaccaccacgatcgcaacgatcgcgaacgacgggggccagacaatactggtcatggccgccgccgtaacggcgacgataatggagatcggcaccgagacaacagcgagagacaacgacaggattcccgagatccaggccgttatcctcgtaatcgtacgccagaaccaagcgacccatcgtcatcatcatcatctgcgtcctcctcatcgtcagacagacatccacgaaggacacacgaccgccgacaacccaccgtccccaacgctcggtcgttccctacatgatgtccgatggcctaagagattctgacccggagcaattgaaaagtatgatgggagcaccgacccagaagaattccttcaagtctactccacagtactctgctaccggagcagacaacaacgcactagcaaactatttaccaaccgcgttgaagggttctgcacgttcatggctgatgaatcttcctccctactcaatctcttcatgggtagacctgtggcaacaattcgtcgccaatttccaaggaatgtacaagcgccacgcgatcgaagacgacctacacgcgttgacacagaactcaggtgaatcattgaggaaatatgttcgacgcttcaacgaacgcagaaacacaattcctgaaatcaccgatgcttctgtaatccgtgccttcaaatccggtgtcagagattgctacactacccatgaattggcgacaagatgcatcacaaccactcagaggttattcgagatcgttgagcgatgcgcccatgtggacgatgcgctaagatgcaagaacgacaagccgaagaccgggggagagaagaaatcagccacagacgcatctgagtcaagcaagaagaaaaatcacaaaaatgggaaaaggaaagctcaagtggaagtcctcacagcagaatacgcgaaccctcccaagcgcccagacccacaaggcagcgacacaaagaaatcttggtgccccatacacaagacggacagacattctctgaaagattgccttgttttcaaaaagtcgctcgagaagcacatggcgtttgaaaaaggcaagcgagtacgcgttgtcgagaagaacgaagagacggctcctcacgaatcggattctgcatatccggactccgacctccacgtctcacacattttcggcggctccacaacgtactcctccaagcgagaatacaagaaagtggaacgtgaagtctgttcgacatggcggggggggggggggggggggctgcacccaagatgaagtggtctgagcagaaaatagagttctcggaagaagaccaccccaagagcgccgttatcccaggacgatatccgatcgtggtcgaacccactattcggaacattaaggtagcgcgagttctcatcgacggtggcagctcgatcaatcttcttttcgccagtactctaggcgcaatgggaattccgcatagtgagttgacaccaactgatcaacccttccatggaattactccccgatcatcatccagacctttgggcaagattacgttgcctgtgactttcggccaagccaacagcttccgaacagaatggatcaccttcgatatagcttacaacgccatcatcgggagaactgcacttgcgaagttcatggccgcatcccactacacgtatcaagtactcaagatgccgggaccgaagggaacaatcactattcaggggaatgcaaagctggcggtgtagtgcgacaagcggagcctcgacatagtcgagcaaacgcccagcccacccgccacgactgagccacccaagaaagtgagcaagacaaataagacgccgaagccggacggcgccatcaagatctttccactctccagtgccaatcccgacaagactgtcaagatcggggcgacactaaacgagaaataggaactcgcgctcatcaccttcctccgcgataatgccgacgtgttcgcttggcagccgtccgacatgccgggggtccccagggaggtgattgagcacaaactaatggtgcgacccgatgccaagccagtaaagcaaagactgcggagatttgcaccagaccggaaacaagccatacgagaagagctcaacaaacttctcaaagctggcttcatcagagaagtacttcatctagagtggctagccaatccagtcatggtgcggaaggccaacggaaaatggagaatgtgtgttgacttcaccgacctcaacaaggcgtgtcacaaggatcacttttctctccctcgaatagatcaattggtggattcaacagccggttgcgagctattgagcttcctcgacgcttattctagctaccatcaaatcagcatggcaaaagaggacgaagagaagacagcattcatcacgccgttcggggtattttgctatgttaagatgccgttcggactcataaccgccgggaatactttccagcgcacggttcagggcacacttagcaaccagcttggcaacaatgtcgaggcttacgttgacgacatcgttgtcaaaaccaagacaagcgactcattgattaacgatctgcgggaaacattcgacaacctccgacgatatcgcctcatgctcaatcctgagaagtgcacgttcagagtaccgtcgggcaagctactcggattccttgtctctggcagagcaatagaggcaaatcccgagaagatcaaagcaatcgagaacatgaagtcgcccacgagactcaaggaggtacaaaagctaaccggatgcatggcagcactaagcagattcgtcgctaggatgggagaacgagcacaacctttcttcgctctattaaagaaacaagacaaatttatatggacacaggaagccgaagaggtatttattgcactcaagcgctacctatcaaaccccgctgtacttgttgctccccaacctaatgaagaattattcctctatattgccgccacgccatattccgttagcactgtcattgttgtcaagagagagaaagtacagcgacaagtttattacgtaagcgaagctctccatgatgcaaagacaagatacccacagatccaaaaactgctttacgcagtcatcatgacatcaaggaagctgcgccactacttccaagctcacagagtcacagttgtatcctccttcccccttggagaagttgtgagaaacaaagacgttgttggccgcattgcgaaatgggtagtcgagctaagccaatttgatgtccactttctaccgcgaacagccatcaaatcccaggtactcaccgacttcgttgccgattggactatgccagacaacaaatcagacaaccaaggcgacaacgaaacatggacaatggcgttcgatggcgcactcaacagccaaggagcaggggcaggatttatcttgacgtctccttccggagatcaattcaagcacgcaatccacctcaactttagggcgaccaataacactgcagaatacgaaggactactcgccggatacgagctgcagccgcacttggggccaagcgactaatcgtcaaaggggactccgagctagtcgcgaaccaggtgcacaaagactacaaatgctctaacgccgagttatccaagtaactcgcagaagtcaggaagctagagaagaggttcgatgggatcgaggtccgacacgtctatcgcaaggacaacgtcaagccagatgaccaagcacgacgcgtgtccagacgagaaccgctcgaacctggcacctttctcgatatcctgacgaagccatcggtgaaagaagttagcccgaacacccccgacattagctcggaggtcactgaggcagaacgcgccgttgctgacatcgaaactacagacgactggcgcaccccattaatcaaattcatcagcagcgaggagttgcccgaggacgatacagaggccgagaaaataacccgtaaagcaaagatctactgtatggtcggtaatgatttatacaaaaaagcgctaaacggggtacttctcaaatgcgtctctaccgacgacggcagacacctcctcctcgacatacatgaaggcatatgtgggtcacacgccgccggtcggacattggtcagcaaagcttttcgacaagactttttctggccaaccgcccttaaagatgcatgcgacatggtccagcgatgtgaaacctgtcaattccacagtaaacacacaaagctacccgcgcaagcgctccagactatccctctgacttggccgttctcgtgctgggggctagatatacttgggccattcccacgaggacagggcggctacagattcctattcgtggcgatcgacaaattcaccaaatggatagaagcagtgcccacgggggaaatcaaggccgacaacgccatcaaattcatcagagggaaattctgcagatacggactaccgcaccgcatcgtaactgacaacggctcccaattcatcagcgccaacttccaagattactgcatcgggttgggagtcaaaatatgtttcgcctcggtctctcaccctcaaagcaacggacaagtcgaaagggcaaacggcatagtactacaagggatgaaaacccgcgtctacgacaggctcatgtcataagacaaaaagtgggttgaagaactcccatcagtactatgggccgtacgcaccacaccgacaacgtccaataaggaaacacccttcttcctcgtgtacggctccgaggccatgctccccggcgagctacgacatcaaagtacacgagtacagaagtattccgacgagaaccaggaggaacagcgagacatcgatgtaaatcttctcgaggagcatcgtgagcgagttgccgtctgagcatccagctatcaacagtccctccgccgttatcacgagaagcgcatccgagcacgcatactttcgatcagcgactatgtcctccaacgagttcaaacccaagcagggcgaaacaaactctcaccaaaatgggaaggaccttacacgatcacacaagtcttgcggccaggcgcattcaaaatcgcagacggcgacggtcgcgaattagcaaattcttggaacattgaccaactacataaattctatgtatgagtcaataccactgtacctataagtacccttacagcatcaataaagcctatttctaggtcccatatcacaatcaaagtgttttcacccgatgatcccttactctgatgacacctagcgttgaaacttgtccttatgtccctttacgctgtctcgacaaggcctccgaggaacctaagggatcttcggctggggacgcccagagccgataaggccttgtcagatcctgtatagacaaaagaccatgtaagatctggtcgtgtaagagttctcgccgtgcgtattaaccaagccgtgaaatcggaaatcaactttccaacctcacggctgggggctaggatcagagcttattcaaccaaggcaggtcaagggtccaagagccttatcccccgagaaaattcctccgatgacaaggctgggggttagtgagagtgtacgactcaaacggctgaccaaagtcgttaactgagaatacactcttacacacgacatctagagtaagatatatttgtttaaggaatatttctttattcacaaaataattcttacagtttttacataaattttccactacattacatctttccctaagatatctgtgacaggacacgagtactaccaagaaggccaacgccagtccatagactggaagatcttctcggccagcggcgacatcgacctcgccagatggtctatctccgccggagttctccgagaacgagcaaaaccatggcggagaaactcgaggtcctggcgcgggcggtgatctcgtaggcaagccagcatgtgccctccggcatatcggctcgctcgacgacactcttgcttcaaggcctcgtcgatatgcttgccgatgccatcgagttgggcacaggccccgtttagccaagagatgtacccggccgccgactcctcgggatcaccgcggactactcgaagttccctgcatactctagccatggaggcacagcaacttctcaagtaagagttgaaccacacctcgcgacctcggagcatctccacaacctgctcttttttcacggccagcatggttctctcaagttccgccacttcaaatttcgtcttccagtattggatacgacgatcttgatttgcaagggcaccctcgagatctgctaaacgtgacgaccactaagacaagctagatacctcctttacaacataaataacctaatcaggaggttactgagaggtgaaaaagctattcacttgaggtggccgttgccatcccggcctccgcatcaagagtttgatccacattgtcagacgaaacatgtggttcaaaatcgagtaccggaatcattgccagtgactcaggctgcccgcgctgctggacatcttcgtcatcaacatctctacaatggacaaaaactcccgagatcaacatacaaaattggacaagggtggtaatcgcacgaacgaaggcggccggagttcaagatttacacaatatataacaaatacaagaagtcctactctttaaaaagggagagaatagactcccccagatcaccgacttcttccatcacctccttacgcgtgtcgcttgccgccccctgatccaagatctcgcgcagatcgagctcaggacgcgacaaccttacacacgcgaggacgtgacacgccccagtgtagatgccattcgacgtctccttcgcgatcctggccgcatgcttggaggggatttccccaatcgctgtcgccagttccgcaagagaggaagtcagcgaaaactcgtcgggattcgccgggatcgtggacttgacgccgcactcctcggcgagctgatggaggccagtgtaggtgacccgcaacgagccacggatcttggagatattgttcccgagttccgacattcggtcctcgagcgccttccgttgacgatcgttgccggccaccaactccctcatcttcgtgaggtcctcacgggcttcagctagctcgcgcactaatctctcagcacgcgcgttcgccgtcgccgcttccgacctcgcctccgagatctcgcggccgatgccgcgagcaccagcttcgagaaggcgccccatctcgacttggagctcctcccaggtgagaatggccgctgcagaccacaacccgcagcgagatcgctgacggggctgctaggcgtcgcctctcggctcccggtcacgggcatgacatctgtcgaggccgtggcaggcgatgcgctggaagctcccccggacttggcccgtgcagccttcgcccgcgcctccctacggacaaccatgaatcaaacaccatttgaacgaaaagcacgagaatccaagaatctatttacttacttctcgccaatcgtcacaatgcgctgtcgtcgtggaggtggagaggacgcgtctgaagcctgaaagacaatcaatacagagtaagaagaaaccctccttgctgcacgatctgatgacaagatgaaattactgagggggtcgctgccttgcggcgatgtccgagtatagacgagaatttcctcgccttggtcaagactttgccaccgctagtggtggccgcatcagatgcctccttgacaaccttctcctttagagatgtcgccacctgatggtccgcgagtggcccgatgatgtcagtcaaaggaagggcctacgcttaatcaggtcataaggtgatttcgaaaggagaatacgagatgcttatcaattacacttacgttgatggcttcatcgcgttccgccgcccccttttcacaaaggggcacggggatgtcgctagccgtggtcggaccgctgatcatcacctgaccaacgcgccgctccacagctttgctgctcagacctgttaaacgggaaccaacttttgataagtcaagaggaacgcgagtacaagcacgccaagatgaatacgagaaagataccccgaggagaaacccgggtcgcgtcatccggcccgagatagttataggctggatgggtccgagcctggagcggctggatccgcctaccgatgaagtctgcagcgacttcatatcccgacaagccccgttctcggagatcatcgatgatgtcgataaacgactgaagagagggggtcaaagggggcttggcggtccaggtcggaatcttgtccggttgattctcgggaacaacgaagacagggttcgagtccttgatctcaagatagaaccacctattccgccacttactgcgggaaggacactggaaggggatataacgcgacttcatgccatcacgaagtcggaacccgacgcaaccagacaccctattggattccatccaacgcagttcatagtagaaacggaagagatcgagaaaaagctctaccccaatgtaggcctcacagagatgaacaaagatactaagaaaggcgatggaattagaattcaaatggagaagagaaagaccatagaaattcaacaccaggagaagaaactcggaaggtggagaaagaaaatcgcagagaacgtaatctttgatcgcaaccatgcgacccaagaggggccgaggatcagtacctcctgcttctctctccatgtctccacggccgggaagggcgccgtcctcctgaaggttcttcaacgtcgcgccggtggaagacgacttgccgagatccattgctgtgccaagatcgccggaaaacaagcctgagttggcgaactagggtttcttgtggtggcggagaaggcaaggagcgctggcaggtggtgtgtgttcaacaaggttggcagacttgaaaatgagctcccaaaattcctttaaataagcgcactaccgacggtgcgaattccaaggaacggagagagatccccgccggaaatctctgggcccgttacgcgcagcagttttctggacttcaattcaaaattcactcatgaccgttgggcttcaaacggcatgctcgactacgttctatctccacggtcctcgcaccaggaatgacaacgttctcgacacccgaagtcgtaaatggttgcacgagttcattttaagcagaagttgggg

SEQ ID NO: 9628 - DNA, 13787 bp, Oryza sativa
tgcacaattaatgcaagggagtacaaggggataataatataggggttacgttttgcagtaaacagcatttaaaagtcacttagttgcccaaagccattttgtaaagacgattctagagctacacagtattattaaacaaggctgtgaaccctcacgaacctgccttaacccaaggcctacgatgatttggaccgaactggcaacccgacctgggtcccagctcgtcccaagccaacccaggccaaccattccatgttttagttgttgagcaaattttaagaattaaaacactgacttgggtacattgctaggcttgcccatatccgagggctcggctattcgaatagatttactctgatcagaggtgtacatctttacccacaagacacatcttcctcacgtgttaccacgcgccacataccaccacggtatacagacggaagacgtgacatagtttccaacccatcctagccataaacaagagtaccgacccaatcctgcctacggccgggatacccgggacaggcaggcagaactgagcccctagcattgggcaccaaccctccgccgtatgacatctcgactaccgggccgcagctcgtgtagccttcatttgccctggagaatgtccatcgacgcccgacttcatccatctccaatccgtgtacttttgtttaagactagactgagccacaaactaagccttacccattagacatgtggaagtacggtagtgctttgcaacagaggcccgagcttcatccttatagtggccggggtgctacttcccataactggcatgcacccaaaccccaccgaaaacaggttttaggggttttgaaagaggaagagaggtgtatgtccaattccaccataagccaaccattccatagtgtccaaatgatatgaaaattcccaaagtctaaagttataaaaccacctaatgttgcctaattaatcagcgaagcatctacctaaattcatactagtggaaccaggaatagagtgtccactagttggggttttgtttattctagggtgaacaaggtaataataacaatagcaataataatgtcataacaaaggtaaataggcatggctaaataaaacagtgataacgcgggaatttaaataaagcgataatgcattaatttaaattaaaataattttgtaaactgggatttcaatatgctcaaggatgatgtgacttgccttgctcgctttcccaaccaccggcttcaacttccacgaagagcggatcttccgaagctgcagcgtctacacgaccaacggaaaagaaaaggcttttactctaataaactccaaacaacaagcaggaacaaagcacaaaaatgggttcttgacttcttaaggaaaaattagagacttgaacggtccaattccgagttcaaatggccaagatatggccatttgaagtttatatgctctttaaatggatatttgcgaatttcttcatttaattttcaattaaaaattcctatttattgcgtcagccgagggagcgggcgcgcggaccgggtccacgggaagtggggcccacgcgtcagccgctcggtccacggtggaccgggcgctcgcggctggcggcggtcggcgccgtgggtcccgcgcgtcagccgcacccgcgggcgcgggcggctgacggccgggcccacttggcagccgcgagggcgcgcccgagggcggcctcgccggcgcggccgacgggagcggcgcgctcgcgccccgatggtcaccgccggcgaccaccggtgcggcggagcggcgcccgagagagcggagagaagggggaaagcgaacggcggtcttcggctcaccccgggacaacgacgacgacgagaacggcggccggagcggaagaaggcggcggcgcggttcgggatgacgatgacggcggcgctccgacggtcggcgagcgaaacggaggcgcggacgaggtcgacggcgatgcggcgatgccgagggaggtggcgccgagtcgggaggaggtccggagcggcggcggcggcggaacggagttcggcggcgacggcggagagagaggagcacggcgcgagcacgaatccgacggcgagagcgagcggtgagcggcggaaacggaagagcggagcacgggcaacgttttaatagcaccgggaggaggagagcgcggccggagagagaggaaacgggcgcggagatctcggccgccattgaagacgccggcgacgattgcgggatgaatccggacgaatccgagggagagagagaggggaaaacgggggaaacgggagagggaatcgcggggaataattcccccctcattaaggcgcgcggggaaggcgggatgcggcggatttggcggcggcggcggcgctagggcacgggcggcgacgggcgcggcgcgaggaggaagatgacaggtgggccccacccgtcagcgagggtggcgggcgggcccgcctgtcagcggcgcgcgcgcgcggggagccgatgggccggggggagagagagagagagagagggaatgggccgagccggcccaagagggaaggggggggggaaaagaacttcttttaggatttttctttttataaacctttttaactttgtttatttcttctcaattattatttgtgctctgaaaattccactaaaatttgagggctcctttttagaccaaggagaatttaacaaaaattctccgggccacatttgaatttttcttgtacgtattttagggtttgccaatttcttttcgaattttaattaattctattattccttttagaagatgatttttatttcgggatgaatttatcaggacgtgacagagggttgggaaccttcacttcccagcacacaaaatgaagcagcgtttagcgcgtgattaattaagttttagctattttttttcaaaaatggattaatatgatttttaaaacaactttcgtatagaaacttttgcaaaaaacgcaccgtttaacagtttgaaaagcgtgcgcgcgaaaaacggagaggaggagttgggaagatgtcctaccgaacgcagcctaaaaagaggactaacttgatggtacaaataaagcatctttactaacaataatattttacttttttaaaaaaagccactaaacattcaattaaaaaagacaaaatattttacttttaatttacgtttaattcgttagatatgttttttccaaacaaactaaatagatacttttgaaatatgagagatgtttatatggatcatagataattgtttgtacgaatgaattaaatattatatattttaaaagctaacaaatagtttggaaaaattatctaagcaatgccgatgaagtaaaattatggagaaatagtacttatgaaacatggcaatgtcattgagttgatattcgatctatataagtttttcgaacgcaatctaaaatacatgcccgcgcaatgcgcgggctaccttcctagttttatataatttgctgatagacatcgaaaaaaatgtgtcacggatgatagataatttttttttggtaatttgctaaaggacactttcggctcaattgaaaagataaatttttaagaaagactagaatgcgtctaggaacacatgcttcaaacatgacgttagtgtaaaaaaaattagaaattatacaactcaaaatttaccatcaccccaaatacatcactagcatactacatcatatttcatcttcactccagccttagctcaaaagtttttgatcatagagacattcttgtcgtttttaagattttctatctccaattaagtcgaaagtgtcctcagcaaattactagtttttaaaagtgtttttttagcagtgacacttttttacgatgtctaccatcaaattacatgaattttgaatatcttgtagcaaattttgccaattaattttgtgtcacaaagattatatgccttatcttttaagaaaagtagtactattttaaaaaaatctcagggtatgttcagattgattccaaaatgaaccttacaaaaatttgacaatatcaaaattttggcaaattgacaacattgctaaaattttggtcggattggcttaataatattgtcaaaattctatacacattaccaatatttggtgacaaactaaacgtatcgacataattgtcaattttaacaaataatgatatgattgaaattttcatcaatctaaacaagccctcgtaaccagaccttttatgaatgttgttagataacaatggcacacttcctccgttttatatattgtaagtcgttttaactatttttttcaaactttattagatataatcaaattatagacaaattagcaacatctaaaacacaaaattagtttcattatagaatatattttcataatatatttgttttgtacagaaaatatgattatattttatttataaacctagtaaaaaaaaaggttgaatatgaaaacgggaggatttaattggattgtaatgttgttttgagttttcaggcgtcagcgcaggagtgttggtggtgctagtggccttgttgttggcgtacgtgggcatggagaagaggaggatgctgagggcgaagcagaggttcttcgagcagaacggcggcctcctcctgcagcagcagctgggttccctggccgcctccggcgtggcgttcaagatcttctccgaggaggaggtcagcaaggcgacggacggcttcgccgaggcgcgggtcctcggccgcggaggccacggcgtcgtctaccggggctccctcgccgacggctccacggtggccgtgaagcggtcgagggtggtggaggagaagcagctcagggagttctccagggagatgctcatcctctcgcagatcaaccacaggaacgtcgtcaagctgctcggctgctgcctcgaggtccaggtccccatgctcgtgtacgagtacgtccccaacggcagcctccaccggtacatccacggcggcggcgccggagccggcgagggcctgtcgccggcggaccgtctccgcgtcgcggccgagtcggcggacgcgctggcgtacatgcactcgtcggcctcgcccccgatcctccacggcgacgtcaagtccgccaacatcctgctcgacgccgggctcacggccaaggtgtccgacttcggcgcgtcgaggctcgcgccggcggccgacgaggccgaggtggcgacgctggtgcaggggacttgcgggtacctcgacccggagtacctgctgacgtgccagctcaccagcaagagcgacgtgtacagcttcgcggtggtgctcctcgagctgctcacggggaggaaggccttctgcccgccgccggacagcgccgccggctcgcaggacgacgacgacgacgacgacgaccggagcctcgcgttcttcttcctcactgcggcgcacaagggacggcaccgggagatcatggacgggtgggtcagggaggaggtcggaggcgaggtgctcgacaacgccgcggagctggtgatgcagtgcctgagcatggccggagaggagaggccgaccatgaaggaggtcgccgacaggctcgccgggatgagaagccgcgcaagcgattcataaggaatggcagtacccagtccaaaaatataacaagctatctatatgaatttaaacagacactaatttatagatttatagttaaaaaatcgcaaaatctaaatcgagatcccttcgttttagtcttatcgcgcgatgctgggagagccatccgatcgctcgcatcattgtggactcgccgttggtagcttgaaaacctctctccttctccgacctctctcctgttgacactttttcatggccaacacaagatcatctaacgatttgcggtgtaatcagcagagtcgccaaaatcgatagatcaaaattggccagtgaaactgatttcaagattaattcactttcgcggaatcacacgactaatttacaagcaaattaacaaagaggataaaatcttacttacgtgacgacgaacgactagtttccgagcaaactagcaaaggataatcttctcgctttcgtggagaagcacgaccgcctttcagcgcaaacggcaaagattaactaaatcctagggttgctagaacttaaccatgaaaacgaaatagaaaagaaccgaaaagtaaaaaacgagaaaaatagtagattgataatttgttcggcgtcccttgccgacgtctgggatgcaaatttataggcggcgcacaccgcatcaaaagtctctcttcgtgggcccatccttccttcctatccaaatcggcactgcacgcatgcaatcaggccgttgatcttgcataatcttctcaacgtatccatctcattcaccgttgtagcctcatccggatttcctaataattcggctgcacctgcatgatccgtatacatatatatctccaaaccatgtgaaattctacagccacccaacaaactacgcacatatttaaccagttcttaggcaaaacattccataaataatgaaagctaaactaaataatttggcctaccaagattaaataatagaagccaaattacaccacaaacacatgccccctgttttcggtataagtagaatgtataacttttctttttaccgaaaacactgtaaaattaaccaacctaaaccacaattgtcatgtcaaaacgatactccacacacagtatcggtcccgagtccatccacagtcgtcctctcaaaacgacactccacacatggtatcggttctaaacccatccacagtcgtcctctcaaaacggtactcaaataagtattcgttctgagacaatcaagcttcctacaatacataagcataataatctttcaaatatttttcatgtagtacaaattttactactaattcggttgtccctaatatccacctaaccgaattagctcaacttatggtagttcttggaccaaaacattttaagaagagtaaatgacactagcggtccttaaacttatcttaaagtttcatccaggtccataaactatctaaactgtagttaacctcgttaaacttgttttattgtatcaatccggtccggagctcggtttgactggtttggtgcatacgtggacagccaggtgtcgcgacgcgtgtgacggccccatcctcgtggcctttttcacccaggaccctccccttcgtcaaatttcacaaaccctagcctcactctgttcgtagcatggatagatagtggcggcggagaggcgacggcggtgcgagcagcagtggccgacagttgagggcggtgcaacgagtcttgatgagccatggccttagcaagctgttctttgtgttcaagtcgtcgtcgtcggaggacctcaatcccacttatcttgtgcccttgatgcggggtgaagcaaatcgtggagcttactgctaacacggaagctaatcaaggccgcatattcttcacatgcccttcacacgaggtaaatcgattgaggttaattttttattgtgggggtattactgtttttgggggtaaatcttctgaaatctttgcttgttctaaaatgtacagaagggtggaagtggttgcgatttttggtattgggaggaagggtatattaaatacctgaataggaaaggcttgattgagcaaaacacttgtgcaaagttgctgaatgaagcaaaccagagggaaatgcagaggggaactgaagaaatcaagctggatgcagatgtgaagaagaagagcacggttcaagagattagaaaagatgcagatgttgaagaatttaagcaggctgatcatatgttgctcattttgagggagatgatggtgatgatgaagctcatgctagttggtggtgtgtgttcagttggtttgatagtgtgttgtttccttgttctatggtttaagtgatgtgtgcccattgtatcagtgaattttgggttgtattcaggctaaaccatactgtgttggtttgcaatgtgcaatgagatgtgaaacttttgaaatggtaatgtcaggtttgcagtctttagtacatttgtcatctgaaattgattatggagatgcaaacaaaatgaaaatatttacagactgacagtagatgcaaacaattttgcatagcagttttgcatagcatatccatcagttttgcatagcagtgagccatcagttttgcatagcatccatcagttgtgcacagtagatgccaaatatttcatgacataaagtctagagtaaatggcagcccaacatccatcagttttgcatagcagtgagccatagtttggcattacaaaagaaggtaaggtaggccattaggttggcagctacaaaagaataaaggtaggccattagtttggcattacaaaaggacaagcatgcttaacttctagcattcagttgcttcttaatctgttcctaatcctaagttatttctttgcaccatcagcacaatccttctacctcttcttagtagctttctttgctggagcaacaactgcagcctttcttttggttgctcttgcttttcctgcctttgttgcagtggtgagaagggttggcctgacagttggagtgttagtcatgacaaattgattgtcaggtaaaggcccaggtgctaggttcatttgagaaacttgagatgactcatcaaacatctgtgataccattgcattaggtatttgtgtcaacagttggtcatgggtaggaaaatgaggttgagattgagcctacaaaacaaaaccatatcatgacagttgcaaatcaaacctctagggtgacagttagtcataacagtttaaaatttgaaattgcattacctctgggctgattggatcagattcctcaacagtagtagtggcagccctctgtggctgttgtgtgggcctcagtccagtttttttgagcttgcagcccctttggttgtggccaggctcattgcaatacttgcaatgcatctcaacaccatgcttggacatttttagcccatgcttcccctggacttcatgtggtgctttcctcctggacttaggtggcctgcccactttcttttcatatactggaggcctcacttctggcccatttgtcttctcccatttagaaatgtcactgcatggtcaaatgttgaacccatatgcttttgaaaatgcctccacactgtaacaggatggcaacactgactcagcactagaagctgtcgcagcggcttctccaatcgtcgcattcccctctacagctctacccccaccacactctcaccctgcggctgcgtgttgctgcggttccgaccagcggcggcggcagctgtctccatccccggcggcggcttctagctccatccccggcgtcgaggtgagcccttcgtttaccccctttccccactccacacccaacctcttgctaccccatgctttttctcccccaaatccgaaaagtttttttttttgtgttttgcatgtggtctactagatgtgaatgtgttctagtaatgacattaattttttttcagaatgtttttaggtataatttatgaggatgcatttatgagatccccctagatgtgaaaggaatttttttattgtctgtgttgcatgtggcctcctagatgtgattgtactctagtagttatattaatttgtcacagaaggataatctatgatgatctattatgagatatatttgataatctataatatatagtttgcactgtgattgttttcatatggtggtttttttgttttaccatttttgtactgttataatctattatgcatttttttattttttcccttttttgtgttcccatccatgcatatacaatgttgtagtacacattaatattatgtttcatagttttccctggtttgtcttacatagtagtatacacatttttttttgttgcagagcacatgttgtatttttgtctcagacttttttgtgttctatgtgttttttttcaaggatgcctgattggtgtagtggttccaacttcaagcatagatggggcggtgtgaggtttaagcgcactatgcttgagttgaaacccgatcaaaagaaattcatcatagataatggctttgagtcttttctatcactaagcaatttcaaggtccatagtcgacttgcagaatggattatgcaaaagatgaacccagagatttgtgagtttaggttccgtggcaaggttatcgtgtttgataagttgttagtacagaagattactgggctaaatgatggcgatctacctgttaagcttagtggtgccaacagtgaagttgtaaaagagatcaggaccctgtaccatccatattttgtcagcaatagacttggtacaggcatgtgcgagaaattgttgctttctctgcatgatgaagagaagttcttgaggactttcattttgtacttgcttgccaccatcttgtgtcctgccaccggcaattatgtgaatctcgactatttgcattctttggttgatgtcaagatgtgtagtcagtatgattggtgcacacatgtggcgagctgtttgatgcgggaaatcaggaaatatcagggattctctactgagcaacgagattccatttttcagattggagagtgcctccccttgcttgttgtaagttttttattgtttcaccctgctatatatatgttttattgttttcattgtcgtgcttgatccaatatttcagtaaaatacatccatttgtctcatttaacatatatgttttgtttcacacaactgctgtcatatgtttcagtaaataatcagtctagcatgctaataacctacgtatatgtttcagcaaaatatatcaattgtttcatattacacataggatctgtttcatgcaatgctaccatatgttccatttcatatttttttggccaatgtgctcctgctaactacctatatcaaatgccattttttagattgcttacatggatcatttgcaaatgccaacaactggactgcatctccgcatcattgactacaacacaccaagattttgtcatgtcactgatgaggactttgagtatgttgctgttgtagaccgttgtaggatgaaccttggctatgtcacatatgggtctcgcccggtatgtttcacaactttgaatgttttagtatatatacattatgtgtttcaccacttattaagactatgtttcatctttttatttcttcagttccatccacggaatgagatcccatatctagcccaagtccatgctgttgttggtgggtctgaggctgagaatgctggggttgcaagggctgaggatgttccaattggtgctgttcaagatggtgtaggcattggagctgctgtcgcccaagatagtgttgctcaagattctgcttcattgaatgaatggatcaggctatctgcctcaagcagccaagggactacggtaaaaattttcttcactttttcactgaccctcttctcttatctacatttttgcctttttttttgtttctaacttgttcctctcttttgtttcattttgtctcagttttcagcaagcttaaaatctagtattgagaagcacagtgccatgtggcaggatgagtttgtttcagcacttgacaacttcaagagggacatgattgatttgcgtgcaaaaagaacatgtgatatgatttctgacataagcaaggtgctagctgacagcaacactgcagtgggcatttccgaggctgtttcaaacccaccaagcactgggttggcagctgaggttgtttcaaacacaccaagcactgagggggtagctgaggccgtttcaaaaccatcaagcattgagggggcagctgaggctacagattttgatggaccaagccaggaagcttctggcggttctgtgccaagcagcccagctattgatgattatatttttgcttcccactctgatatctcaaatctagatgatgcatgtgatgcaccgtcattcagactcttcaatgaatctgatcctgatttcattagtactcaggacttggctgttgagatgctctccttggatgtttcaaatgttcctcaatcggcaatggatggaaggataccttctccatcacctcagtcacctgtttctgcaaggacatcttctgcaactccttcacccactgcaaggacaccttctccagcccccccttcacccattgcaacaaaaacatcaacttcagtagttctctctctagcagcagtaagggcaacatccccagctacatcttcaccgccacgtgctacaagctcgctcctctaggtaaaatcaccacttttttgttccttctctttctctatctctctctctctctcttttcggtgtgggtaaagtaactatgaacaacacccctacccctctctaatgttttttcctctatagtaggtgctggtagtagtggtccaagcacccatgagaagaaaaataggaagaaaagggcacagaaaggtgatagtgatgtagaggcgaagaagttgaagaccgcttctgaaatagatgatgtgtacagaagatctgttgttgattctttgccaaataggtcaaggaaggcagatgccaaagagttgtaagtgttttcacacttttttttgcgcaaaatatgtttcaacctttttattattaatatgtttcagtgtaggttcccctattgtttcatcagtcactatgacatgtctcaataaatgcaaaacatttgtttcagaacagctttatctgaattttttcccaactttttttttgggaaaaacaggacaactccattcttaaggattggagaattccatgtctcacttgagtatttccgtgaagcaatgaaacctagaggagagttgaacaatgaagttatgtcatgttggattgagatgttcaatgcaaactgtagggaagattctaagatgaaatcaagcataaaaaaatttgtttttcccctggcttgacggtaacatgttttaaccaccccctttttattacatctatttttgtttttgtttttttgcttttaattcaattgttccctttttttccttaggataaattgatttgcaatcctgagaagtttgtgtctgaaagctgtgtaaaatggctgaaatcaatcaacaaggagcataaacttcctaaactagatctggtaccagtttcccatccctctgattttttttcatgtttcagttagtctgctgatatgtttcacaacatactaatacaatgtttcagctatttttaacactatgtttcaatgatcatttatttgtttcaattgttagtttcaccatatgctaacatattgtttcattcatagctgttccttgttccagttatcatttaatatatgctactttttttgcctcccaccccatcaagttgttcttcccaattgtacgtgacaagcattgggtgctgacttgcatcaaccatttgcgggaacaaataaattactttgattcaatcaagagggatgatatttctcagtggttcatactctctcaaaacctggtaagatgttcactggaacaccatgtgttccattataattttttaattgtttcattgagttttaagttcttttttttgtcccaatgccgatgtgccgttcaggtcacaaatttcaccaaggttgcagtggatgctaaaattccaatcaaagatatatcaaagtttcagacttgctctcctccacagtatccagtacaaagcaatttatatgttttgtttccaaattgttgtttcatttttcttttttttttgtgcacaagtgtgtcattttaacttatcacttgcttttccatgc

SEQ ID NO: 9629 - DNA, 60580 bp, Oryza sativa
ttttattaaactatttagactaaaatattagcaaggtttaccactgttgaattgtcagttaaaaagtccattgtgttgcattgccgtttctgaaaaaatagagagaatttacagtaaaaaccaacatgatgtgtgtgctattttagttgttgtgtagtgttcaataaatagaaatagcattttgaacttgaaacaattagactaaccttagaagcagtactatacttgtttaggcttggtctaacaagcttgcgggtaaggttctctttgttctgcaatacaatcattataactagtaaatcatgtgtgttatagtttcaaagagcttatatctgtagacatggtgacttaaagtgatgaaaaaataaccttgtgtgtacttgtaactttgtgtgcattcaacatatagttgtcctggttgtcaggtttattgttctacagtggaaggtaacaaataaattttacaaatctatatatatatttatatatcgaaattaagctactttcaaacacttattgactatggcattgagtttgaaaggataaagagagaacttaatcaacttaccttgtatgcactagaaatactcttccctggttgcataagctcattctggtccaaatttcctttgcgctgcaatggaataggtcataaaattggcacaaactataatgttccaattatttgtttactctgacatcatgcactccaattaatgaaaaagtgaaaattaaccttgtttgcacaggaagtaatcttcctttgcttcccactgtgattctggcccaaagactgtgtattctagagtaaaagaaggcatatgattataatgaatgctatgtaaataatagtgaatatatatatatataataatattttaaatgcaaaggcaaggaccttgtaaacagtagaatgcttagttggtggttgcaaattctcatcgtgcacatggctttgtgtattctatagtaaaagagagaaaataaatgctattcccaagtaaaaaaacacagctattcccagttataagatggtgctatatcacattaccatcaaactgttgtcctgctgatccataatgtttccctcctcaaacatacaaatttcttgcgaggggttgtcaccatacactctctgtccataacagaaaatgaacagagatctataccacagtttatgagataatgcagaaaatgttatgatatttcttccataaagatacatagcctcctttttgaattaggtatgtcatcacaaatagcttctttgtttgtagacgctccatctaaacctccctgtaacttcaattaggtaagttagatgcattcattgggtcacacacaagctcatataatttttttaagactcaactcccttaaattcacctgattcttttgtgccttttccaacttggttgccttctcttttaattgtaaaagtttagcatcattattctcaacatggcgttctaacttttccatctgcagtctaatagccattacatcttcactggagttatcctccactgtagtaagatttatattctgcaaacgtcgggaagttggcacatcaagcacttgtttaggctttggaactagtccaagaccatgcacacgcccaggcttgtcatctcctagtatttggttcaatgcatctcctttccaagcagtctttcctttactagcatccgctaaagctggttgttcagctataagtctcttcaaattatcctaaacatatgaaaaattaatacgaataaaacaacatatgagaataactgaaaaatatctatggttgagtgttaatagtataccacatgcccatttatattcttgtcacttttgcgcttgtgtgtgtggacataaacaacagctctatgtgggttcttctttgcaggatctttttgtctctatggaacacatgaccaaatcagtaaagtcctaacagtagctatacatgcttgaaatggaaatagatgaatactattcaagacatgttttaccatctcttctcttgtgcgagcaaaactctttgtccctgctgtgtgaattgccttcttcttttggcagtttttcttattctgctcacttattctctgttatggtctcgtagagttagcaatcaaaaaagaatattgcattgttttgtttagtacagagttctaatttgtaagaccattacagaaatgaatatggtacatgtaccttcgatttctcgttcatccaatgattgacaagagcaatccactggtcagaaagcacaccttctgggacattgttgcaattagcttccttagtctcattcacatcaaaatacaaatcttttagttttgctttatattgccgccatctttctccaattttttttaatatgaactcttccatccgaggagcataaaggaatctcatctacatatagcaacacagaaactcatatggccatatggggatatgcataacataatacaagaagttagcaaaaatgttgatctgaaaaggaattacctttacttgcttaagtatgtcctttttaacttttagttcatttgtatttttctctctctttcctattacatatctccagtctgtgtagcctaagctacacagactaccattcctagctatcattccaagaaatttacccaaaattccagcttcttcccctaccgcctgattgagatcattgcattgaaccacaattctaagccctttcggaaggttccaaacatctttcagttttgtcttgccacgtgtttcaggtgctccattttcaactgttcggtgttaaattgcaaagacaaaagtgatccttagtaatcagggatacgagtaataatgtcattatttcttaccattaggactgttaaacttagcagttacctcgaacattaatatcaacatcagtatcttcattgccttcatcatcaatatcaacatcgtcattagtgtcttcattaccttctccatcattgatatcaaaatcgtcatcaatgtcttcattgccttctccagaatcatgacatacagtttcttgttcagatggtgtggcaagctgtggaagggtattttcttcttcaatctgttcctctgacaaatattcctcattgctctgaacaatacgccttcttctactccttgccatatctcttgcacccaaaaaaaacctatctgtcatttatggcgtcgaaagtatatcattctcattttagaagtaggactgtgctgtacatagtttcagaaagaataatttcagaattgattataccctgagccattttggatttgtttttgaagaacaacagagtactgctgtcccaaaagtaatgctataatatggatctgtttgtcatactcactaattcatttgtccattttataggccaacaatttgaaacaagtaatgggtagaaataacaaaatttaattggctgcaaggtaaaactagatcacatattgtattgcttacagttgtgtgaagcctagccgtacgtacaccaggctccttcagctatggacggtcagtgcatctgactccaaacctgaaaatacaacacatcaaattggtaagtattgtagtactggaagggaattagcctccattgcaatttggcgactcagagaggtagtaagatgtgcagagggaggcagagattccggggcttggaaacattgccgccagccgcgcggcgtggagcagagcgaagtggacagccggtgtcgggaggtataacccgcatcaattgcagtgccccggtcacccggcacatcggctgggggcgtctctggcccgccgcatgccctacgtcatccatggggcatgggggtcgcctgctcgtggctgttaatcggcaggaaggtgcgacagcagcgatggctggtacagcagccggcggagcggagcggtggaagatctaggagcgcctgcttggggctgtgggtcagtaaagcgcccggcatcttacctacagatcaacaccgatgaagacgaggaggagaaccgtagaacgacgggagagttcataggagaaaggaatcccacaacaggaaagagatttactcagagagtcaggatagaggaaagagatttttaggggcagttggcttgtttttctcgatggggaaggtgggggcaaaaaaaaaagttggcggcaaaaaaaagaaaactgagaaaaaaattgcgggagcaaaaaaaaaggagggaaagagtggagggagaagaaaataattttcggagaggcacaaattgctaaattcagatcgatttggggttgatttgtccgtcaaactagttatttaaattatattagcacgataaaaaaatcacgtgttatttcattgtcgatcttgaccggacagaccgcatgaaaaattatatataattaaataacagtaatttaattttttttagcacaaccaaaaaacaagtgttttttcgttgtcggcccggtctggacagactggatgaaatttggacgtaacatattttggtcttaaaatagtacttatttaatttatctaagcacgaccgaaaagactggacgtaaaatttgtgttaaaatagtagttagttaatttatcatagaacgacaaaaaaaacacgtgttttttcattgttgacccggtccgaacaaacgggatgaaattcggacataacatatttttgtcttaaaatagtagttatttagtttatattagaacaaccgaaaagacacgtgtttttccattgtcgacctggtccggatagactgcatgaaaaagtggcataatatattttaggtcttaaaatatagttaattaaaaatgttagcacgacaaaaaaatcatgtgttatttcattgtcgacccggtccggacagaccgcatggaaaagagatgcaatatatttttggtcttaaaatatagttatttaaaaaatgttagcacgaccaaaaaatcacgtgttatttcattgccgacccgttccggacagaccacatgaaaaatatatataattaaataacagtgatttaattttttaggacaacaaaaaaccacgtgttttttaattgtcgacacgatccggacagaccgtatgaaatctgtacgtaaaatatttttttgtcttaaaatagtagttagttaatttatcatagcacaacaaaaacacgtgttttttcgttgtcgacccggtccggacagaccggatgaaatccggatattctgaaaataagtttttgaatggtttatttttaaaatttaaaaataaaaaagttcaaaaaattaaaaaatttctggggcaacagaattttttttcccgttcaaggagaggaaaaagtttttaggaattgccactagagaagaaatgaaaaaattatgcatttgctagttctcgaactggagttgtcaatacagtagaagaagctaagtaccactaggctatgtcccccttatttattttttcacgttagctgcaattgagaatgtaaatagacttctccaggtatttatataagatggaaatttaaattctgttagcacgaccgaaaaggcacgtgctatttcgttgtcgaccagtctggacagaccgtatgaaattgagatgtaaaatatttttggtcataaaataatagttatttaaattatgtttgcaagactgataaaccacttgttttttcttgtcgacacggtctggacaagccgtataaaattaggatgtaaaatattttttctttaaataattgttatttaatttatgttagcacgaccaaaaaaaccacatgttttttcgttgtcgtctcggtccatactgatcgcatgatcaaatccataacatattttgtcctaaaataatagttgctgtggccaaaaatatttatattgaaaaaataagttttcgatcggtttaattttaaaattaaaaataaaaagttcaaaaaattctcgttatctggccagctaagaaggatagggaaaaaaaagaaatggaaaaaatgcatttgttaggatttgaactacagtcttcaatacggctgaagaagccatgtaccaccaggccatgtccacttcatgttggagttgtccgttcgacttacttattcacattaggtgccattgacaacataaataattttctccaggtatttatatagttggaaatggaataacataacacaatagatgcaaagattataaacgcccattcctttttctcatcatataaacaatatgatatcctggatatttaaaaataagatctaaccaccaattctgtatataactaatgtagaacattattacaggacttatgtatgcaaataaaaagttgaatcgatctggctcaatcacttagacaatccaaggaaatatacgaatgacattttcatccagaaaagctattgtggtgaagaagccttcatcgcagtaaatctccatccaaaattactgccataaaaataaagtgctccccaagtgaagatataaacaatataaggaaatcattgataatggatagatagatagtgaaaaaccttcataacctcacctttaattagttaccatgttatcgacagttgttccttctatatctcttcgaatccatgtctgaccatcatgtgcactgtcaaatagctccccaagattactgacatggtatggttcgcattccacatcattccattcttcgcccagttcaaatacatctctgggtttcatcttccttacaatagaccaccctggatttaaatggtcttcaatgtaaaacacttggtcgacttgatttgcaaatacaaagggctcatgctcaatcttttcaccggtatgaattttatttgagaaattcacaagtgtgcagccaaacttatctattttcactccttttcctttagttacatcgacccattcacatttaaacaacacaactgagaaatttccatagtagtctaactcaattatatcaagtatccttccgtaatacatgatatcaccaaggacagggttagtatcactggcggacgtgtagctcgatgtttttgcagtcacaacaactccactgttttgagtcaccctgtcataacgctttgatctgaacctatacccacgggtattgaatgctctatgtcgttttgctacctcaattggtccacgtgccaaccatctaatatcctcgtcaatactatcgatacctctttgattctccaactgcaagatctacaccaaaccaaaagatgtattagttgtactcatatttgaaaaagagaaacctaaattttgagacttacatgatctctgaaccaatcagggaattgttcattttgcatgttctcaatgttttttggagttagccttttgcgtttcttcctttgtaaatcagcagcatgttctctgcaaaacaaataaacataaatttgaagcaaaacacttacaacacataaaaaaaaaggctatgtgtcgaaacatgaattcggcaataataaaaggggtagcgcacgagacctaaaagtggatggatgcggagacaaaggatttagacaggttcaggccctctcaatgagaggtaataccctactcctgtttggggatttgaatccgccgagtatgtattgatgtgacgatcaggttgtctcatgccccctagagggcctcctgcccaccttatatagggtggggggcaggattacaagatagaaaccttaaccaatacggtatcggtttcctaaatctactttacaatattatcaaaccaggactttaggctgttccgtaatatataaggaaacgtaatacccgagtcatgatctattacatattccatagatataagttatcccctatgactagtcggataaccatgccgtatgggtatggggtacccataatatccacagtagcccctgagaccttcgcagtcgaaaagataattttctctcgaaccagattactccaaagccgagtgcttcaatcatctttgtcatggtctcccgagtacttttaccaaatctgaagactgtggaggctgtggagggctggaaaataaagtcaggtgcaccgactagatgcacctaataggtgtagcccccgacaatgtggttaattgaacaaaccaagcatatagtcaaggaataaataatccaaccaaccgagtggttttgataatcgtaatcaaccaagtgacttgatatcaatatatagcatatgcggtgtgaatcctccaaataacatgatccgagtgatataccaactgctttgtaaaatatgatgagtgatatagcaaaatagctataaagaagcttgtatattgtgaataaagaaatttccaaagtattgggcatacgccatgcgcacactgctttaacagatgtgcttaagtccctagaagacacatggtttcaccacacctggaaatatatggcatatgtggtgtaaaatctgagtaaataaactcataaaggatttaccaaccgcctagaaaatgaccacaatatataatcagcctaagccataatattggtcaataaaaatgcacacttacgtggcgaaaagcaatgatattgtacctaatcaattgcttaaaaacccaaacagcaccttgacttatatataaaaaagtcagcgggacagttatataaagctttactgtttgacaccttttaagatgcattgtaccaactcctaaaaagttaagtaactgcggtataaaaggattttaaggtattgggcacttgatcacgcgcactttggcctaagcaaaaagtgcctaagtccctaaaagaacgtgacaggccacacctgaaaatatgggctgcagacatattaggcctaggccaaaaaatatgccttcgacaccctttaaaggatgacgcatgtgacatgctcccgagtaataaatcttccgagtaatatagaccaagcgtagctcatatgaatagcttctgatctgagtggttatcccttatgggatactccaaaatagatgtaacaattgaatcccgactggcgcaagtattcagttgataacccttacggggaataataaataatccagtctttgagcatataaaatagacccatgatcatgaattcatgttgcatgtatccggagcaagtccaaattgaagatataatacttgtatttgagctaataagcccctgaacacgtagtcacaattgttcattgatggtagctgacgcagttggcatagagacaagacaaccaatatagagagaatattgcccaccagaggtggcaaaaatattggtggtagtgaagatagtgataccaatcaaaagtactgaagtcgcatagccatggaggcgaagaaaccagtcggcggcagtcaggtcagccagcaatgaatatgaaggcgctcagcgataaagttgtgtagttgacgacgacaaacgcaaccgacatgatgaagatgacgatgtcggtgatccagccaatagcagtgtagcaaccaatgataatgacaaagacgctcatcagcatttgcatagtaggtcaaccgtgaaggtgaaataataagtcggcgaaaacataatcatccattagcaacagcagagatgtcagggtcgatgaagcagaggtgctggtgatgatgtcagtgacaataatccatcaaattaatgttataactgttgtagatgcttcacttggaggagagttgatgttgttgcccaactcgtctaaaccgaaatatttgaagttgttgaagtagaatgtctgctccgaagcaaagatgaagataatgactcctggagttgactcgttggttgatgaattaatttcttcagcttgacataaaatttgtcaaattttgagccttgtatttgtgtagcccccgactctttgattagttgggaaacaactgaacatagagtcgagaattatagcttcttgtcgtcgagtagtcattgcttgattgaagatatgtgttgaagatgtccaagtagaaatccggtagtgaagacgcgcagttgtgaagataaaagcaccagtcggcggcggcataatcagtcggcgacggaagatgatgatgtccatcagtagtggtagctgtataaaccagatgtagaggcgaggacactagtcagcagcagacgagatgaccagcgatgaagatggtaaggccaatcaacactggcagaatcatgcagccatggaagtgaagaaaccagtcggcagccatggcaaacgtaggcagcttgtgttgaagatattgatgcctattagtagtgacagcgatgtagccagccgtgaagaagatagcatcagttggcgttataacaggccagctgtgcaggcggtgacaccagtcagcggcggatgcggcggccggtcggtgaagacgtagacgcccaacaacggcagcataataggccagccgtgcaggcggaaacaccagtcggcggcggtcgaggcggccggtcggtgaagacgtagacgcccaacaacggcggcataaaggccagccgtgcaggcggaagcaccagtcggcggcggacgaggcggccggtcggtgaagacatagacgcccaacaacggcagcataataggccagccgtgcaggcggaagcaccagtcggcggcggacgaggcggccggtcggtgaagacgtagacgcccaacaacggcggcataaaggccagccgtgcaggcggaaacaccagtcggcagcggcgaaggcaagccggtcggtaaagacgtagacgcccaacaacggcggcataaaggccagccgtgcaggcgaggacaccagtcggcggcgacgaaggcaagccggtcggtgaagacgtagacgcccaacaacggcagcataataggccagccgtgcaggcggaaacaccagtcggcggcggcgaaggcaagccggtcggtgaagacgtaggcgcctaacaacggcggcataataggccagccgtgcaggcggaaacaccagtcggcggcggccgaggcgagccggtggtgatgttctgactgatccattcctggagcgtaagagataagcttaaagccatgaatcccttttatgcatatctggatctggatcctgcagaacaaacatataggatgagtagtatctgatataaatataatactcgagaaaaaatcaagtattttaaaatatttataaatatgtatttctcctcttgtcaattttgatttccccgagcagatgactctgtacgtttaaacactctgtccgactagtcatagcccacaagcatcgggagtcggcctaggcatttcccaaacatgcatatgagtgatatgagttcgtcattaatggaacaaagtttcacggatcagaatttactactcgggtacttttgcaattattaagagcagaaaataaatttatctcatctctatgcttttgatttattccgaataatacttagcaccttgcgttactcggtccatccaacgagcccccgggtgctaggaatcggcccaaaggcaaccatccattagcaaaccaaacggaaagcataggaagatagaactccataactcgataggtacttttgtactcagattatgtcgcaagcaatcaagataaatattataaaaaatatgatataacatctgtagcccccgactcactactcaatggaagaccaattggtgtagtgaggcagaggaaaaggaaaaatatcatataaaaaataaaataaatgatgacttagctttgtaatattccccttggagatggcagaagtggccaatgtgggaacaaagtcgtccatcaataacaatgaagacaccagtcggcggcgacgaaggcggtcgacggtgaaagcgaaaatgcccactaatggcggcataataggtcagccgtgcaggcggaggcaccactcggcggcgacggaggcaggccggtggtgaagtcgtagacgcccaacagcggcggcataataggccagccgtgtagacggaggcaccactcggcggcgacggaggcaggccggcggtgaagtcgtagacgcccaacagcggcggcataataggccagccgtgtaggcggaggcaccactcggcggcgacggaggcaggccggcggtgaagtcgtagacgcccaacagcggcggcataataggccagccgtgtaggcggaggcaccactcggcggcgacggaggcaggccggcggtgaagtcgtagacgcccaacagcggcggcataataggccagccgtgtaggcggaggcaccaatcggcggcgacggaggcaggccggcggtgaagtcgtagacgcccaacagcggcggcataacaggccagccgtgcagacggaaacacaagtcggcaagagtagtgccgcggcgttacatgcaaaaagcagaaaataccaagagagattaatctgacatttagagatcaatctaataaacaacaataagttgaaaaggaaaaaaacccggtgaagtcggagattaaaaggaaaaaactcgccgagattgatctcttcgactgactccgagacggagcggaggaggcggaggtcgcagtcgcgggcggcgttggtgtccatcagcacgacgcaggacggcaggaaggcatcggcgtggctgcagccgtctcctatgcatccgattagatcggttttggcatgcttcgtgtttgtagatccatcttgcaacaccatggcatcctcgttgggtagattggaccagtaggcttggtggtggacgaggacgaccatcaaatccgtcgaactgtcgttgccccgtcgttgccgtcgtgctgatgcgaacaagatcaggcagagaatagcagcgacgattcgtcttgttgaagtcgtcggcggcgaggaatcaaggagctcccaaagcgaagacgaagccggcgactcataaagttgattccatcgcactcgtcgtcaggaaactcggcgtttacccctacctggcgcgccaactgtcgaaacatgaattcggcaataataaaagggggtagcgcacgagacctaaaagtggatggatgtagagacaaaggatttagacaggttcaggccctctcaatgagaggtaataccctactcctgtttggggatttgaatccgccgggtgtgtattgatctgacgatcaggttgtctcatctgccccctagagggcctcctgcccaccttatataggatggggggtaggattacaagatagaaaccttaaccaatacggtatcggtttcctaaatctactttacaatattatcaaaccaggactttaggccgttccgtaatatacaaggaaacgtaacacccaagtcatgatctgttacatattacataaatataagttatcccctataactagtcggataaccatgccgtatgggtatggggtacccataatatccacactatgttaggacaatacgtacttcagatatggcactacagcatcacagttgtatagcacatatctatgtgcttgcaatttctctctatcagttaaggagtacgccgatggttttcccaatggttttcctactggaggaaacaaagtggattcttgcctactcatgggagtctcaaattgatctggtttgtcattattccttgatggtatgttatgcttggtagggaaaccttccaagtatcgtgaacaaaatgccatgcactcatctgccaaatatgattctgcaattgaaccttctggacgcgctttgttgcgaacatacgacttcaatttacccaggtacctgtaatatacatacaaggcacaaaactaataagttagtattgtatcatatgacatatgagaaatattataaattgtatgctaatatatttttagtacctttcaataaagtacatccatcgatagcaaactggcccagcaatcttacattcagtagctaaatggacgactaagtgaaccataacagtgaagaatccaggaggaaatatcatttccattctgcacaatgtgattttaattgcttcttccaaacggtcaagctcatcaacatggagaacttttgaacatattcctcgaaagtaagcagataagtcaaacaagacagatgtgatttcatcgggaagaatacccctcaaagcaattggcatcaattgttgcattagaacatggcaatcatgtgttttgagcccatgaatttttccttcagcagagttcacacatctagatatgtttgaagaatagccatcaggaacttttatatccctaagaactttacagaacaattgcttctcacttttggacatagtaaagctggcaggtggtaagtagaacttgcttgaagttctttgttgtggatggagctcccctctaatgttcatttccttgagatcaagacgagcttggagattatcctttgactttccttctaaatttagaagtgtaccataaatattatcgcacacatttttttctatgtgcatcacatcaagattatgccgaagaagattgccatcccaataaggtagtgtgaataaactacttactgccttataagtttttgacttcttaaaatcaccgatagcatttatttcatccaataccggacgcccatagtaagtcataggctctgtactaatctctgtggttccatcaaaagaatttctatcaaaacgaaattcatgattaggtggcaaaaatcgacgatgacccataaaacaagatttcttcccatgtgccaaacgtttggaccatacatttggaccacaaggcgggcatgcaaattctccatgcaccatatgtgaagcaagcattcctaaagctggcaagtcatttatagtccacagtacagctgccctcaaattaaaagtttcatttctagatgcatcatatgtggaaatgccattgacaaatatgtctcttaaatcttctagaagcggctggaggaaaacatgaatgttatctccaggacttttgggcccaggaattattaatggcattagaagattaggttccttcatgcagagccatggtggaagattatatattactaaaacaactggccagcaactataggtagagctcaacataccatatgggttaaacccatctgtagctaacccaaatcgtatattacgagaatcagatgcaaattgcttgaaccttttatcaaagttcttccatgccggagaatcagctggatgtcgaagcacaccatcctctactaagcgctcttcatcatgccaacgtgggagcgatgctgtttctctacacatgaacaatcttttcagcctctcctttattggaaaatatcgtaagactttgcttggcgttgctttctttctttctttcttcgttaacttggtttctggttttttatctttccatctagaagccttacaagttgaacaaaaatcatcattaaccttctctttccaaaacagctgacagttattgggacatgcatgaatttgttgataatctagaccaaattttgaaaccaccttcttagcctcataaaagttttttggcaattcttttccatttggaattgccatgtgaagaatatcaagtagatctccaaatgatttatcactccatttgttcatggatttcatattgaacaaaagcactagcagagataagtgtgatagttcacttccatcccataaaggcttctctgaatctttcaccaacttataaaatgcttgagcttctaaatttggtccatcagtgtgtgtacatggcgaatctgcagaatcactcataggcatgtcgtcatacacagtcctaagtgcatcattaattaattcgtgcatgttagcacgcatgtcttcattgtgaggctgtggttgttggttcctaatttgctcctctgaagactcaccatgaaaatcccattggtcataactctgaagcattccattgcacaccaaatgatcatagacatcattttttgaaagtagcatagtatgtacgcatgtttcacatggacaataaatcaataaatctttgtatcctctaacttaaatcaataaatctttgtatcctctaacttatctttatatacaaattcaagaaatccatctactccagctaagtactcaacagaacctctagggtagcgcaaaagaatcttgatggtttctaaatccatttcgacctatataaaaaaaattgatatttcaggttcttgtagataataacaatgacaaggaattgtctcttatgatcatgatgtagcaaaaatagggcaattagaaaagtaccagtataaaatcagtgtcagctaattttgtcacaacctaatagacctcctttatacactgaaacaaaagcttttactctgcaaaaatagagaagagctaaatcaatttacagaaaaaacatccagcaatctaatgtcaaagctgtcatctccaagttaaattccttactataaattacctctagttaatctacagatgatgactccagaagcacatgtgtttaaaacctatgttccaaatatccgttcggatgaacaagaaaaatctgcaggtgttattaaactcaatcagatagactcatgatgcaacaaacctgaataataaaaaaaaaagctgacattgacctggatctgacactgacctggatttggggccaaatggggaatcaacctatgagaagtggctaagaaaaggaccgtgcttgccgttgacccgctgtcgtcggcctcggcccgtcgccggcctgccgcggccgatcccctcgcgggctcgccgccgccgctgctgagaacgcgccgctggccgccgatgcgcgctgccgccgccgccgtcggtgtgcgccgtggcagtgatgtgcgagagcgtgagaagaaaatgagatgcagtgtgggaacaggatggggcggcgctctcgtgcgtgttgggtgaggtgagagacacgagaggagaggagagaaggtgggagattaaggttgcctgctaaagtgcacagatcgtattttagttgttataatataaacaactaaagaaatcatttaataagaaatgtgattagctcagttggttcggttgtgcatattctatcctagagacctaggttcgaatcatctgtttgcatctttgcccccctaatttattcctatcaggtatcagcagcctatttttttcccctatcagcagccacttcgcttgtggcatttttttttaaaaaaactcgcttgataaattttttagaaaacaaaaacagcacgcccagtacacaatgtaaaaaaacagctcgctcaattattattattttttaaaaagcatgcttagtccaaaagttttaacaggaaaaaaaaaagcaactcacttcataatttcttttaaaaaacagttcgctagaggtccgaaatgtaaaaataaatatctcgctcgattattttaaaaaatacaataagttcgcttattctaaaagtttttatagggcatcaagaccattgcaacgcatgatatctgttgtaaagtggattcggccgttgcaagatactcaatctctgcaacgcatgttctgcaacacatattatctattgcaaattgggctcacccactactaagcgttgctagggtcgcattttggcaacgcatgcttaatgcgttgccaagcatgtattgctagaggggggttcttgttgtagtgttgcaagaatgaaaaaaacaaagtcggcttgatgcatcggctcattcgagcagctccagttcacaccgaccagattccaaagaataatagaatgaacattttaacaacttgatcaatcgagttcaatcatagaataaacattttaatcggctcgattcaatcaagttcgatctaacataaaagaacaaaatcaacacacaacaacacatagaaagagttgatgaagccacactaagaacacaagaacactaagaacacaacaatagtaagcctgccgctcaccgttgccaatgtcagggagcacgctgctaccaccacctctgggtggggaacccaccgtctccccttccgttggatctggcgtcggggacggcgccaccgctactactcacgggaggagaggttgttgcctccgttgccaccactgggtggggagcccgccgccatccctcttgctggatctggtgaaggggaaggtgccaccaccgccactatgtagggagccccatgcctaccctccaaccagatttagcggtgggagggcgtcaccgctcgcaggtgggaagagagaggcgcgatggagagtgtcgttcacttctcaccttatctgttcgtgaggataaagatgaacagtcggcttggtttgtcttttactggtgctgtttttagaaaaccgacacctacaatatattataggtgttggtttttaattaactgaacttatgataaattaaacgtgttggttttttttaaaaaaacaatgtgcacctataatattggtttcaatttatctctagaaccaacacctatagtcacttaaaggtgccggttgtttattttaggtgccggttgtttatgttttcagcctacgggggtgggaaaagttatgggaaattttgctacagaacactttttatgtatggttttacccataggacattgcccagactcacttttgggggaaaacactccgtaaatatggtaatttgtcaatggacaccgcgccgattaaaataataatttccggttgaagaggatagagaaatcgcgtgaaatgtcaaaaatgcccttgggcccacatgtcagctctatctcctatttctcttctccttctccttctcttttctcttcttctcttcttcagctaccacggcgacgaagcatgcatagagcggcggcggcggctagcggcaagcgtgagccgcggctggtgtcgtgtcccaacacaactctaaaatacatcctctaaattatgcctagaataattaaaaaccgtgtgaaagcctccaacaattaaaatgtgcaaggttaaaagtcaaataaggcttagaggatttttgtatatttcctaaaagcctaaaatacgtaaataaattttagtggaattttcagagcacaaataataattgttaagaaataaacaaagttaaaaagattttataaaaagaaaaaccctaaaaagtcccccttccctcccttgggccggcccggcccatctctccccccctctctctctctcctctccccgcggccaatccggcctctccccgcgcgcgccgctgacgggcgggcccgcccgccaccctcgctgactggtggggcccacccgtcatccccttcctcccgccgctcccgccgcctcccccgtgccctagcgccgccgccgccacgaatcccgccgcctcccgtcgtccccacgtgcaataaagtggggggaattactccccgtgatcccctctccctttccccctatttttccctctctctctctcgttcaaacgggcggatttgcccccgcaaatctcgccggcgccattgatggcggccggacctcccgcgccggtttccttccccgccggccgctctctccctcttccaaccctatttaaaccctccccacacctcctccgtccgtttccgcctctcgccgcccttcctcctcaccggattcgagctcgcgacatcgctctctctctccgccgtcgccgccgagctccggtccgccgccgtcgtcgccccggaccaactcccacctcggcgccgcctcctttgggttcgccgcatcctcgccgacctcgtccacctctccgtttcggtcgccgaccgccggaacgccgtcgaccccgtcgacccgagccgcgccgccgcctccctccgctccggccgcctcctctgcgccgccgtcgacctagggtgagccgtggaccgtcgcctcttttcccccttcccttcccctctctcggccgccgctccgccgtgcctatggccgccgccggcgaccataggggcgcgggcgccgcctcccgccggccgcgccgagtggccgccctcgggcgcgccgagtggccaccgcgtggggcccggccgtcagccgcccgcgccctcgggtgcggctgacgcgtgggacccacggcgccgaccggtgtgagcccgggtgcacccggtccaccgtggaccgtgaggctgccgcgtgggccccactcccgtggacccggtccgcgcgccccctcccctcggctgacgcaataaaccctttttaaattaaattttaaatgaagaaattcgcaaatattcatttaaagagcacataaacttcaaatggccataacttggccatttgaactcggaattggaccgttcaagtctctaatttttccttaagaagtcaagaacccatttttgtgctttgttcctgcttgttatatggagtttattagagtaaaagccttttcttttccattggtcgtgtagacgctgcagcttcggaagatccgctcttcgtggaggttgaagccgacgtttgggaaagcgagcaaggcaagtcacatcatccttgaacatattgaatcccagtttataaaattattttgatttaaattattgcattatcgctttatttaaattcccgcgttatcactgttttatctagccatgcctatttatctttgttatgaccttgttattgttattgttattatttccttgttcaccctagaataaacaaaaccccaactagtggacactctactcatggtaccactagtatgattttaggtagatgcttcgttggttaattaggcaacattaggtggttttacaactctagactttgggaatattctcatcacctggacactatggaatggatggattattgtggaattggattcacacctccccctctattcaaaaccctcaaaatagttttagtctgggctcggggtgcatggttttgatagtagcacctcggccatataaggatcggtcttcgggcctctgttgcaaagcactaccgtacttccacatgtctagtgggtaaggcttagtttgtggctcagtctggttataaacaaaagtacacggatggagatggatgaagtcgggggtcgatggacatctctaggacaaatgaaggctacacgagctgcggcccggtagtcgagatgtcatggcacagggccggtgtcctgctgctcggggctcagtcctgcctacctgtcccgggggttccggccgtaggtggggttgggtcggtactcttgtctatggctaggatgggttggaaactatgtcacgtcttccgtccgtataccgtggtggtatgtggcacgtggatacacgtgaggaagatgtgtcttgtgggtaaagatgtacacctctgatcagagtataacctattcgaatagccgcgccctcggttatgggcaagccgagcaatgtacctaagttagtgtttttaattcttaaaacctgcttaacaactaaaatgtggaatggttggcctgggttggcttgggacgagctaggacccagggtcgggttgccaattcggtctgaatcatcgtaggccttgggttaaggcaggttcgtgtgggttcacggccttgattaataatattgtatagctctaggaccgtgtttacaaaatagctttgagcaactaagtgtcttttaacgctgtttgctgcaaaccctaaccctttatactataacccccttgtactcccttgcatttattctgcacttgtggatgtgtcttgttgagtacggtggttgtactcagtcttgctcaatttttcccaaactcagaagaggagttcctggaagatgaaggctttggtgtctagctcgtgcctgccgtcaagcgcctgtggtcgtcgccctagtcttccgctgtttttcgtttgtcttcttgtgtgctgggccttcgccgcccatgtaatagattaattaattacgcttccgcttgttaaactctgaattgtatcaacttttggtgtaccttgcctcctgggataaggaataatgcacgcacgtaaggaatgcccgttgggttatttccggtcgtgacagctggcgagagcggcggtcgcctcttccccctctcccgctggcgcagccttatcctccccaccttctcccgccgccactccgccagccgccgagcgatcgcccgccactgccggcgctccactccacctgccgccgtgcaatcgcccgacgctgccgctccgccggccgcgcgctcgtccaccgccgacgccgccccgctccactccgccggccatcgcacgttcttccaccgccgacaccgccccgctctaatccaccggccaccgcgtgcttgcccacctgcttcggtcggccgcaagctccgctccaccgcagctgacgccttgctccactctaccagccgccgtcctcaccatctcctccgctgcgacgagctcaagccctggcgaccgacgccgccacatgctcctctgagagagaatatagagagagagatgagaagagagataggagatagagctgacatgtgggcccaagggcatttttgacatttcacatgatttctctctcctcttcaactggaaattattattttaatcagcgcggtgtccactggcaaattaccacgtttatggtgtgttttccctcaaaagtgagtttgggtagtgtcctagggctaaaaccacatataagcagtgttgtgtagcaaaatttgtcaaaatttatatagttgtcagttttaaaacttccggcacctataggcacgtcccctttttgcttttctgttgtagtggcatattgatgcagaacataagtaagtgctaacggaaattcagttttatagtttacaaaaaaatgtgctaagacttattttcaatacaggttggccatcatgggattcagaggacatcaatatttagatattcgctgttgttagcttgagttattcattccgtgaagtcttattagtttgattaattcaaataagtcatttaattatcttatttgatttacaagttatgatggatcataaagctcgagaagaaagctaacatagtcctccctccgtatttcaatgtatgacgccgttgactttttaactaacgtttgaccattcgtcttattcaaattttttatgcaaatacaaaaatagttacgtcatgcttaaagaacatttgatgataaatcaagtcacaataaaataaatgataattacataaattttttaaataagacgaaaggtcaaacgtttgttaaaaagtcacggcgtcatacattaaaatacggagggaggatatgccaacaatccatctttgtttcccttgtcatgatctcaccacaccattcttctcttttctgtaatgaaacagagtccaatcccgcaaccccccccaaaaaaaaaaaagaaagaaagaaagaacaaccaaataagtcaggaaactttcctaaagaactgatccgtgtgtgtctaatctgcctcgatgtttatcatacactagttaatgaaatggcagagctcttccctcgaaaaacaaatagctcattatgtaatttcaatatcgttatttttcacgagaatcttggtgctgcggatgatcatggtatgcggtgcaaccaaagcaatccatgtggcatcaggctggctgcgtgagataacaagctgcatgcctcctaacacttctcttggaagttatatcctaatttcaagtgtattttgcacctatctaaagtagtgaaattactaaagtttctccaatcttgattgtgccacgtcatcaattaaacacagaccgttggatacacaaggaaatcaatagctgctatcagatgcaaagtaaagttgagttgaaaaataaaatctggtcaatggtagaatcctccagattgtggcaaacagcccatgggccatggagctgaagcgtcgtgtacgtatataaagataaagagaatcacggagcaggtaagaggatacgaaaaagaaaaaaaaaagagcgcagaacccatctcctcccgaaacccatcgccgccgcctccccattgccgttgcctcctctgcctcctcctccaccgcgcccactcgcccctccatacccacgtcgcttgcgcaaccccaccgcctcagatcctcccctaccatccggcgaagttcctcatctgcctttccatccaccccgactcccacgatgtcgccttctcctttccgcccccggcgtcgtttcccctccccctctctgcaaccggcatttcttcctcgcacagtccaccgcctcctcccctcacccattgccgccacctcctcgcctccacgcaccctccactcactttctcatccccatccccatccccatcccatgatcccaatcccaatcgcagctccaaaacagcatcggatcacaactaaatattttggtaagtcacaaactcagataatcccatcacctcctatctttgctttctcacactgtagccgggaactacatataaggtcaaaaaaatatcagtaataggatggactgacaaagagcaatgctataaaaatatattaaaaaacacatgtacaattatgtttctgttaaaaaaaaggattgttgttgtgttttgttcagcaagggaatttaatcttaaaggcggatagccaactcaaatgattcttttttcttggacgatggtttttttagcatcatcagcaatgatctaaaggtttggtttgacattaatgtgccttcgatgacagtaaaagacacttggtttcttgccctgcgtcagtctgttgtgcaaatatgcgaatcaagggcatcgatgtattaggagtttaggacacaattaaatgctaagcacatagaatatctattattacctgttcactttaatatttttgccttctgagttttgaagctaaaaaccaagcaaacagctcatggtcactatgttattggttctctggtgtgttcattaggcctgatggcaccttaaccttaacctgttaattaacaacaaacatcgatggcacctttttagttgtacaccaatcacctgaatagtgtaatttctgactttgcatttagcgtatgtaattagtaaatgtcaatcatatctactttctcaggcctacagggaagagttgagaagtcctccttagctttgggctgaagggtttttggttggcaacaatgaacaaacagacaaactacattaattgtgatgactctggattttttactacacttcataacaaaattgtgcatttttattttgtgatgtttattatgttattttcttgagatacttagaggtcaaatgatctttgagcaatttgtgttggtttcaaatcatggactagattgccgtttagtttgctaatgtgtattgcgttaggtttgactattttatgccttatgcatcatattgctgagtaaacattctcatcttttgatggtatacggtaagaggttgatcctggacatattatttgaaccttcagttcaaatatagcttgagctgaatctatagttctaactaatagtttatcaagttgtatgattctgtaaaagaaaaaaaatcaaaattaagtatgattgtacattacgggcacccaaagtcgtgcaacgcacgactaagtggctagtaatggtgattcttcatacatatagtttcccgatgcttcctaatccaagcatataatttccttggattatgtagggtcttggataaatatacttccccaatgcttcctaatcgaaacatataagataaggctacaaaattcagatgtatggtcttggatgttgtgttacaactagcattaagaaaatgttaattataagttcttgaaagtaaataattgactatatgatgtatatagataactacgaaaacatgtaaaagaactatagctggttccacaatgcaactgttttttttattttcatgccttagcagtcaatgatgtgaatggagaaatattacattcactaccacataacaccacatcagtgctggttgggaaccccacatagatgtcggttttcccagccagcacaaaggaggcagcactgatgtaagtattcaaaggtgccggtttaggaaccgacacctttgaggtcccaagaatccaaaaaaatagggctcgatgaattggctcgaatcgagccgatgcatcgagccgttccccgtcaccccgagaccattgatccaaaacaaaatcacagatgtttctcacatgagaccaccttcgatccaaaacaaaatcacagaagtttcacactatcaccatcgattcatccaacacatatccctcgaagcaaatcacagaagtttcacacaaatgacagatgaaagaatcacaaatcacagatccctcaacaatttcatagaaacaatcactgttgccactgcgtcgcaggatccatcgcaagacccgccgcagacgccgacccctgatgcggctccgcccgccgtcgccacccgaccgccgccgaggccggatcagtcgtgggagccgccgacgccgacgctgccaccaccaccgccgaggccgcctcgcccacccccaccgccgcatccgccgcgggagaagcagccaacgacgacgccatatgcggggagaagaaggacggggtgagagagagagagagagaaactgagagatagaggggcgagagagagatcgagaagccactagcgagcgccttatccttatctcgtcttggtggggctagccggctcagctcgatttggatgtcagtctttttaaaaaaccggcacctataatatcttataggtgtcagtttttaattaactgacacctataatatattataggtatcggtttttttaaaaaaatacacaatatataataggtatcggtttttatttggaaccgacacctataattgcttaaaggtgccggttttttacgatttcaacctgcggaggtgggaaaaggactataggtaccagttttagcactaccggtatctatagtggcgagaactatttgatgttttgtagtagtgattgggagaagagtgaagttcgcagcaaaagagatgggtgctgaatatatgcacgaagcacagaagaagagatcgttgttagttatactaaatgtcaataatagaaataggattaactcctataatattttaagcgtgcataattttaagtatccctttgtacttactagtataaaaatagatggttgttcgtataggattgttgtcaaatggacaactatgccacgtcgaaaggcgtggttctcctaacagtagttggaatttaaaagtaattgtattgattcgtagaattttttgggatcccccattacatggccctagaggtctatttatagccttagcacaagcttgcaccttctagggcttagggttataggggattttacatgggtgcccttatgaaagggacatttacatgggtacgcagtgtcatttacacatatgggcctttaatggactgataggctgggcctggtctatagtgaacaggcctaaaagaccgggggcagcctgttgggcctccttgatgccgaactcgtcatggcgaagtctttgtagttcgctcgagatgccttcgcccaagatgcctttactttcggagtaccgacgcggctttccagccttcgccatcttcgcttatagctttcgctatagggcttcgcttgaaaggtcttgacatctttagcttgaatccttgctggtactatggtttcggcaggtccggccgaagggcttcatggcatgcctccaacaaggatcaacattgcaataagtactgattgacttcccattgcaacccaccgtttatatatatagcgatgcaagagaaggaagtaatacctgcttcttctccttcctacaatcctaagcggaccaacaattcagggtgtttaaaactggtagagatgaaatcttataatacgaatttcatgcaaaaaattgaaagaagaattgtgccacgtggcaacaccggtttcgcgggacggctcgatcctgcttgcgtgcgtacagtgtgaaacgctcgtgtgcgtgcgtgcagcggttgtccagaaggtcgtccagaagtttctattgatcgagcaattaggtccatgggggcacagcaggctatgtgatttttcgcgttgccgccgtacggctggcaaagctcaggcagctattgcttcctcctaccaccggatattgaggactaaagaactaaagaagtaatgatacatactttggttagagactaaaagaggattaacaggatgtaatcaaatcatccactaaaattcctacgttgcaaacatccatcctttggcagttcctgcgtttccttattttgtatctgtactcatgtgatttatattatttcttttctgtgttttcctctacggaaatcatagaaccttttctctttgggggcaatttcattcttactcctactttgatgtttaacattgatgttgcccagtattttgggttaattcgatccatgccactgcaactttaacaaattaaaaaaataccactactattcatcatatcggtttcatgccactaaaaaattctaaaattggaaccatgccactcccgtcgctttttacgtcctcctccctcacgctgtttcccttcccgttgtcgacaccacaccacatcttctttgtccccaacgccaccgcaccacgtcggcctcgccttctccccgccggcgagggccgccgccgctgctcctccctgtcctctccccgcacgtaccatgccgctgctgctactcctgctccagagagcaaccagccggaggagagctccagatccggcgccgccaggaccgccgacgaggtccaccgccgctgctcctccctgtcctctcgtcgcgcgcaccgtgccgccgctgctactcccgctccgcagagcaaccagccggcgagcagcgttgcggggatccccgtctcctctagatccgacgccgcgggcaccgccgatgagggccgttgccgccgctcctccccaagctcttgtcgtcgtcgcccaccgcggccatctctggtgagaacctcaagatccccgtctcctcctccagattcggtgccgccggcatcgccgacgagggctgctgccgctgctcctcccccatgctcttgtcgtcgtcgcccgcggctcctcggcctcgccaagaagctcgccaacgattcctcctgttccgatctcctctgccgttccccgtcctcaagaacggcagcgccgcgtacctcctccacggcacaccgccgccgacgacgatgatgatgccgcggtgccccatccacatcaagagcttatcgtcgccggcgcagcatgttcagggagttccgtgacgcggcaccatctcccgaaacgcctgacgctgacgccaccgacgacgactacctcggggagcttgacttcgaagatgaggatggattcgacgccgactctttccttgccgccaacgtcctgtacagtgccgccatacatccatacataagaagcctcatggtgctcggtctcatgttccggcaaggctggctcaacaccggccaagcaatgaagcagcatggcgatgagagtgattggtggatgtgccctgctcaatcgccgtgagagaggacgaggacgggaagggaaatggcatgagagaggagacggaaaaagggatgagagtggcatggtttcaattttagaaatttacaatggcatgtagccaatatgatgaatagtagtggcatttttttaatttgtcaaagttgcagtggcatggatccaattaaccccagtattttagggttttgtttttgcccatggtttcttgaaataaagataaattttgctcctacttttgatgggcagattaacaatgttaaatctttagcgagaaggcattaaatacccttactcatgttgcaaacttcccctgtttttgtttatgattgagaatttgcccacatttagcacatgaaccttgcaaattcgataaacttttaccaatatgataattttaacataaacatcaacaaaaatttgcttcaaaatttcatatcttgaaaaaaacaaacagacaagtcaagcaaatctgttgcctacatgtgccaagctgtcgtcgtcgcctcctctcacaaactgccgccaccgttgttgcctcctcttctcactgagccgccgccgcctcctccccacgtcgagccgccaccatcacctccccgcgctaagctgccgttgtcgcctcctctcatcgagccaccaccaccgccgttgacctgttgtcctcctccccatcgcctcctcgacacgtcgagcagctgcacctcctccctacgctgagctacagcagccgccattgtcctcctctctaccatggcctcttgcgcaatgcctagcctcctcctgcacgctgcaactgggttgggtggcctgcacttgctcgggtcgtgcccgttgcctggccggccagcccacgaacactgccgccactgcttcagaacggggatttgggttcaggaagggaagagtcgatgccaagtgctcaagcctggagggacaccaagcggtacttggatattttctaggggtaaaagggtcaatcgataatttaaaaaatcgttatctcttttttttctctaattctttgccgcattaagtccaatcccactcacttccatcaaaaacaggggtaaactcctcattcgtttgaaaaaaatagggcaaaaaacaacaaccctaaaatgtagggtaaaatcagtattgggcatcaaagtaggggtacaattgtactagcaaaattgtccctttctcttttctccctcggtcaaatgcaacctatatatgtcttgtaagggctactttgaaataaagattgagggatgaataggaaaaacatagaattctgacaaaaaatcaagcgcaaaacaaagaattataaaacacataaaaaaatatataaaataatcatttgattggacggtacgaaaaatgcaagaattagatgagagagataaactcataagagacttcgcgtgatattggacctcatgttaaaaatactccaaaacttgtatgaatttgggcattccttagaaatttgataagactcaatagttttcaataatcctttggttcaaagaatcatatagaaaattttcctatagcaaaatttattgtttctatacacaataaaagttcctatatttttctttcaagtaaggggggccctaattagttactccactaaagtcgaatcagctgggttcactttaccatgcgtggcgaagccacgcggtttttctagtttaacttagcgcacgtaaaacgaaaaaatcatttgcacattattaattaattataaattattataaacttaacaaatagatatatttgatattttaaagtaacttctgtatagaaatttttcacaccatttagtagtttaaaaagtgtcccgacggaaattgaggtaaaatctgaatcttaataagaaaaggaaccgaatgtgagtgaatgtgtttccgtaaatgcaataagctgagtggttatagttttcataaatgcaataatctagagtgaatgtaaccaaggctgcaatgtaagcctcggttgcgaattcacatgtgaaaattttgagtcactaaagattgggagatagaaagaggagagagctgcttacttgttcgggtacttcttttgcattttgtttcgtgtttttatcagcattaacagcaatataaccagctagcatagtcacgacgacagtattcttccatcctgctcacttgccgaggtgaattcactaatcagaaaaagttaatctccgtgatagtcaccagtacgtaaaaagaatggagtatgtttaaacagatcatggaagtagacagtatttgaaaataattgaataatgtgtcatttaatttatttgataaatctattggtttatcgatctatcttaaacaaataggatattaacaactgaatcatctagagaatgctgtctcggaaggaagaaaaactgaaaatatatgttttttccttaaatttgtaagaaaatattggttgggaattgtataggaaaaaaaaataggagacgactccgcgtcagatattccaccaaatatgcctacgcgcctgtcatgcctcctgcgtgcagcatgcatcctccgtctatcatgcacctccgtatgcctccgtatgccacatgcagcctaccacgtatattctagcacatgtgcctgtcacaccacctcttgcttttcctctttccttctcacatatactagcacttttttctcctttttttctttcaccaaaagttaatcaaaattttcttttaaaatatacatctagtttgtgatttaattataccattaagtttgttatatttgaaatttttataacatatcttatacagttatattttgattaaaaatatatgtaaaaaaatcaactgttgtttcacaatttatataaaattgtttcacctcactaatgaaatgtgttctagagaaatgcaacatataaaatatattgattataacaatgacaaccattatacgaaacattaaatacgaacgggtgatacacaaaaaattcatatgaatatacaaaatatttgtaaatacttaattacttttaatattttctttatctcatccatgtagcacagagttgtaattgttgaaaaaaaaacctgctgaaacataaaaaaggattatgtgcaacatttgtaaataaagtaatacttattgaaacatttatataataccatatgcaacattaaaaacatccattaaaaaaactttaaatgtgcaacattgtctaattttaaatgacacattctcttctcaccaagtgaaacatcgaattttaacggttgaaacatataaatatatgttatcgaaatataatcatatgatatcttattttgaaaccacagattacaaaatgaataacagaactcgatgataccgacgagaccgtagtcgagttggtttgactagatcacccggtgacttggctcctataggcttcgacttcgtaggctgtggtggtttgtgttggtggtgagatttgatgccttaggtccgggggtcccttttatacccgtagaccggatatagagggtattggggtacgctggtataaggatctacgtagtatgacatcaagcaaacaggaaacagagattatactagttcaggccccttgataggtaatagccctaatccagttgatatgggattatataatggaaaccacatattacaaagggaatagcagaactagatgataccgacgagaccgtagtcgagttggttcgactagatcacccggcgacttgcctgctgtaggctccgacttcgtaggctgtggtggttgtgttggcggtgagattcgatgccttaggtcctcccggggagtcccttttataccgcgggtcagttggtctccaagtagaactcagagacatcggaccccacacgatacagtaacgacccagttctgtccgagtaggactccttccatccgtgaactccgtttctattacgtcatgaatttccttaacgtgtacaggaaacatccgtacacgcgcaggtataccatatcagtatacggcatacatccaagggtaaagagtataccttatccgtaaccctaacagtagcccccgacttctgcttaaatgaactcatgtggccgatcatgacttctgatgtcggaatcgttatcgctctcaactggtcgatctcggtatgagaaccgtagagacaaagagttatcgataacattgtatgaagttcaacggtcatgagtgaatttaaattgaagtccgaaaactactgcgcgtaacggacccagaaatttccggcggccatctctctcctttccttgaaattcacaccatcggtagtgcgcttatttaagggagttttggggatccattttgaagtccgtttgctgcaaaactttccagcccccaagcgtccctcgtcttctccactcccgcagaaaaaccctagcttgctcatctcggtctattcaccggcgatctccggcggcgatggatctcgacaagtccacctccaccaacgcgtccctgaagaagctgcaggatgacggtgccctccctggtcgcgggaccatggagagagaaccaggaggtattgaacccgaacctatcctgggccgcatggttttggttgaggattatattctttgcggttttcttcctccgccctccgagcttcttcttcttgtcttgaatttgtacggtctttccttgctccatctaaaccccaattccatcgccttcctcagtattttctcttatctttgtgaggcctacattggggtaaagccatttattgatctcttccgcttctactatgagttacgctggatggaacctaaaaaggtatccagatgtgtcggtttccgacttcggaatggcctgaagtcgcgatacatccccttccagtgcccctcttctcgtagtaaatggcgggcgagatggttctatcttcagatagaacattcggatccagtctttgttgtccctgaggaacaaccagacaagatttcggaatggaccgccaaacccgccctaactccccccctccagtctttcatcgatatcatcgatgacctccgagtacgagggttgtcggggtatgaagttgctgccgacttcatcggtaggcggatccagctgctccaggctcaagcccacccagcctttgactattctaggccggaggacgcgacccgggtttctcctcggggtatttttcttgtatttcggatttcattctttatgtgcatgttcctcctgacttattgagttctggttctcgatcctacaggtttgaacaacgaaaccgtggagcgccgcatcggccaagtgatgatcagcggccctacgacagtgagcaacatccccgtccccctttgcgagaagggaaaggccgatcgcgaggctgcgatcaacgtgagtgtttttgatgactcctttacttttgctttcctgggatcgcattgtgacatcatgtatgcaggctctccctttaacggacgtcatcgagctgctcgcggatcaccaggcggcagcgtcgttaaaggagggcgttgccaaggaggcgtccgacattgctgttgctgctgccacgacgagtggcaacaatgttccaaagaaagggaggaagttctcctctgtacttggaaaccgtcggaaagcgcctactccgtcggtaagcctctcatgtttcttaatcgtgtagtcggaatactttgacctcatatcgtgctatcttgttcaggcctcggatgcgtctcctccgcccaagcgaaggcaaaggctggtgacgcttggcgagaagtaagtagacgttttagaagtcatcctattcgcaaactcttgcttgcatgtcttcatgaaattgcggaaatccttcccagggcggcatggtcgaaggcggcgcaagatgggtccggcgcgacctccaatgtgtctcccgtggtggcctcgacggacatcgtagtcacagttagggaccgggaggcgacgctgagtggacccgctggcggtcttgcgcccgctcggggcccgccagttgatgccctcacctggggggagctccaagctgagatggagcgcatcctccaggctggtgcccgcagcgtgggccgcgagatcgaggaggccagggcggcggcggtgtcggcaatccaacgcgccgagcagctggcgcgagatctgtcgaagacccgcgaggacctcctcaagatgagggagttggtggccggcaacgaacggcagcggcaggggctcaagcacaggatgtcggagctcgagaacaacctgtcggagatccgcggctcgctgcgggtgtcttacaccggtctacaccaactcaccggggagtgtagcgtcacgaccaccatcccgacaacccccgatgagttctcgctgacgtcctcgctcgcggagctagctgcggcgatggaggagatcccctccaagcatgcggccgggatcggcgaggagacatcgaatgggatctacaccagggggtgccacgtcctcgcgtacgtgaggttggcgtgaggattctggatcagggggccgccaatgacgcgcgcaagggcgtgatggaagaagtcggtgatttgggggagtctattctccccatttttgaagattaggactttatttcccttgtactccttactcaattatgcttgtaaaactttcgtaggttcaaactgcttttgtgtatgaagttgtttccttcgttttctttagcatgttgattccgagtactttgttgtcgttgtagagatgtcgatgtcgaggatgtccagcagcgcgggcagcctgagtcgccggtagtcgttccagcacttgcgcttgagccgtatgtgcagcgggacgatatcgatcaaagcctgtccggggaggcggacatggcgatgactttcttaggttggtacttttagtcttcatctccttggctcttttgttcggatcgaattaatttgtcgtgttctcgaaagaggagaatgacttgacttagtcatttctgtgttgagcagacctggagagtgtgttggccggccgagatcatcggatctaatattggaggacgaagtccgaggtggccaaactcaagaggactatggtggaagtcaaaaaagaccaagccgtggaagcgctccaaggttgcgaggtgtggttcaactcgtacctcaggagctgttgtatggccatggctggagtctgcagggaactccgagtacctcgcgggaatcccgaggagtcagcggctggatacatctcgtggttgaatggggcctgcgctcagcttgaaggcatcggcaagcgtatcgacgaggccctgaagcaggagtttcgtcgatcgagccgatatgccagagggcacgtgctggcctgtatccgagatcaccgcccgcagcgacatctcgagttcctccacgaagggttttcacattctcggaggactcccacagagatagataatctggcgaagtcgatggagccgcttgcggagaaagtctttcagtctatggactagcgttggccgtcctggtagtctttatgtcctgttaaaattatctcaaggagacgtgtaatatattttggagcaattatgaattgtaagaagtacttgagaaatagaaaaaaaaatctatctaactaagttttcttactctagatgtgttgtgtatgagtgttttctcacttcacgacttcgatcagtcacttgagtcatacactctccctagcccccaaacttgtcttcgaagaattgttctcggaagataaggctcttggacccttgacctgccttggttgaacaagcactgatcctagcccccagccgtgaagttggaaaactcagtttccgattacacggcttggttaatacgcacggcgagaactcttacatgaccagatcttacatggtcgtttgtctctacatgatccgacaaggccttatccgctctaggcgtccccagccgaagttcccttaggttcctcagaggcctcgtcaagacagcataaagggacatgaggataggtttcaacgctaggtgtcgtcgtggtaagggatcgtcgggaaggaacactttgatcgtagtctttacctgaaatcaactttattgaagtctccacccgcggtgactgccagcgaagtccgctcgggagagccggagaggatcactgcggtgacctcccaaccagcgcggggctccgcgtcgtctccctcctgatccggaagcggcctggcctggtagtccactccgtgtggataccctaagaccacgcacatgccccgcagctccaagacgaagccagtcatgtccaaaccacgacgggtgacgctgccggccatctacaaacaaaaacaaaaagaaaagcaagatttcaaatgtcagattttgatgataagtgaagcagcaagacagagagagactagacagttttcacaaataacaaaggatttttatttttgaaaatattgctaaggcttgggatctacggctcgtcctagggtcaaggatggctctgataccaacttgtcacgaccggaaataacccaacgggcgttcctgacgtgcgtgcattaatccttgtcccaggaggcaaggtacaccaaaagttgatacaattcagagtttaacaagcggaagcgtaaatagttaacttattacatgggcagcgaaggcccagcacacacagagacaaacgaaaaacagcggaagactagggcgacgaccacaggcgcttgacggcaggcacgagctagacaccaaagccttcatcttcaaggagctcctcttctgggcttgggaaaaaattgagcaagactgagtacaaccaccgtactcaacaagacacacccacaaatgcagaataaatgcaagggagtacaagggaattataacataaagggttcgggttgcagtaaacagcatttaaagacatttagttgctcagggctattttgtaaacactatcttagaactatacaatgttattaatcaaggccgtgaacccacacgaacctgccttaacccaaggcctatgatgattcagaccgaactggcaacccgaccctgggtcccagctcgtcccaagccaacccaggccaaccattccacattttagttgttaagcaagttttaagaattaaaacactaacttgggtacattgctcggcttgcccataaccgagggctcggctattcgaatagattatactctgatcagaggtgtacatctttacccacaagacacatcttcctcacgtgtaaccacgtgccacataccaccacggtatacagacggaagacgtgacatagtttccaacccatcctagccatagacaagagtaccgacccaatcccgcctacggccggaacccccgggacaggcaggcaagactgagcccctagcagcagggcaccaaccctctgccatgacatctcgactaccgggccgcagctcgtgtagccttcatttgccctggagaatgtccatcgacccccgacttcatccatctccaatccgtgtacttttgtttatgactagactgagccacaaactaagccttacccactagacatgtggaagtacggtagtgctttgcaacagaggcccgaagaccggtccttatatggccgaggtgctaccatcaaaaccatgcaccccgagcccagcctaaaaccatttttggggattttgaatagagggggcggggtgaacccaatttcacaattcaccaacaattccacagtgtccaggtgatatgaatatttcccaagtctaaagttataaaaccacctaatgttgcctaattaacttgcgaagcatctacctaaattttaaactagggataccacgagtagagtgtccactagttgaggttttgtttaagctagggtgaacaaggtaataataataacaataacaataataatatggtcataacaaaggtaaataggcatggctaaataaaacagtgataacgcgggaatttaaataaagcgataatgcaataatttaaatcaacataattttacaaactgggattcaatatgttcaaagatgatgtgacttgccttgctcgctttcccaaccgacggcttcgacttccacgaagagcggatcttccgaagctgcagcgtctacacgaccaacggaaaagaaaaaggcttttactctaataaactccacataacagcagaaacaaagcacaaaaatgggttcttgacttcttaaggaaaaattagagacttgaacggtccaattccgagttcaaatggccaagatatggccatttgaagtttatatgctctttaaatggatatttacgaatttcttcatttaaattttaattaaaaaccgggtttattgcgtcagccgagggagagggcgcgcggaccgggtccacgggagtggggcccacgcgtcagcctctcggtccacggtggaccgggcgcacgcggctgacggcggccggcgccgtgggtcccacgcgtcagccgcacccgcgggcgcgggcggctgacggccgggcccacttggcagccgcgagggcgcgcccgaaggcagcctcgccggcacggccgacgggagggggacgcgcccgcgccccgatggtcaccgccggcgaccaccggcgcggcggagcggcacccgagagagaggagggaagggggaagcgaatggagcggtcttcggctcaccccggtcgacggcgacgacgggaacggcggccgaagcggaggaaggcggcggcgcggttcgggacgacgaggacgacggcgctccgacggtcggcgagcgaaacggaggagcggacggggtcgacgacgacgcggcgaagccgaaggaggcgacgccgaggggggaggaagtccggagcgacggcggcggcgaaccggaactcgtcggcgacggcggagagagaggaaagcggcgcgagcgcgattccgacggtgagagcgagcggcgaacggcggaaacggaggagagaggcacggggaacaattaaatagcgtcgggagagagggaaagcggccggaggagatggaaaccggcgcggagatctcggccgccattgattgcgccggcgaactttgcgagcacaaaatcggacgaatccgagggagagagagaggggaaagtgggggaatcgggagagggaatcgcggggagtaattccccccactttaatgcgcgcggggacggcgggatgcggcggattcggcggcggcggcggcgctagggcacgggcgggcggcgggcgcggcgcgaggaaggcgatgacaggtaggccccacccgtcagcgagggcggcgggcgggcccgcctgtcagcggcgcgcgcgcggggaggagccgatgggccggaggagaggagagagagggagggaagagaagtgggccgagccggcccaagaaaggaagggggggaagaggacttcttttagggttttttctttttataaaccttttcaactttgtttatttcttctcaattattatttgtgctctgaaaattccactaaaatttatttacgcattttaggcttttaggaaatatacaaaaatcctccaagccttatttgacttttatctttgcacattttaattgttggaggctttcacatgaattttaattattctttgcacaatttcgaggatgtattttagagtcgatttgggacgtgacaagggattatactggttcaggccccttgataggtaatagctctaatccagttggtatgggattatataatggaaaccacagattacaaagggaatagcagaactcgatgataccgacgagaccctagtcgagttggttcgactagatcacccggtgacttggctcctataggctctgacttcgtaggctgtggtggttatgttggcggtaagattcgatgccttaggtcctcccgggggtcccttttataccgcgggtcagttggtctccaagtagaactcagagacatcggaccccacacgatacagtaacgacccagttctgtccgagtaggactccttccatccgtggactccgtttctattacgtgatgaatttccttaacgtgtacaggaaacatccgtatacgcgtaggtataccatatcagtatacggcatacatccaagggtagagagtataccttaactgtaaccctgacaaatggttttagtcaattccataatttgtacttattaaatttaatatttatatagactcatgtttttacccccacaaacggatttacttctattgtcgtgacaagttactttccttttgttttaagttacttctatatatgcaaattacttttcagctttattgaatttacttttatacgtctaagaagtaatttaatgaaatctaaaggtaatttatatatattgtaaaaagtattatgtaagttttcattaaaaaaatataatcatgtgatatcttgttataaagatttaattgttatgaacacaacagtgtaatcggatcgtagatcagatgagtaatttaagagaaaaatttatttgaagcatagttggtaggaaaatatttctctacttatttaagtagattcttccggtcaatgccccgtcgctagcagtggcagttccaatgggcggttcaggtgatccctggaccaccctagaattttgcccatgaggacaccccctgatctgtgctagggttagggagaggcacagacaaccgccagccatagtcgcacgcattgctggctggcagctgcctcctttgtcttcgcgtcccgactccgactccgactccaccttcaccttaggcttggcacgatggtcccgacacatcgcctccccggttcccgcctttgcctccgcgtcggcatgccacctccccatctcctgcctccctcctcaagtcctcctcggcaccacccgactccgcctccgcctcggcgccgcctctatgcctcctccagtcccccacccctgtcgggcagcgccggtacgccagcgggaggcggcaagcgcctataggccggctgcctaggcgcttgggcccaggtgcccagtccggcggtcgcccccaccccttggaaagggaagaaagggaggcgttgaagcgacgtcgccattctgccggcggccggtgtcaggtcccctccctctccagctctcctgctgcccgacaaagttcaaaggtcagtagacatttattgttggctttttgcaatgttgccctatgcagtagtgagtagacagtagtagtgttagtgaaaaattgttggttatgtctttattttgtggtgtaaattgcagtgagacatgaaaaggaatggagacattgcatcacatttttggaaacatgaagcaaaggtgaaaaaaaggcatatcctattgatgaggaagttcaaattgaagaggaggagccaccattggttgagccacaaactcttggatttatgagatatattactacatttcaattatatttttactatttttgacacattttgttagaatagatgtcgaatatactagtcctatttagctacagttggacttggagttgtaataaatggtagggggtggagttagagtcaaactctgtaactcgccatctctcttaaatagagaggggggcaccactatataaccatggtgactacaatgtagcgtagacacgcagggagatgatggcggcgaggccatggactcgtagcagctaggtgctatattggttagggaggagcgcctataatcagagccccgaggatgggatgtaggcttcagctaaaccttgttaacaaatatcgtgcgttcctatgtcatcatctagcatgtatttggtggtcaatgattgaagcgatcgagaaaaggttagtcgtcgttccgctatatcgactaacttttatagcgaacgtcttgatgcgatcttccgagaaaagtttgatggttcagggctcgatatttgatgcatttacataagtttgttttagtttgataaaatttgctacaggacactcaaaagtttgagttatggtctttgttgctaggcactgtaaaacgtgatatgaatctagaatacccaaaacccaggtaatttgccgggaacaccacaactatttgttattttatcatttttacgctacatagagaggaaaaaatttagaaacgacttatttgccccaaggccagcaacttgtaatggcctccgcggctccgccgtggacattgtcgccgctgcctccaatttttaggttttgatcaagaggggattagagcacggaatgtggcttgggtctggtttgaaccagacccagccgtgttacaacttgctagcctgagaggcaaaatagtttttttatgggatttctttctccatttgacttgctcggaaataacaaaataatggatacagtatcccattgcaaattacaggtattctttcattgtacagtcgtgtcatgttttttaggtgtccaacacgtttatgtgtccttcagcaaattttgcctttttagttttttagggcacaatgatgcctttgtacctccaaaacaagtgcatttactatgacactcacacccattttcacaataacgtatggctcaatttggattaatgacttttatgcatgccaattttgacatagcagggttgtaattcaattaaagataaactattaaaaaaagaaacaaacatatcagggccatgtatgcatcacaaccacaaacgatcgagtcgacaatgatagagtgagaaatgctgcatcatggacttgtcaagtcaatggaaaaatggatggatggatgggtgcacaacgcatgcagctggtaaataattaggtaagtttcatgtttggtggcaattaagcttcagttgacatttgcaggaaaaatgaaagcagcagctaaaattgaacaactgaattcgttcgaaagtacggctgtatatactatatggatgattgtatatgttcatagatggatagatagatcgcgatcgatgcaacgcaagttgcaggtaccaacagcactagtatctctggtcgaattaatcgatcgattgatctgcgaatcataatattaagctcaagtccaagtcagcaacagtgcaaaaacataggctaccacaaaagcaaagccatccacacgacatatttcgatccagataaaaatatctgcccagcccggccctttcctcgggatagcccacgccacaccgaagaaggtatcaagccaagccgtaccgcacccgcaaccgcaacgcggccacctaccatctccgtcttgtccaccctactctaacccctgatctcctcctcttccccaaaatctctctcaccttctgctccaacaaaatctctcacttcccgtgcctgaaccctccttggaatcctcctatacagcagcagcagatcagatcttcgactcctccaaggtacacttcgtttcttctgttgcccttccccatttcccaagggagatattcttgatttggccatatagatctagagccctataatctcccacaatctttctcctcaattcgaatcccttctttctttgcagaagtgaacaatcaatccgactggatctggggatgatggaggaggacagcttcatcaacaacgatgttggggaggaggtggtggttgcgaacggtggtgacggcgaaggggtcggggggatggcgaggagcgacgacggcggcgatgggggaggggggaatgtggtgcaggacccgccacttagcttaggtgaggtgcgagggatcctggagcagaaccacacgctgatccaagagatcagccaaaaccacaaggcccgcgatgccgatcgcctcacccgcaacgtcgccctcatccgggatctcaacacaaacatcgcccgtgtcgttgacctctacgccaacctcaccggctcctctcactcccacaccacatccgacgttgccagcgccaccaacaccaacgccaccaatagttcctccccgtccgccgccgccgccacagctgaggtgagcaagcaaccccacaccaccgacaccgacgctaagtagagcacctacaactccagcaattcgatctcttctcctttcttttatgtctagaattttagatttactgagcaacaggaggagaggaggtagatttggaatcctgctaaacttttttctcttaaatttccgttttctttctctcgatgtaattcagcgatgagatagacatggacaaccgtaaacacccaacttatcagagatcaaagaaagatgcagacatggtaacaatgccatgccagcacccctcattgtagtgagaatggtagggacttttccgaccgtgccaatgcaaatggtgtatggttttttcaaccaagtatactgattttattcggaatttatatatagtttgttatatcagcactcagcagtgttacatggacacgaacatccgactcaggacttgcgtctccaatttggcacaaaagaactatagatgagaatccttcttggagtctcacacgggtgttagactcaatgttgaacataaatttggatatagggtgtccgattcggtaaaaatttaggagtccaggtaacactgtatatcagaactgtgaaccgattcatctgtggagctttcagtcataccataattgtttattctgatatcttaatggtataaaaggtttgtcatgctgtcataatggtatagaagtggaaacggatcaatagagatttatttcattgagctagatatatatatactagaaaatcagcttggcgcgctgactatatgaccatcatgtctttatcttatatgcccattagtcaatggcacgtacatatattttagtgaaatatgaatttgctaaaggagcttcaaagaacctcttaatgtgttttagctttcaatgtgataagtatctataatattgtataatattgtagtgaaatgtgttgtattttgaaaacaaaacattttttttcttttttcctaatgctacttttcctcatctatttatttttctattagtgactaaattaatggacctgtaaagtagtacgatggaaaatacatttagtgcataatcagattagtgagctagaggttgggtattgaaacaaccgatgaagaataagagagcagatttctatctcattctagttcagatttgagaaagttctagacttcccttccttaacctcttctctctgtttttgatgcagcacaaatgagtttttctccttttttttcctattagtaattgcatgatttatctcagtttttatgatgccatgtggtccaatcacaatccggtaaaattgccggcttgagaataataagatatgccgttttcctacggaatttatgaaaaataccacaatatattggcaactcataagaacgaaacaaatggcgtgcttggttttgatgcatttaccgaacttttttgtatggtgttgagtgagaatggttttagaagtagacaatttaggtgtggaagaatataagacaatgtttgatgttcggttggttactttaaaatgctaaaatttgttgtggctgaaaatggtagcaaaccaaataaccctcaagccttaaacttaaccttaacctcttacatggttagtgttgacgctatgctactgtaataatgtattttaaccagtgacccctagcttaatttgaatctttgacaatagttgtatgtgaagttaatttataacataaataaacatatgattctggttttcttgttgctatgtgccatgtttttatttatgtactgctctgtctgttcagatagttctgttccaaaaattctgatatatgcgattgtggagaaacggaggtaattgcaatttgcaaatgcaatctccgcccaatgatgtggtgtagggtcagttaaaaggagtggcgagttgcacgtacgcttgcattagaaatttagaatatcgtatcttcatcatggatgaaacttgctgttttatttttttttctttgcgatcaatccacaaacagcgtttggcactttggcctgttttggaaagaaaagaaaagaaaagttcatttatttttctctcatctttacgtcttgatgtttgaattgcatccttaaactgcaatatcagataacttgcaataccgatatacctgacgtttcagggcagaatagtccctgatttccatcaacgtgggtcaaagtgggacctacatgtcatacacacacaaaaataccttccacccctcacttacagaccacccgtgagcagtccaccacactgatactggagccacagttgccaacgccgtgagatggaacgtgggagcggctattggggaggaaggcggcaaaggcatgctgccagtggaggagagggacgacggagctcaaggaggatagagagatagtcgttgctatcatcgatgaagattaggtcgaatgcgtcggcggcgcaagggcacaagcagacacggtgatgtactcggccatagcagccatagcagtggggagttgctgctgctgctacgacggctcgtcctagaggaaggtggagcaggtttacccacgccaagaacatgcaagacggtagatcttgtcagtggtggccccgtccgtgcaccgtcgccgaggtctattgaggtaggatgccgaagaggatggcgttggtggcgtcacctaccctctccagccaagcttcacccctggccgctccgtctaccactttggcatagagaaagagaggggagaagtagagagagatggcaagaggagagaatgaaagggtggagaagctgacatgtgggtcccacacccgactcggctaggttgaccgtaagcaactcgccatgtctgcactatactgctctatgatcttgagtacactgaaattgaggtacaccggaattacaagttaaaagacgcgttacacaattcaaattcaatgtcaagattatggacctaaagtgaacttatattccatgaaacttccatgttgctgaataagcgttttgttgaggcgagcgaaccatggattggttttcaataactcgtcatggagaaacattttatttaactggatgagaatctcatgttactgcaggagaattatatgataaaatggtaattcgcttgtgttcagattacactgttgatataacgaattgtgtgcaaattccaaataaaatcggtatacttcgtcagaaaaaccatcaaccatttccaatggggcacggttggaaaattccctaacattctcactacaaagaggggtgctggcatgacagtgaaaacatcagtctatcatatctgcatctttctttaatctctgacaaggcaggtgtttactgttgtcatgtccatctcagctctgaattacatcaagagaaaaaaagagggaaaagagaaaaagagtttagcaggataccgaatctacctcctgtcctcctgctgctcagtaaatctaaaattctagacagaaagaaaaaagcgagaacaaaatgggggcgagaaggagaagaaatcggatagccggagttgtaggcgctctactcggtgtcggtggcgcgggaccgcttgcttgccttggctgcggcggcagcagaaggggaggtgctgttggtggcattggtgttattggcgctggcagcggcagtgacagagcgggagaaggagccggagagattagcgtagagatcgacgacacgggcgatgttggtgttgagctcccggatgagggcgacgttgcgggtgaggccatcggcgtcgcgggcctcatggttctggctgatctcctggatcagcacacggttctgctccaaaatcccctgcacctcgccaaagttcctctgcagcacctgcaccaccttcccccctcccccaccgctgctcctcgccgtcccccctacccctccgccactgccgttcgcaaccaccacctcctcctccctgccgccgttgctgatgacgctgtcctcctccattatcccctgatttgatcgctcgctcctgcatcaaagaatggaattggaattgaggagaaagattcggggagattgtgagcctaaatcctaccaacagcacacacataaatatactacaaaaaaatcaaattttggcagcaccacctctgcaaaaaggacactagagactagactaaccaaataatcatttcaacataagactaaacaagctcacaggtacagcagccatacacacataaccatgactgacgatcattaatgtttcgcttgcagccaaagctcaaaagacaccagcacttcagccctacttgatttagattatcgagtagattgttgttgcagattatctactctaatataggggtaaatcaaatatttcgagaaataaacttaacatatactgtagcttaaaacaggtggtctacacaatgtggtagaagttttttcagaaaagtgtggagcaaataatatgtttaataatccggtgaataagcttaaatattaactaagcatctaaagtagtgataaggttgcataagtgatatatagtggtctcatatggagctacacccgttccccatgcatatgttggcttcaactattacctaacaaggaaaaacatcaaaacaacaagcatgagtacaggattcagcaaagcatatgaattaaacagtaaacatcacataggaactattctattgccatgttaaacatttatcatactccaaatgcaatgaatagctaactacatgctcatttgctcatgtcattacttatattggtattgcttgggtgaatgccagtcaacattcaccctctttcataacatagaaaagtaggcccatatgcccacacaaggtgggccttcttcataccatagatgcatataatgcaaatgcatttaacattaaatgccgacttactccattttcaccttgtaaccgttattataccaccataacatttccataacttcataacaagcattaatgatacagaaagaacaagaggcggcatcttgtgacattataatttataatcaccgcccatttactgtttaacaatatacttgccttaaccgcgtgaagatgagcgatgggtggaggtttccacttcttgattcgcaccacgacctgaacattcatcaaataacattaaaaaaacaactcaaaacaggacaggatgacaaccaaagagaacaacaatcgtgctacgtgcaacctgctagagctctgctctcaaaatcgtcacttaacactccgtccaaagtaaaatacttttcaggtaatagactaataaaagttcgctaactattcgttattagccgttgtccctagtttgcttaaaaagactctagttttaaccgatgattgctgttctgtccaaaactggacagttgcttcgcaagcacataaccgcctcattctttctccaactcctgcaacatttggttctgtgaagactttctagttatgagcccacatagccatcataatttataagggaaagactgaaactgctacatgtggtcatcaaattctaaacagcagcactcccaggggcttttctcccaaaccacctgaccaaaagtttaagttctaatactctacggaaagcttagagagaaatctacaacttccatttagaccaagagccccgattccccatgaataaatcccagatttcgaaacgatatatatcagctcataggtcgcaagaacagattccaatcaactatttgatgtctaaaaaaccttggttcctaagtgtaggtagtgcaactagggactaacaagagcttaccctggcagcaagaaccacaaatcgaaggaggatctgacgaaacccacagagaaatccccgaattcttccctttccccgtttcttctcttcttcttcttcttcttttttcccccctgtgttcttcttccttctcctttttactcctcttcctttccccccttctcttcctctctctccctggtcaggtggccgatgcgggcgaaagcagaatcagcagcccgcggttgagggcggccggcggctgacggcggagacacacggcgacgagggcgacggccggcggcgagggaggtggcggcgtgaggttgctagggtttgggtggaaccggcgagcacgccgaccatgggggaagggatcggcctccacaatgccctcgggatgccctctttaaccttccttttttttcttctctcttctatctttcttaaatctaacgcccaaattaatctgattaccatgaaatcagagtaactctaatttcatcagagtataaatacacaaataaaacaaaaaaaattaaaccctaaggtgaatctagacacacatatgtccagattcatctctagggtttgattatttttttcttgacagagagagtactcaactatatcgacacgaccgtgtttcttgatcggcgattcaagcgctctagcgtaaaaaggaaaaaaagcatgttttagcactttctcgttcgagttattatatgatgatatcttctctaggagtgagcaaggcagcgcagctaatggaatataccttgtaggaatcgaagatctgatccactcaggaggattccaaggaatgttctggtaacaggaagtgagagattttgttgaaactaatggtgaggagattttgttttgttggaaaggagagagagagatttgggggacgatgagaacgggggttagggcagagcggatgaaacggagtcaacaggtgccagtattacggttgagatcacggggctgtgctgcatggttttgacgtactagataaaaaaatacaaaattatatcaagagcataatgcatgaaaagaaaagcaaaagaaaataatgattatagatgtctaaggtttaatgttggttgtataccaagatgggagggtcatttggaaatttagtttagcattaatggtagggttacacgcttatactaatttttagaataaagcctaaaatagacattagtcaaaattcattataatagcacttcactcattcttaggaccagaagataagaaggatggtgacattttcaaatgcatgatcctcttaaccattagaatggactttattgaatccacccttgtatttcacttagaaaaggtcatagactaaaaaatgtatatatacatattatacaaactttatacacgacttcatttaatgaataggcaagtacaatattagtacataaaataggcaagggtttatctatatccgacggatatggattcagattcaggtagttcggagatagatgtggtattgacaatatacgtgggatgcggattattcgccatttcaagcggattatccaatagatgttttagtagactatccagcccatgcatccactctatttggcctattccacataaggcaatccatccataccatctattagttaatctaagtaacgcactctctctgtcacaacaagcataaccagaggcacgaggcgctagcattggcaccatgcgccatggtgaaacatgcaaaatggtctgttgcgccgcagacgcctcctaaggtcctcagcttctccctacgccgttgattgccaacctccaccgccaacgtcgtctctccatctcctcctccttgcagaagtccacataagagaattcggaaatcggaagtactcgaggtgaagagagtcatgcagtggacgctaccaaccctgcattagatcaaacgtttgtggaccccacccacctaggggtgaaaacggtacggaaactttccggattccagacttattttcgaaaacggaatcggtcggtcggaatttttttggaatttttcggaaacggaaacgaaatcggaaatattttctcggaaatggaatcggaaatgataagggcagttttcgtcggaactcggaatcggtcggaaacttcttggaaattttctcggaattttcggaaattttctcggaattaccagaaattttgtgactgaaataccctggattcttttttttaagcgctaaatagtgaataccatggtgtttggctgttattttttaaaaaaatatttgttatgcaaatctaaaattacataagaatattttttttcctacattgggatttatcaacaacattactcttttaaacatagataacttattcaattggatttattagtttgaggggtttttttattccgataaattttcgttaccatattcgcgccggttcgtttttgctccgttttcggtttcgataatattcaattccgttttcgtatccgaggtttccgattccgattccgaaaaaaatatgaaaacgaaaacgataaagatggtttccatccgtttccgtaccgttttcacccctacacccacctacccaatacataaggcctgttcggctgccattcttgcggcagcactgcggctgcagcgcttggttgtgcgaccgcagctgtgctgcttgcagctgcgataaatggtagccgaacaggcccatagagagcatgagtgaggtgaaaatcaccgagagtcacattcatccggctttcaaggttataagcaatgatagtataagagttaattcattatctccaatgcatcctaacactatgatagaaagggatcctctagtgtggactcccctctgacatgttcattaacatgtgggtttatgagtccatggacccacacatgtcactgaccacatccctctaacttcacgtcagaggatccctttcctctacatatagtgtgtcggagattggttgtgtttctaaggctatgtatttttccttacctttcccaatttctacactctagttttccacgtgcatactttttaaactactgaacagtgtgtcttttttaaaaaaatcaactgaaaagttattgtaaaaaaattaaactaatccattttaagggttttttttaaaaaaataattaatcattacactaatgagctaactcgttttttatgtgagagaaaaaggttcccaactcaatcaaacaaagacagcctgatgttcatgctcaacgtctgacctggtttgttacaagggagaaatcacaacgagacgaatgccatatagagaggtataggatgcagagacctgtttaacatagtcctataagctaataaatttaattttcttcaatgctcttactaaaaattggaaaataattaaattaaagaacttgcttgcaaccacgaacgtggtaaaccatacaatttcacaatcatgcattccatacaagaccccagaactgaactggaacctccaaatttcagtcaaatccgttcatttaacacaaccaagaacacaatttcaactgctgaatgctgatcaccattggcgcaactggacaagatagccacactcgaacagcatgcacgaaaatatatcagttgtaaacagccaaagagatcattgatattttaataaacatcatgcataaaccacgcaggttatcaagtcagttttaaggtccagcacaactcttgcacactagggactatgacacacaaagagcggcagcattacaaggtttgcgacaacataatagttattcagtattcactcatgcaccaacagaaacatcctgcatggtatcaaaagacccagcataggttacgcaaacattttggctttggttgctccaacactatgcttcagggcctaatagtagaacattatttcttgccgcgcagctttgttccaagagccctttcaagcttcccgatgatctgctggttcggaatagctttacctgactcgtactcctggatcacctggggcttctcattgatcatctgtttgcaaaacacaccatattttagttgaaggttagtgtatgtgcgagtggctgtggtaaaagttaatgtaacgctaggaaattctaaaattgtatggttggacagggcacctgtgcaagctgtgcctgggtcatcttcttgtccagccttgcttgcatgaggtttttcttcaggtcacttgagacacgctcatctagcatatgttgagaataacaagggattagagaacagtagaaataatgaaaaggacaagcaagtccaagtaatagattgaatttatgctttctcggggctaaactttggagataacacaaggacctgatccatccaatgaaattccatgtaaaaaaatcatcttttagcaaagaacagacagtcaaaattcctgtcttcaggcaattatatccgatggatgtttagaatgccccatcatttggttgtacgattgcttttgcacccatggtaaattttcatttaagatgtaaaaatgttcatatcaaatatatcttgtttaggcgcacacagtggcatataaagtcaacatagctcaataaaattatgatattgcatcaaagaagattatcttccatttagctgtttgattgctgtagatcagcaccatcaaagctacaaaaacaattatagagcgagcccattgaataagcaaacttacgatctaaatatgggcccaagctaggaagtaggatctaaagttacaccccagatttgtaaggctgagaccttatagtcatgcaagatataactggaacatcatctcatcaccctcatcgttcaaagtggtggtactgacctatcccatccaatccaattacatgtcacacccaatacaagcatatatatatctccaagttacgtgacaatcttttttggagcccaccagcatcagaggtatatatcagagggtcagagcaagtgcttagaagtatatagtgaagattcaaatagaattcaggtgcattttgttacaaactacagatgcaaatattctaacatgaacaaatgttagcaagaccaaataacatgtagaaaaaaaaactagtgatgtaccaactaggggatcttgatatgcacaacatggagtatatatatatatgaagttcccggttccgatttgaccattcatgcatggtgcacatacagacacatatatactgcttgtgaagcttgcagcatccatgaagatgatcataaaaggatgtatcaagaagacataggtccttacagtacatattcagcaagaatttgaataacaaatgtcaaggaccatcttagtagtatgatactcattgttcacagaaaatcaatattattaatggaatccaacaactgtgaaataaccatggaagaatttaagcaatttgaagcaagattgtcatgaagcgcaaatgtacacttcaatcaggccatcaatgaggtggaaacatttaggagctacaaaactagacaacatcatatatctatgtaagttatatatcaatatatgcttagaacataactatgtcatgagaccaataacctcgaaagagaaattgaaacttagtgatacatagtgattgttcaaacataatcagggctcgtcagtgacaaatactcttgacagaacaaacagggcatttggtaaaacctaacctagttcataaagaattgttcttgtgcccccaaaaattaaaataaaataagaccacattgatcaacctcagtatccaacagaagttttcctatggtcgtataacttttaggataaataagctcgcaagtcgcaaccaaaaagattattagtagttaacaaataagatgatacgggcttgaagatgactcacgggcaaggctctcggtgtcgtcatccagccgcttggtgttgagggatgtgccactggacgccgccttgtttgttccagcgttatctgtgcatagatcaaacagaaagaatcaatatttaagcgaagaccagaataaaagaaggatctttgaacaacatatagatcgaacaaaaccctcaaaatcagacatcaactccgcccaaaaaaaaacgaaatcttttttcccaaaaagagtccatcagtaataagcccaaaaacctataacctaaaaagaaatcaacagaaaacaaaaacgaactccccaaaccgaatcgatcgattccctctgcaccggagcggcagggatcgatcaaatccagaagaaaaatcgcacccaaaaaaaaaagaaccccttcgattcaaagaaaaggagagggaaaagcgaatcgaatcaaatcaaaagaaaagggtaggagggggtgggggaggcagtagtacgcacacttcttcatggtctcgatctcggcgccggagcggcgggcggcgttgacggccttctcatccttcttggcggcggcggtgggcgccttcttccgcaccaccaccggctcccagtcctgcctgatcggaccaatcccggccatctcgacgagacgacaagaggaagaacaagatgaacaaagaaagggttaggggatgaacgaacaaggaagaagagaaggttctggagtcgcaattgatgggcacaccccccaccccacccccgggccgggatattatatccactgaacgcgtagagtccgtgaccctgacaggtggggcccacctagctttgggaatccacggtgggaccggcacgacaagtctgaatccggttttgtttctctctcttgttttttcttctttcgttagcaattctttttttttcttttcttttctgaaatattgttcgcataaacacgaatacacatacaacaagtacactttatttgagccagtatcttcgaactgttggaactgagggactgtgcagattgtagctaaaataaaccttaacaatattgtcaaaatatataaaaaatggcatcaaccattatcaagttttggtagaatttcttatatatttaccaaagtttagcaacaaactaaacgtggtatggctaaaaatggtatcaatctgaccagcccctaagcatcatgttttgagattaataaaaccattacagacatcttgttgtcgatataaacattatttacctattaaagaatagttagagatgaatacaagtggccaagattgaaaatgaaagtcataagttttttcttcgcaaacagtttggttttatcatgtgctcatgatcaagtcacgggtcatggtaaagtcataagatattgttgatgcccaagggatagaacttgacatgtgcaattctaattgcgcaggataatggtttccttagcatgagcagtgataataatgttattagtattcaactgctatactcaagtcattaacatttttgttcataaaagtggaaagatgcttccgtaaccatcaaaaaagagaaaaaaaaaagaatcgaaaaagaaattgattccgtaaggaatttctacactggcgtcggtagcaaaggaaagaaaagccaaaaattcaagagaagtataatagaatctgctttaggccacttttcgtaggtaccattaatttgggccagctctacaaatctgtttgggccaagctgagccaaagcacaaaggccgaagagagaaggaataaatctacttcacctccctcagctcttgctcctaattgaatcgtctcccacaaccgtaaataccggctataacatctccccaatcttcgaaaaccagatcaaatcgagttcctcgactgtttgggtagcggtttcgtcctatgtggctctcatatgggagtcatcggagctagtgaagttcgtcggcgtctagtgacatgtgggtcctatgagtgacacgtaagacaaacccgctattcaaacagcctaagactcgatttgctctggttttcaaagattaagggggcgttatacccgctattgcggttgagggaatgagttgaaggatgcaaaatagacttatttgaagagagaattggtcaggctcaaatgccattattgggttcaaggcccatagcaaagtagacagtaccacaagtgaacagccgccccagtcgcaattacagtaactaaatgatgcctcacactttactgtaggatatatgttagatattggagaaatgatgaaatggtttagattgaaatattataaaaatgatgatttagcatgtatgtgtttagttttagaatgaaataaattgtagatataattactatactagaaagtaaccgcggaagtatatataggccagcacaattgaacgcggtttatttaattatcaagtcttatcatcagctaaataaagcattaatcatgttctgattggcaagctcatattgcaagcccgaaattcctcagttctcctcgaattacacgattcaaagtacgaagaacgtgtcgaatgaattctttttctttagaccaacaatgcaatttttactctaggtacaagatatacctgtatactccatctcgaatatatgcaattcttactctaggcagcctatacgttaccctgctcaatcatgactcaaaaaaagttccgagaacatgcaattaatgcaacaattaatcatgtttgtcattagtaaatcaaatacaatatcaaccacaatgctttgagtaagtaatagctctttgttttcagaaaatccaagtttttctcacacttgaaacatcaagctattaaataaaggtgtagttaattacctggcgctattcatctcatcccgaaatctgatgaacttgtagatatgattgctgcactggagacggcaataatttttccaaaaacatttgcaaaaagaaatcaatagagcgagacaatgatgtgaacaaataatatcaagaagcaagaaagggcagaacttaaggagtgcagtaaataattcatgtacagaaatcaatgaccatatggtaattgaatgaccttggatgggaacattttcactttctgcattggacattgaaagatcattgtcttgtggtagccctggatgaattctactttgttaaagcataaacacaaatccctgtagcaaaatcagagcaacttttaaaagcttatctcagtttgagcaacacataagatgcgcggctagtcacccccctcccccaccgcgcgactggacacgtggcgtgcggagagggggtggggggtgaacagtgtgatttcctttcttttctttccccacttctttttggttttttatacaaattttgtatacaagtatataaactttgtatacgtgtatatattgttttcgattttttatacgcacatatacaaactttatatacgtgtgtatacatataaactatatatattgtatataaatacatatgtatatattttatatacatatgcataaactttgtatacatatagaggg

SEQ ID NO: 9630 - DNA, 6416 bp, Oryza sativa
attcacccatcggcagcagaacaaaggaaccttgaacttgacgtagtttagctctcagatctcctcaatgcggccgtagtatgtgtttgacccaacttgatcctggaacgcatctatatggacgccgttgttttgcactgtgcttttgtcatcttgtttgacggtgtaaaatgtgtatccatttatatcgtatccttaccatgtgtctacggtccaagatggtcccatccccaacaactgtactgtctcatttgggacatccgtggacattgtcacacgattcttgaaccatttgttgaaccgagaattatgttctctgttaatccatgcatcagatcgccccaagttctcatctcggattttcgctaagtgctcctcaaagtatgggccaacttctgccatatgctggagcacagcgtaatgagcctgcgcgtacgacgcttgatctggcctaattcttttccttccgattgtgccaacacctgacaaccttccctcatgacgagacgcaggaacttcgataggatcggcatcggacatgtaattgacatagaactcaatagcctcctcggtcgtgtaaccttcaatgatgctcccctcaggtttagctctgttacgaacatacgacttcagaactcccatgtacctttcaaacggccacatttcccttagaaaagccgggccacatagttttatttgcttcaccagatgaacagggagatgaaccattatatcaaagaaagacaatgggaaaaatatctccaggtgatagagggtattcacaatatcggtctgcaacccatctagatcttctggatctataaccttctgtccaattgcattgaagaaggagcacagacattggatcgtgtgacgcactttcggtggtagaatgcctctgatagcaactggcaagatttgtgtgattagcacatggcaattgtgagacttcattccaacaagttttagatcgtccaatttaacatacttacttatcctcgctgaatagcccaatggaactttaatatccttcaagcatgataacattgcgatcttctcatccttcgacaatgtgtggcaggctggagggaggtacactctacctgtctctgcatctcgtatgggctggagttcactacgaatattcatgtcctgtagatcaaggcgcgcgttcaacccatcctttgtcttctcgggaatattcaacatcagaccaaccaaactctcacacacattcttttctacatgcatgagatcaatgcaatgacggaaatcaagatctttccagtaaggtagccgtcaaaatatggatttttttcttccacatacccttctcctttgtcttgctacgttttcttttcttcccaaactcattgcttatgtccttgaccatattgtggacctcatctccggacaaatctttgggagcaggctgaagttctctcttaccgttaaaaattttcttctttcttctaaatgcgtgacgtagcgggagccacctccgatgacccatgtataccatctttcatgatttcttcagccaccggcttcgtgtatgttccttgcaatcggagcatgccttctttccttttatagtttgtccggaaatattaccgagtgcagggtagtcattaatggtgcagaacaatagaactcttagcttgaagttctcctgaccatatgcatcccaagtttccacaccttctttccaaagaatctccagatcgtcgataacaggttccaggaatacatcgatatcattgccgagttgcctcggaccttggattaacaagcacaacataatatatttccgtttaaagcataaccatggcgggaggttatagttcgcaataagaactggccaagtgctgtgagtactactcatgtcacagaaaggattcatgctatccgtatacagacatatcctcatgtatctagggtcagcagcaaagtctttgtgttttcgatcgatattcttccattcaatcgaatccgctgggagtctaagcataccgtcattccttctctctgtggcgttccaacgtactaactttgcttcgttggggttggcaaagattctcttgaaacgatcaatgataggtagataccacacaacctttgccgaaccacccctctttgatttctttccttcgtcagcacttttttttcgcttgtatcgagaagccttgcagacaggacaagcatccaagtccgcatattgcttgtggtacaatatgcagtcgtttggacaagcgtgaattctacggacctctaaccccagtggacacagaacctgctttgcttcgtatgtcgtctcgggcaatgtgttctcaacaggaagcatagccttcaaaattcctaaaagatctgtgaaactcttgtctgtccatccactacttgacttcagcttcattaggtccaaggtaactgacaacttagtgtgttttgctttgcatccagcgtacagaggcgtctcggaatcactgaccaacctgctgaacttcattccatctctctcattctgggctgggtcctcaacgtcacgtaacatgtcttgcagcagatcgtgatccacatcaaccatttcaccgcccaatggagaaggtataaacatgccatgctcatcttcatcttcctgattatgcgcaacacttctgtctgctgctgctccacttcctaattcttgctctccatgcttcacccaacatgtatagccctccatgaatcctcgttgtatcatatgaccatgtacgtcctctccgctatcaaacatattctcattcttgcaatctgcacatggacaacacatgtaatcactgtttcttcttttccgatcctcctccgcggcgttcataaaatttattatgccctttctgtactccgtagaatgacgtttcaaatttttcgcatacatccaacttcgatcaattgctacaaaataaaaaaaacaaattacatgcacatcttataagatcagtattgcaaaagtaagacgtgatgaatttgctcaattaatgattaatattagtcagtcggttcagccatgctggtcactgtagtccagctgccctattcctagggaaaaacacgaagaatcgctccataacgcctgccccgatcctaccatccgggacggcccagaaccagacggggatgtgcgggccgtctcatgggcgtaatctctatcgggccgccgttcgcccgaatgagatatggtcgcacaaccaaggtatatcggcctataactatggcccgtcacagataagtgtcatccgtgacgggctttagttttatgccgatataccatggttgtgcgaccatatctcaatcgggcgaaacttcggcccgattgagattacttccttgtgacggcccgcaaattccagtcttgttatgggccgtcacagatggaaggatctgtactagtgtttcttaattaatcatcgtgtaaaactttagaaataattaaatttggttagagagagaggctacatttattttttcaaaacacacagtatagacgtaagcactcatataaacgtgtgcacactcaagaggatataacaacactaacatgtctgtcacacgtcagaaggatgatacaaaaattaactggtagcatgataacttataaaaatatatgatggaaataggtagaaacttggaaattatcttcaatcttagttttttttttcaaaaaaaacttcaatcttagaattccacggaagtacttaaaaaatctgaaaaagcacacatgtaggaaatatgtaaatataaagctatcgatagctcaatcagttatatcctctgtgtgtaattctaaaatacacaaaacaaacaaaaaataatactgtttcaaattttgtaaaaaagaaaatatataaacatattcgcggacgggccacgtgtcaacaagcagctagcgaatagttttcgctagtgggtcacttgtcgtctatcaactagtttaatgctttttcgctagcgggcctcatatcatcaaatgccaaccgctagtaaagatatattttcgctggtagcccttagttagcagccaatgaagacaatttttgctcggggctgacttaagccggctgccaacgaaaacatttcttctatttagaggacatgtatgaaatgaggtggagaacatgcacacttaatatatcccctcacccgaacacatgttggcatatatgcaagtttgtcgtgggctcgtagaattattcagacccatatgctcggtgagaggacgatcgcctgagccgtcattttgctcccccaaccataatctatccttggattacaatcaagcatgacaggggtggacaaaaagggccttgtcttagcaagtaaggtgtccatgtcaagtgactgctcacatagtgaaattgcgtgagttccactgtacatatatacatgcaatgcatgcatatatgcgtgtatatggcttctcattggtgcttatgagagtaagtaaaaaggtccgagctaataagatacccacaatctgtagtagttcgcgtctcctcccaagcatgatccaactgcgaaaaagatgcttgaactgatcttgggctgatcaccatggcaagcatcatctgttgtgtcgtccgttatgcaaattgtcagatcatgtatactccaaattgattggaccgtcatgctatcctctaggtaactctagcgaatggctgctggtggaatctttttgttagaatacacacaactaaaatacatactaccaacaaagttgattttctcccttcatttatttgaacacatgcattaagcatgaatcattgacaaaataatatatatatatatatatgacagaacaaatcattggggaaaaaaagataccagctagctagctgtttaaggcatgtccagtttgttaccactttctctctttttttttccgtgaagacgtaaaataattgcacgttaatatattagaagaaagtagaatttttttttgttacacaacacaatcagccagacaaccattacctgggataagaaagaaagagaaaaacaaaaaagggctgctaaggtaaaataaaaactactactgaaacgctgaaaggtttgttgccacttttaacattaccaacttttgataagacaacaaactaaacacactttaaccattgctaccttcctaaattttagtagtttgtagaagctttatatcttaaaactctatcaaaatttgacaaaagcatcaaaacaaacaaagccaacactaccgaaatttggtaataccaaaatatacgaaaatttagcattaccaaaatatgcactgataaccctctacacaattaaagatacacctgagcatatttgtggataacaaaatttaaaccctgtgggtcgatcgtatagtcatgcacctacgacgccacgactccactatcacacaccgtaccgatgtctctaatgagaaaatacgagtaatttacttatactttaatacatatagaaatctttgctttatccggcttcatctatttaagttgtttggttaaaaatattaactgatacttacacataaggaggaaacaataattaaacaagtacataaggttgtggagtccttattctgtacaaagatgtttcactgtaactaaccatctaatgagctgaaatttgatacggccggacaatgtaccagaactagattttattgcaccaaaatacactgggatacattacaagatgcaaagcaagcgatcgctttgagttacagtaagcagtcctaagagtcaagccctgccaatcaaagaaatcaaatttcctcaaaatacgaaagaaattgaaacttcatgcaaataccggagctagctgacaaacacactgtcaattgcatgagaaaatcagtttatcaaaaaaagcaacaaatgaagcacgcatgtcgatcgacgatgagaaaccgaagcagcaaaatatatatctgatcggacaacagtaagtggggtctgtgtgaagcgatgcaaatgcaaccaatcttgactattgatatgatcttgagttttattcctagcattttgggagatccaacggtggaggcgggagcttctggtcaggacggctgccatccagcaccagccacgccattttcagtccccagctcatgtgcacctccaagtgacaatgcatgaaccacacacctgagatcgtgcaatcgtatcggcataagtatctttgatgagttataattgcaaactgattaactaaagctaaattaagttggtgcaaatgtggaatcgcaggggaatcgatgtggttcagagtacatgcctgggttgtctgcgtggaagcggatggcgacccagccgccggcgggcacgccgacggtgttgcgctcgacggggtcgtagaggttgaacttggccgggtcgttgatggggtca

SEQ ID NO: 9631 - DNA, 27466 bp, Oryza sativa
  unsure (1)..(27466): unsure at all n locations
agaaacagtataatgacaagctgactgttgcgacactccaaagacagcggttgacactcccagactctaggaactgctaattggccgctcgcggtgatcgactcgatctcgtgcacaattaacatgcgtgtatgttgcatatcgaccaatcaccaaacaaagagcattgtccaggcagccacctaatcacatactttcatctaaaaaaggttgtaagatactttcgatataggttgtaagatactttcgatataggctggtggctccttgtttaggccctatgagctgaggtggcacccatccaagaccaaggtgacgaggtgcatgggctgaccaacagctagagcgacgacattcatgtggagcttgtctgaccaagtactcgctacatgcgactgaggccctctttagtttccacacaaagattttacactatatcatattgaacgtttgaacacatgcactaagtattaaatataggctaaaaaataactaatttcacaaattgcgactaatttgcgagacgaatcttttaaacctaagttctccatgatttgacaatgtggtgctacagtaaacatttgctaatgacggattccaatttaccctaataaatttgtctcgcggtttactgacgtattctgtaattagttttttttattagtgcacgaatacttcatgcaacaccctatataatacctcatgcgacacgctaaaactttacacccctagatctaaacaccccctgatagcggcaaggacagcatcctacaaggaggttggtctgcatgctctgtgcgagggaagctagcagttggtcgggactcaggactctcatggcactcgcagtgcaaacaccacagcgcgggtcctagcccaaaaagttagcctaaagactctttcccacaatgcaagtatcctattttgtatggcttaattggatgaaggtattgtggaagaaaaccagcccacagtgcgtgttaccccaagcgtgtggacatggggagcggaacgaaataaattcctcacctacccttctagcaactcgtcttctcctagtccatcgccctttgcctcatcccagccaccgcacccgccgctcctcctccccgtccacacgcatggaggattcagtcgccactcaccgctggcgcaggctcttggggctagagcctccgtccaaaaaaaactaatttaagtgaagatgtgagccatcccaatacaacgaatctaaacaaaaggttcagattcgttgtgctagaataggtcacattcgcacctagattgagtttttttggaaggaaggagtacctctaacgtactccctccgtcccataaaaaaatcaatttagtactggatactagaaaatcaccggcgcactcaatttatagcctgtatatattatttttgtgttattaattagcgcattttcataaaaaaaaagtatagaaatcagtttagtttccttgaaactcatgcaaaaattatagttgaatggaattttttgagttccagtttaacataatcgatcatattgtagagaaattcatcaaactttctctgttttttccgtctatactattaattcttcttttgtttgtctaaaattacaattaaatttctattaattattcttttgtttgtctaaaattataattaattgtttgctaatgataaaatagggtcttggtttttttaaataaagtgttctagaattttgttttgttaggagtcacaatgatttgttgggattaagtcatagactttgtataggtatttatattgacggctaattagtggtaggtgatatatatgttgaccatgagttatatatggtgattccattaattttaagagaaagtctattttactcccttaactatttcaccaaagcacttaacctcctaaacatttttttttgctcattttacatcccaaattattgaaaacggttcactttactcctctaatgctatttctttctcttttttaatttctctatgtaagtcatattttgcatgcatttacaacatacatctcaacatttctttttattttttttttctcacggtttatgtaggttgaaagcacttaagactaatttaaacatcaaaatttaaagttcaagcaaacatccataacaaactttttaaaaaatgaactttgataatgatcccatgtatggttcagtttaaaatacaacttatataaagagtaataaaattgagaaatgccactatggagtaaagtgaactgagccataaattagatttttttttaatagtgtccattgaattagttcaaagaaataaaatatttttttattttaagatatgcagttcagtatttcaaaaatactcatagatatatgtatgaatatgagtagttgtatatgcattcaataattttttgtaaatgtactatagaatactaatgactattgaacgtgtacatgtagagcaagtgggctgacataggcatttgctccttcccctgattttgagaaaatcccctatgtacccatgaaagttcacctaatcccttctatacccctgaattttactcaatcccttacatacccctgaattttagtttggatcccttccatgccctttccgctagttgaccgttagttgactgttaaattcttttgaaaaaatccattttgccctttgctatgaagaaacataataaattaatgaagtatattgttggaatgtaaaaatttattagatgagactattatatttatgagtatgtgatgcaccatattatttgtgacaaatttacttttacatatgatataaaaagttaatacttatttattagttattaaaagttcttttatgtagcatatgtgttttcatagtaatacaacatatttatttattactatcagaacacatatgctaaaaaaacttttaataactaataaataagtattattttttatatcatatctaaaagtatatttgtcgcaaataatatggtgcataactatctcataaacataatagtctcatataacaaatttctatgattcaacaatatactctattaatttatatgcttctttataccaaagggcaaactggacttttttataagaatttaacggtcaactaacggtcaactaatggtcaactagcggaaagggcatggaagggatccaaactaaaattcagggatatgtaagggattgagcaaaattcagaggtacagaagggattaggtgaactttcaagagtacacaggggattttctccctgattttccatagcgttgggcggctagctaatgggcttcttatgcatgaggtgctttgggcccagatgaacgcgtactacgcgattgatcgagaagaacagcagccgcgctggagagaatcatctatacgtcgttggttcatgccacgtgtcagaaaaatacacgccgccatctccaccaatcagctggcaggaagacccgccagctttagatataaaaatatgatatatcatattactacaaatcttgatatacatctcttaagattcactgtattgtgagtgcaagcaccacagcccgggtcctagcccaaaaagttggcgcaaagacactcatccccacagtgcaagtaccatattttgtgtggcttaattagatgaagttactatggaaggaaacccagcccacagtgcgcgttaccccaggcgcgtggacacggggagctagagatggcaatgggggcctgttcaccgtttccccgcggtgaattcacctattaggtgacggggatggttaatatctactcaccaaggggaataaaatggttaaaaacctctcaccatcggggatgactggggcnnnnacannnaaccattcaccgnccccgccccccacggtgacccgactatactgtacaagggaggaattctagactttttagatgtattggcccataatattgaagcccatttaacagatacatatataaacacacatatataatctaaccctaagtcaacaggtcaaactccaaattttccacccatccagatccagatccacaccagccacccgaccgagtcacacgcgccgccggtcgccagtccacctggagccgcgcgcgccgccgttcgccagccacctccggcgccgtttgccagctaccacgcgcaccgccactcactgccttctcgccgggagactgaagctgccgtcgccggccgccttcgtcgatgcgccgccgggccacgtggcgcctgaagctgtcttcaccaggagcggccggcaggctccgtcgatgcgccaccagcctgtagcctcttcaacgggagccgtcgtcgccgtgccgccgggagtcgccgtcgccgcgccaccgggaactgccgtcgccgctgccatctgccgaccatggcttcggccttcggccacctcccccctaaagctacaacagcgacgatgcaagttgagcatactacaatctgtgactgtgaatatattgtttacccggggacgggttcaccatggggaaaaattcaccgcgtggtgatcggggctagagaaattatagccccatcgtggttgacgggggcggggacggtgaaatattttcaccgcggtgacggggacgcgggcatgacccccgacggtgaattcaccgttgccatctctacagggagcagaacgaaaaaatttcctcacctacccttccagctactcgtcttctcccagtccatcgcccttcgcctcatcccaatccgccacacctcctccctgtccacacagatagaggattcagtcgccactcgccgctcctcctttccgtccacacgcatgaaggattcagtcgccactcgtcccaagaaaaaaaacctaatttaagtgaagatgtgacccgtcccaatacaacgaatctaaacaaaaggtccaaattcgttatactaaagtatgtcacatccacatctagattgagtccttatttttttaagggaggcgtatacctctaacgtattccctgtcccataaaataatcaaccagtactagatgtgacatatcatattactatgaatcttgatatacatctgtccagattcattgaattgtattagaatgtgtcatatccatctagtttttttttaaaggatggagggactatgaatcacatactcctatgtaacatgaccaatcatctcatttcaaggctcataagagtccacgatgatataaaggaaaaaaaagtatgtggaatcttgataaactttttaaatgtttctgcagttcaaaaaaaggaaaaactttgataagtttctataactgattgttctttctacacagatgtgagttgtgagcctttaaaaattgaattgctaactgtgagcttacagtagcaacatattttctgtcgaaaatggagatggctttgtacagcccaccaaggagagatggtagggttggtaaatggtgactctcctgtaccttggtaattcaaacgaactgcaaaaaaaagaaaatgtgtttcctatttgcctttaggaagagtgacaacattaaatttagacgcatcaggtctcctcgcccacttcagcacatcgctagctgtttctgcaacgtaggaaaagtaaaattacatgcatctccaatgccacaaattcttccgaggaaatatttctttatctaaaagaattccaaataaataaaaaagcatagacatgagtaaaagaattccctatgaaaatagaaccgtgggtgatgtacacttgttatctaaacttgatgattacacattctgtatgcagcatggaaacgttcatttaaaaatatggtgtcacagattcatacctgaatgctacaaattaggttgggtagcatccaactttgtcgtatgcgcaaagttcatggttaaagtttccaatccaatcatatgctcatccagtttcttcccttgaatgcttgaaacaccactactggcattagcacaatcagaattcccgcaggcagatttcattgtagtatcacaaatgctcatttcatcagatgaaaaatccagatgattttgaacagttttcaggacagccaatctttttgaccttagtcgatatggaggggaaacatcaagactcccttgctcatccataggacccaaggacaaaagtgctgcagttttgaatgactgtgggctatctgtagtacactttcctatgggagtgtggaagtcatcactgcttaatctgccaatcttcaaatcattatcttcagcaggcgtcggtttatctctttttcttcttcttagtattgagggagtaccatggaatttttcagcagcacttctcaatatggattcaacactaagctgatctgatccttttccatgagtgggtggagtagtatagccattgggtgagtgcattacgttcctagagtgttccggtacataatttgctgtaaacactggggattgggcaggagcaatgtcttccatcttaggtatctgataacaaagagaaccaacagagtgagcctcactctgcaaggatgatccgccgccattaatggctgcttcaccttctctcttagcttgtcttgaacagcccattttatctgatatctgattaattttaagtcccttgtcaccaagaaaattgattccctgaaccttcccacaaacaaaattgttcccagtacccttgtcatgaacagaatccattctcattccctgtgttgctagatcaaaagcagaatcatcagctgcagaagcctcacatgaagttactggctgaccaagtgagaggtaatctgcacagcccttaaagtctttcaaattggatgcccgttgatgagaggtagggtcagaatgaactactcctaagcggtctcttgaacagataattggctctttgtttaagtcaaaatggttgtcagcaggtggccgctttggtaactgtttcaaaccatcaccaacaactggtggatgaactggcagaatatctctggtattgtagtcatctattttttttcttaatgaactgttccaatggttttttatagaattgtctgtcctggagataagaacaaacaagcatcagtgtaagctgaatatttagaagcctaactgttcgattagtaaagaaaggtcaattgctgtatgaacttaagacatgaaaatagcatagaatgcagaagcacatttacaggaaacaatatgtacgtaaaaaaacaaagtactttcaatttcaacagcaatagccctagtgcacatcatctgtttggaacagcaaagcagcaaaagtcacaaaatcccatcaccagattacatttatatatatgtcacaaataactcatttattcaacaatttaatttattaatacacaagccagacgttacaactgctaagacaagagcaagcacaaagaatccataaaacgttgccacgagcagtgccgttagtgcatttctgtgtctaatttacatgagtaaacaaaaacactttacataataatgctgcggattagtaccttccaggaagaagtttagcaatttctgcccatttattcccatacatacaatgagcacgggcaagcacacgctcctcttcaacagtccaagcttctttccttatttgtgggtccaaatgattatgccacctaaattatatgggtacatcagaagtgaacactgattcatacggtatgtactttattatggcaaatttataaataaacaagaaatatgtaagaaaccttactacaattttataatcccgatatgttattagttctgaactaatattgaaaatttagctggatggccaactgaccatttaaactgtcctattttaggaagcatggatatgtcgattaaaatttaacatgtagagaactctgttattactaaggctaggcaaaattactcatgtaaaaaatgtcatcctgcttaaattttagtaaggcacaagaatgttcaaattccaaggacaccaacagttgatggtgtatggtcttagtgtcccttcacttcttacctcatgtagaccgtctagcccatagggtaaactaaacatatagtgctgtttcacatatattaaacacagaaggcatcaaagggcaaattcacaatcaagcagaacaggtgtattgtgtgagattgccaagagatttgccaactgaaagcatgaagttgtacagaagtgctgtaccaaatgtggaaccagaagttgtatagtgactaggagctggaagtatattgtcggtcatgtctagcctcagtataggcattgtggtggtcaaggattagtttgtgtaaaaacaattcttggtaggacgccaaaacttggggcgttcctgcttacaaaataaaaaccaccagcctccaaagtggtgattcagaagtaccattatatctgggcctaaattagatgataacctcaataggtgtcatccagtttcaataaccccaaaagtatgatcaaagaatctgactagttttttttcacaatttacctcatcaaggaaaatcaaaaattgctaactagtctacaaaatgtgaatgcgacatttcacttgtagtagttgattgcaatttacaacatgcatggtaatgttctcaaaacaaatacctctctcggcattgtttaccaattcgaccatttagtgaccttgctataacagaccatttttttggtccatgcttctttaccatattgatgatgacatcatcttcctgcaaaagaattcaatgaacaagcagaatatacagatttgaatttatggaaaaataaataagatatttgacaaacctcttgggtccatggaccttttataagttcaggatcaagaactttctgccatctatgcagacattgtacttctgtcctatcagagaaagattcggctgcacacatacacagtaaataaacaaatactgtacagttttcacaaaagaacatgaaactgacactaagttgctaaatttcattgttatgaattactgcccagtagtttcttaaaagtgcaaatgccataaccccgccccataaacataattcacatgttttttttttcaaatagatcaaataatttgatgtgctggtacttgacaaatatgttttgaatttttttttaattgctaaaattaacattatgcaattaactgatagaagtatagaaaccacttataagttattcaaataatttacgcaaggaaaagatgagaaccacactggtgggctttgaacattattagactatatcattgccgcactggtctagctccaggcacaaagaattgtaaaaaccattgaaatagtatttgtgtgtgtcattggagggtatttgtacgataactctaacttatgggtgcaaaataaatgaaaatttgatgctggaggcaaattggacaaaaaaacaggtggctcatatattttatgtatttgttttccctctttgaaactgttaattgaatattatgcgcaggatgcagacaagaaaagagaagcaaacctatcttcttccagtttttgccattataaatatcaactgccttccgcaatttttcatcctgcacccaagtgacaagaactaggtaaacaaacattcattttgaaatggatgccgtccaacccaaaggaaaagatccacacataacaatatagaaaggtaatggtaagtttcatatgcaaaaggtaaacggagtgcaagataacactgcagatagagggaacagtgaacaggtaggaaatatagtagaaaatagctaacctcttctggtgtccagccacccttagctctccttaccgggccactttttcgcctaatatgtaagattccatcagcaccacaaatataagataaaaaaaactatcaatagctcatgtaattatggaaaacttgactaggatccagtacagtacataaaatacaggctgtccgattgaaagacacaagccaggttagaggaagatgacaaaatcagtaaattctagcaatccagatttctcatgtgccctcaggcaaggatgtggaaatgccgcccgtttcagaaaaggcgattaacatcaagaaacaaaagatctagctgattttcctgatcccattttaggcaggatatgtgtaatcatacatgttagaaatccaattaattaaaagaagtaaaaaaaaattaccaatccatctggaaaagaccaagtgcttctggttactgcccaatgctcatccccccagaaaccactagctggcaagttacttgggaaaaacaaactagctggctagtttcccctttttccccagtaccagtttcatttttttttcttaagcctcaagaatgattactgtactttactgttattaaacctgtagcttcttacagcttactgatacagtcactcccttttagggaattaatatgataagtactgccagcttaaaaaatgttttgtgagtaaaaaatagacagtcaaaggaaataagcatagccataaaaaataacacagctctgttactacttactaccatcagactgtaaagcccctattagaccgtgttactacttactacatgatccaacactcgtatgggatacttttccacgggatatgattgccgtctaaagcccttcatcacactaatttcttcccccaccacatcgctcgctcgctcactcactctggttttttaagcagaacagcaagctggagagaaaggaagtggatggagcagtgagcggaagctaagcagtggataggtcgctgtgtaagggaacaggcaatccacaagggcactccatgtgcgttggaggcttgagaagcaaaatgtgatgccctggtcaaagataagcacagacacgtagatcatgctgccaattgccttgggcatggcagtttgccaatagtttcgagcaagccccaattcagcttcatggtctacatgcttgaaacatggctggttttgcatttctttcattagcaatttgcactggcaatttttagttggaatctgcaaaactttgaaaaatctctggaaacatgagacttgctgaaacacttttgaaactcaattaagcacttattagacttatggaaacactctgggacttgcttacttgctggaatttcttacgaaggttgtcaaacctgtcaacatgttattaaacttgggtttgaaacttggcgtttcattttttaaaactatctaaacatggtgttttagtttttgaagctcccagaaactgcaaggaagtatttgaatgcttggaacatgtcgaactttcctatcctgttgcatcggcgtcttttttttttttgcagcaagtagcatccttataaaaattcataaaataactcaaatggaatatctcatggatgaacctttgtctcctacatagtcatcttgatgggtcaactcatattccagtacatgaaaaatccaataatatagcattacgcatcattcagaaactgcaaatcagctattacaggctccaaaagacatgactcaactataaaatcggtataactatttatctaaaaatggcatagtttcatggcattagtggagatttcctgaaacattataaataacacaacaacttataaaaaactgatttctgcattcagaagcatcagcttcttttttaaaaaaaaaaactatccacatactgaatatatgtccaatccaaaagcaaatgtcgaaataaaaaatggcattttagataaacagggtgcctgaaatatgatgcactaactaataacacaccgcagatatgctaaacagtatagtggatacttgcggtttaaatgatcaaaacacacacctgaaaacaaacagacgataaactttactcattttagcaatcactgcaaagcgacttcaccgtgcctcaaccaagaaagcatgccaatttccaaaacaacagaactagatacaattacccagtgaactagagtactaaaagaacaaagcaagcaaaacccttcccaccattgaagtgttaaaagtgtgatggaacaaaaattcattcaacgaagactacagctgtaaagaccagcagcaacggcaagatacatgttaaaaggtcaaccaacagtcctgtccaaacagccgtcatgctgcacaaggaccacgtcaccaatcagaaataaatccaaaggccacagatttctcaagatcgccaaagctgctgcgatcgcaatccaacccagcccagcccagccgcatctgcgaacgagacgaagcataaaaaccccatctttcccaggcaaagcacaagcagcgacccccccgtccggagttccggaccatagccccaagcaagcgggggcatccgaacgaggcaaacaaacaaccacccactactacccaacagccaacagcacagcgacggtaagttgagccgcggcgcgggggcggggggatcactacctgcgaccgaagatggaatccgccgcggtgggcgacgccagcgcggcggcgtgcgcgctcccctccgagaccgaagggctcgacgccaccggattccgctcctcctcctcctcctccaccttcaccgccggcatcgcgcccattgatctaccgcctcatcaacacctccgccgcctaaacaaacaatcaaaaaaaaaacaaaacaaaattcccatcagaaacactcccccaacttaaacgcacctcgcggaagaagggaatcaagcgccgccgcttaccaaagccgccgccgcccagatcggggggaagcggaggatcgaatcgaggaagcgggtggggtgggggaaggagagatggggtggcacgaaaccctaggcagggcaaagggagcgagctcctctcctcctcctgcgcgcgcggctgcccgtctgggggtggtgttgcggcgcggcggcttcgattgtgtgttggggaaggaggaggaggaggggtttcaaaaaacctcgcccgttgaaggaaaggaagggaaaaggaggcgaggagttagcagacggggggaataatttactcccggtcctggatctttttcagataggggctccaggttactggtaatttcttgctaggtgagttgttggtagccatagtatctttattttctcctttcctaaaatatactcctaacaaatctggataaagatctgtctaaattcgttgtattatgatatgtatcattcaatcctatatcgttattttttgggaggggtatagtagtatataatattagtattacttcatccgtttcatattacaagtcactttgatttttttctattcaaatatttttatgtttgatcgagtttatattaaaatataaaaacattttcaacacaaaataaatattttattaaaatatatttaatgttagatttaatgatattgatttagtgttgtatatgttgctagaattttctatttcctccgtttcacaatgtaaggttttctaacattgtctatattcatatagatgctaatgaatcgagttcatataatgtctagattcattaacatatatatgaatgtgggcaatactagaaagttttacaatacgaaacggagggagtataaaattgatcaaacttgaagaaatttgaataaaaaaagataaaatgatttataatatgaaatggagagagtagttaatattaagtttgagtaataaagctgtagttttcttacaactccgtactaacaaaaatctcaagcgattgattgatcattgattccatttgaaatataaatagttgagattcaatcacaatattatacatcagattttgtaaaaggttatataaaatatagtatgtatatcttttattatttattaagttagattagactagttaggcgtgtaaactacaatagtgcattatgttatcagcattgcatatcaattaattgttttcttaaaaaatagtataacataagctaagatgcttatttttctcacgggaaaagtaattttataccctggaatatgagttgcattacgtttgcttcatgcaatcgtctgacgtcactagtggagaaatcgtttttaggcccggttcataacccctctataatcccggtttgaaaaccgggactacgaatctgggactaaagatccctatctttagtcttggttcaaatacccgggactaaagatcgatctttagtcccggttggtggactaaagatgggagtgggcaatagttttttttcatttacttactatttaatctctaatttattttctcccaaattaggtgggatgcgtaccatcccaaatacacaaatcaatcatatacactacagattatacatcccaaatcaaataaacatcccaaatatacaaattatacacaaatcatgtacatctcagatccatacaataagattccaaaaaaaattatacatctcaatctatacaatgaaccacagattcttcatatcattctacacatggatcacaaattctttgaaaaaaaaagaaaaaaaaacgaagcaaagccgccggtcggctgagccggctgccgcctcccctcctccccggccgccgcgcggccctccgcgccgccaccgccgccactgcgacgccgctgcgccggccgccgccacgcggccctccgccggcctggccgcccaccccctcctgctgcgcacactggatcgagttgggaagggataagaagaaaaggagataaggaggaagggaagagataagactagagatggagggagagaggagtgggtgtggatgagaaaagagtggacgagaaaagatgataagtaatagagataatatactgcgttttgatctttaatcccggttcgtaacaccaaccgcgactaaagatcctggaggggcctgacaacacctgacagcatgtgaaccgggactaaagatgacaccaaccgggactaaagatcacgtagtcccgttctacttataaaccgggactaaaaaccatctttagtcccagtttttactgcatccgagactattgtggtttttggtcgaccgggcaaagatggtttttcactagtgctttttaagaagaactacgctctaggtgtcaaagcttactagtacagttatattccttgtccaattgtatcaatcccaatgtttcttttggtcaaccgacattggaaggttgtgttctttcccccccctcctttcccaacttatcttccatatttttcacgcgcacacttcacaaaccactgaacggtgtattttttgcaaaaaaaaaagtaggaaagttgctttaaaaatcatattaattcaattttcaatttttaactaatatttaattaatcatacataaataaaccatcccctttttcgtgcttcttccttccaaaatgcatctgaagaattgcacccgctgcaccgaggagggttcacaaaaccgatggaatttcgcgaaaatcgaacggatttcatgaaactactaggtctcggtttatgaaaactggtcggtattagccagtttctgtacggcattgatcaaaagtcattggtttttactagtttttgggtcggatttcggtaaatcgatgaggtgcggtttttacttcgaaatcgaaaagttaaaccctgtcaaggatactaaggccctgtttctttcagcttgggattattataatctagattattgagtcaaattactataagctagattgttataatctatagtagaataagcggttagttgtttctttcctagattattagagcctagattattgggtttgcaagtctaaagagggagtagggtggcatggtgggtaatttttcacccaataatctggaaaaagctcacctaaatgagattatcatattataataagccgggctccaaattataataagctacttcaataagttgtctgtttctttcagcttactcccaataatctggattataataatcccaagctgaaagaaacatggcctaataaacacagaagaccaacactctcatctttagcataacacatactccctccgtctaaaaaaaccaaatcctggctatgtatctggacatgtgttatgtccaaattcatagtaatgagttttttttttccatagaaggagtaagtcataacagcatcagatcagaggggttgaaggaccaagcggaaattatccacaactacaagggggcgaatggaaagacgctggccagccagcgtgcgatccggggacggaaggaactgaacaaacggaaaggaaagcgacaggcggcgaattcacggcgcggtgacggcgccgtcggacccgagcccgcgtgttcggtgcgatgcgatgcggcccccgctaaaaccagcagttaccgttgcgggtccgagcacgaggctttggtggttccagtttgaccgtttgaacccctcgcccgggttgcatggaccgtccgatccttccgtgggccgctcggcgccgttcgatgatcgctgccgcgtgcggtcgcgggcggtgggcctcgcgatcgttcatggacaacgtctacgtgtggcgtgacgcgcgtcgttgactcgataggaaaagaagagatgcatggtgacatactgacatactccctccgaaaaaaaaaaaaaaagaaagaaagagataaatcctgatttccatgcccaacgattaaccgtccgtcttatttaaaaaaaatatgaaaaaaattaaaaagacaagtcacgtataaaatattaatcatgttttatcatctaacaacaatgaaaatacgaattataaaaaaatttcatataagacggatagttaaagttgaacacggaaaaccagactttatcttttttttacggagggagtatataggtcattaatgtattttgtttttgtttgttaggggcactgacgtcatcgatcccttccagaagctttgtgaaattgctaaaacgcaattggcgtagatttatctctattatttacatggtgttgactgagttaagctattcaacgggaaacagtgttgacgccgtcacaatttgtcctccaaggatctgtcagtcccatcggatggcctaataagccaaagaaaaagctaaattttaaattttcaagcttaattttaatattgattttgacatattttcaacgtagtttcttttttaacattggcttttaagtcacaaagaacacatttataaaagttttacccataaattcatttttatttcctaataagccgttttggcttattagtaaataagccaaacgatggggacctgtatttttcaggttgttcgaggaagtcaggagcatatgtttccaaaattaaattccaaattttaaattttggttgtagagggatcatattttaatttgctgaaaataaaagattaagtccgagcaggagtaacccattaatacataattaattcaaacttgaaaaaaagatgtgttttatgttttaaagtaaattatacatgaaaagttttcatacgaaacgtgctaataaaaatcaaggtaaaatatgtatctcaaacacgacacatgtactcttgaatctgtgagccggctataaacagaattgaattgtctctcagactacatcaaacacgatatatgtactcttgaatctgtgagcctaagcagaattgaattgtctctcgaactacataaagtcaaaatcaattggcattgaaaagctcacaagtggctagatggttaactagaacatagttgtttctccggtgtacggaattacgatcactgatcagaacaacatttgatcactgttgcatgctggctgcagaatctctcacaaaccgcaaatctcgttttctggtggggctgcaaaaatagcaaaagcccttggcgcgctgaaactgctgatctcctgggccgtatgggcccacataagctgggccaaacctctcggcccgagaaggacgcgcccataccgccctacgtgcgccgccggctgccgccgtgccacggcggcgccacggcaccggcgacggcgatgtgcatgtgcccgtgtggcacggcgagcgcgccgccggtctccccgtgcagccggccgctcacctggcgcccgccgtgtccgaggcgccgcgtggcgtcgggtggcctggccgtgtccgcggtgacatggtcaccaggcgaccactggagcgcgtcgtggccgccatttctcctcttttgcgcccgtggctcggctcggctcggctcggcgccccgtcggcctcctcggtttaacttagctcggtggcaataaatggcggcgccaccgcttgattcacgcagggcggcgtgtcagacggccatggcggcgtcaaggtgagatcactcctctcgttggaaccgggcttcgttttatgctgcagcccatgtgttcgactgaattcccctgagaggtctcgagctctgttgctccgtttgatctgcagattggaggtttgcatacttacacctgcaccttacacgtctagatctagtatttgacagttgataattatcatctcttgcttgtttttggctgatctcgttcgtgtacgtgggttgacttctgcctgcttgctttccatcgttaatttctgcaagtgcaatttgcaattccatatgtttgatgtgctagttgtgcatacggcatactgatagtctttttcatcggcccgaacgatttctataccagttctgggcaacgatttttgtgtccatatttttagtggaattctgctccaaaatggcatccagtaggttggacgcttgtagggttgggtttgtccctaaatgctaacatggggcagcttgtcccccctgaattcagccaaataacatgcttttgtatagaaagagacagctcttaaccttctaacccaaaattagttttatttttcacttggttgcttctgcaagcaatctcagcaggtgtccgttgtgtttttctgattttccttaggaaaggttgagaattgaaagttgaaatgcggctgcacaaataataagcatggagagcctcatgtgaaacatgtaacatggttatccatcaatggcttgaaattttggagagaatttatctttctagaaatggaccatcttgttgtttttattcttctatagcttcctaagagaatataatcagtactagatttgtgttgagtgtgactttcctcttgcacttcatttttgctttagtcgtatacttgtatgcagttacataatgtgtttaatcagatgctttcaaatatcataaaatcttctacctattcagagtgttctgtttcatttcgcagttctagcacacattttgttcacacgggacagaattggtggttttaaagtttgttttccatctaaaatttccgtactccagtattggtttcctccccttttatgctgcatctccccagggagcttacatgatttctataatcttgaatccttagcttttgtcggtcttaattctgacagttttcttccattatatagacttggtagctctgattgtgacgtcctctatggtacccactgttgatctgagcatagttgttggcctttcaaatcatgatctttcaggtatattgatgtcactaagctacacagaactgaggattgatatagactatggcatctttatgttgcaaatggctgttgcactggaaaaatcactttctacctgtacattttagctgtacttagcttaatatgaaccaccagatggtagttaggtcgccttgctttagcacttcagtgtgatccaaacctacagagagaaaaaaaaaaggtagcttccaaagcaaatgagcttcaagttggaattagcaataagtactaaatatgggaaatgaatggtcataagctctgcaccgaaatgacgaaaactacatgctaatccactgatgaaaaggagtcttaatatatattaagaacagtcctgaatacataccaaaaaaaaaaggtttgatatatttgggcttccagtacaatatcgagtttcagtgagctgtagttgtgccaagctagctattagttgttgtgctgtcgatgttgtaatacttcttcaatgaattctcctctaagcatgccatacctttaacttcgaagtgtaggaaggggcatctgcggccgacagctctttgtttgtcaagatcctcacttgatcagtctccgacaggtcacaggcctggcttcaggggattcactttcatagctgctgtgactttgcaacgcaaacgaagcttcaaggtaacggctcacctgatctgattaagattgctgctgctgctgcttcacaaaggggaatcgcaagaccttgctgtttcctctcaggatcagctgctaacaggtatgttcataactctgttttgcgtagctctcgtttctattcctctcactatctgccagccatggatcaaccttcttcttccttcctacttttcggtttctccaagaaattagtccacttaggaaagtagcacactaaagagctgaattagattcagattcagaaatgcgcactaccaaacaggactgcaaaccactactagtatttcagtgttctttcgctgagcctatctataatcatgtgccaccttttaagcgggcacaaggaagcatcatcttagctgggctgctgggtgtagtgcaggctgcacgaaaaaggaacaagaaaactacacgcaaggaccaaagtaggcgcgcatgcgtgcgtccgtgtacacagttataaacaaaacacacacacagacgtaattggtcctagtttttataggacactgccaacagttgcctccgcgttgtctgatcaatccaacagattacataaatgctaaagctaagctaacctcttccttaatgcccaagtgccccttcactctgagtgactgcatctttggtggtgtccatgtatggtcgtaccagcagcaacactgaaacagcaagctcagcgaggagaagaggtgaggaggtggtggtggtggtggtggggctcgtcattacagagtgcagacttttccctggggcgccgcacagcaccgctcaactcagtagcttcactccagcagcagcggcagcagaagcagaaagcgggtagccatggcagaggagaggaagaaggagaaggagaagaagaagaagcacaaggagaaggagaaggagaaggcgggcacccacggtggggaggcgcacttcaagccgagcggggaggtgaagggggtgcgggtcggcggccagttcatcgtgaagtcgttcacggtgcggcgggcgtcgccgctggagctgctccggctgctggacatcccgccggcgtacctgagcgagtgccagagcctgccgttcccgtccaccacggcgtacatgcccaccagcttcaccatcctggcgcaccaggcgtggcacacgctcacgctggggctgggcaccaagaagtccaaggtggtgctcttcgtgttcgagtccgagggcatgaaggccgccgtcgaccagctctggccgtccatgatcccgctcggcgacgtcaacaagaagctcatccgggggctcaccggcagcgagatggcccggttcaagttcaggaagggctgcctcaccatctacgtctacgccgtccgccgcctcggcgccgccggcttcatgtgcgccgacgacctcaggaggatactcgagtccgtggtggagctcaaggatttcttggatcacaccgccatgctcgccatgcccagccagaagagcatcaccttgcagtcccgggtcgcagtggctcactgatccaactctcccaagtgctcttgatcgtttcatcggtgcaggtactcctcctggcttgcaatctgcagaggagtctaattctttttttgcggttcaattggtttattccagtgtcgatgttccacttcctctgctggaagggagttgtatagatctactgagcaaaatctttcgaagatgataggttttttgtttcaaaggcatttcttccccaaggatcatacaccttggtatactgtttatccatgaaacaaaataatccatcaatgagaaccatctgtaccatgacattcttgtcgcattgtacagaagccccaacttgttaccagtactctttattattggtattgtacaggtttcccgttctctcatcatccttagttcttactccatgaatactcattacttgacacaatcacaagaaaaacctctgaattgtccttgtgtagttgtgttccttgaatactcattgcttgatacaatcacaagaaaaacctctgaatcgcaaactgcctctggtgtttctttctgagatgctgtcattagagatgggagctatccagagaggaaagtgaacagcaaagttcagaatctgagagaaagtgggtgctaatctctgtttatgtgggacgtagccatcatggagttcatagaaaagaaggacaaatgctcttcttttacctgtctggctctgcctggtccgttattcttatatatggagatgccaatggcccaatgcaaggataaatttgaccaggagttcatgctccatattgtgcattttcaccagggaaataacagcaaagccaaacccaaaaggacagatgggtgttggtcatgatcattgagcgagttaaaaaagtttgttgggcagggacactcgattcagtgtcatgatacaagtggttgagcaagcatgggccaccacccactatggcctgaatcattaacaacaaaagccatctcatctctcatcttctcccacacaacagtgccacagagggacagtgcaccccttgctgtgacctgcattcgttgtataagatctgtactccagttctgtaccccaaaagaactcaggatatctctttcagtagtttagtgccgctgttactggttgctgaatttatttgcaatgcatgtactgttatctatctctcattctcttaccgttctgtctgtaagcttcaaagcttgtattactgcatgggccaatttggtcgaaccaatcacccatcaaggctgtgtttagttcacactaaaattaaaagtttgattgaaattgtaacgatataatagaaaagttgaaaggttgtgtttagaaaagttttggtgtgatggaaaagttaaaagtttaaagaataactttggaactaaacacggcgcaggatcgtcggtatggtggcactgccatgaatcggcatgtccagctaaaagagctttattttttgcctgagctatgcccaaaaaaataaggggacacctgcattgctgcctgcctgccagcgagccaccgcctctgaatcgtgccgccgctggatggctccgccaattatgccgccggggcccaagccgacggaggagaggagaacggatggagacgtatttatgcgccctcaacctcaagtgggtggcggtgcatggtatggtggtatacaatacaacgtttcctgggctactgcctctcggtgtctcccttggatgcaaattgcaggagacctttctcgcccaatactccctccgttcacaagaccgttcacagaagttaagtatatttaacatttgagttttttcaaataagttattcctatttgtaatatttatacatttaacacttaaatgaaaagataaattaaatgtttgattagaattcaaggagtcatctaaatactcattggatacatacttgcattcactccctgattctataatattcaacaacatgatttaatttctctctagtcttgatgacaaaagtaataggtgtaacttttatagatggtgggagtacaatacaacgcgtcctgggctcctgcctcttgggcagtgtttggcaaatgtgttagagaaatgatttcccacccatctttaaatcctaaccattcattatccctcatccgtttaatcctaaccctttattcatttctcaatcccaatcccactcctcatttcccattatccaaacacaccctccatgtctcccttggatgcaaattgcaggagacctttcttgcccaaagtttcaccctgatgatttgctgttcttggtcaagcaacgagctagccaacgagctcgtggttagctttgatgcgtttgagaagtttaaaattcttaagagtaattggttgatagcccgatttctgataaccttattattttttatttctagtttattttttatgaactttatagttacagattctcgtaatctaaaaactatttaggaaactaaagattatagaagaagttactacggctaaaagccctctacatatgacctaagtaatattatctacgctgttgagggtgtatgtttgcatcgcagagagagcttacggctatacgagcctttctatcaagggaggatctatgattgagagggattagagtggatgggtacgggcattagtacatggctctattattgctcttgtcccaggctttatggatagctttttgactcgagcctttgctttcacttttcgttttaaaagattttagttggattttcaggagactcaccaacctactgatgacagatacttcacctcatgacctcaagtcctcaacccagcagcagcaggatgaaaattttcttttattttttcttaaagtaaaatatagaaatccacgtacacttacgatcaaatttatagctaattattctttcaatgttaggtgatgtatccgtcgataacgatgcgcctatgatgacttcataaatctcagcatgtcccgatccagccttttgaagatgccgatacagtgatgggtcatttaactataaaattaaattcacttaccgtctattaactttacgtcaagcctgtatgacattcctaatccgccgacgagagatggaagatagaagagacggccggcgagcctgggagaggcggcggcggcgggcttacgagagacggaggaggaggcagccttgggcatgagttggttgcatgagctcgctagtagagagaggagaggggaagaaagagagaaagagatagaggagatgaggggaagagccgcgccggcgaccgcatccccttcacacaacggcgacgaagcagaggagatagaaacgggggagcttgaccacagcgtaggcaaaggagcagaggggatggagacgagcggtggtgacggagcgaaggggatgtaaacggggagctcgaccgcgtcagagatggcaaagcggaggggattggatggacaacgacgagtctcctaggcttcgtgcaagggtgacgactgcatcccctccacacgacagcgacggagcgaaggggatgaaaacgggggagctcgaccaaggtaagggtggtggcaggcctgcaatgcgaagaagtcacggcgacgtcaagccgtcgaaggatagccgcatctagctatcacacacgccctgcgccgtccggatcttgttgtgcaggtctgtcttgaacggacgcgacgggcgcttccgcgccctgccaccatcgtcgtttcttggcgcaggtgatcgagcacgtgaaggagctaaagtgccaaacgacggcgattgctgcggtggcgacggcaaagaaaggtgcccgtgtcgccaccgtgcgtttgggggggggggagtggaaagagaagtttatgtaatatatttttcgtgtgacttatgtgtggatcccacattatttttattatctccttgctgactaggatgccacgtcaataaaaccactcatgtatattgttatgggacctattttacacggttttgaacacttgggataaagattttcggtattggggattagggatgtcacacagacttgacgtaaagtttgagggatggccaagtcaacttagacgggctgagccgatggtgatgacggcccagctaatccgaattccttcctggcccggtcatcagtaggacaggccagaaaactatccaatccagcccagatcacgcggcagcggcagcagcagcgtaccccacctccaccgggctccacgtcggccaccgcacccaccgcctcccgtgttcaaaattcgaaccgcctagccgcctccttccttaacggtcgccgtcctcctcctcctccacctccacctctacccccgccgcctcgtctcaccctctctcgctcccagtctccctcgtcgtctcctcctcctcctcctccatccgccgccgccaccggcctcgtcctctctccttcgatggcgaccgccgccgccacgcagtcgcagccggtgcgcgtcgtgctgcgggtgcgcccgcacctcccgtccgaggcgaactccgcggaggcgccgtgcgtcgggcttctcgggagccaccccggcggcgaggtcaccgtccagctcaaggaccagtacaccaggttcgcctcaccccctctcttctctgtacgacggatcacgttgaattccccccaatttcgcagctcccttgttgagcgctttcataagatttgttgcatccttagttgaggaagatcgctactactactgttctagttcgcctggaaatttggttgcgaattgttcgtcgactagtaatgtttcggatgatctgcgagggcgtcgtcttagcttttttctcatgattatattcatttggtaacaccacttccgcagccggaacgagtgctataagctggacgctttcttcggccaagagagccgtgtctgcgagatattcgatcaggaggtcagcgccgtgatcccgggaatcttcgaggggaccaacgcgacggtcttcgcctatggcgctaccggcagcggcaagacctacacgatgcaggtgcccattattttttttttcacgacggcaatgtgtttgatgaaatgccgctgcaggggagttgaacctattgctgatattgggggatccttgttgctgtgcagggcactgaggatttgccggggctcatccccttggcggtttcgaccgtgttggcgctatgtactggcacatggtgctctgttgagatctcatactatgaggtatacatggagcggtgctatgacttgctagagcccaaggcaagagagatcatggtgctggatgacaaagatggcaacttacagctaaagggcttggcctgggtaatgcgctggggcttgattattcttacttgtgtttgctgcaatgcattaggcatcatcgattgtgcactgtgcttactttcgtattttcatggttgaaggtgcctgtgcgatctctggaggaattccacgagatatactctataggagtgcagaggagaaaagttgcccacacaggcctgaacgatgtttcaagtaggagccatgctgtgctatcgatcaggattactactgatgttgttaaagggaagcttaacctcatcgacttggctggtaggactcttggaaagctggagcaggttgcatatatttaagattcacccttcctgtttaaaaccatgttgtgttggttttacattgccaggtaatgaggacaaccggagaacttgcaatgaggggatccggctacaagagagcgccaagatcaaccagtcgctgtttgcgttgtctaatgtcatatcggctctcaacaagaaagagccacggata

SEQ ID NO: 9632 - DNA, 2883 bp, Oryza sativa
acctcatttactcacgtgattactcttgttctgcaccctcgctccctagcccgaacttacatggagaggagaggagggtctatcgattccgtgctcgaggtgatctttctgcgacaaattccattatctatccactttgcctataaccctggcgatggaagcgccggtgttgtcgacctcccatggtctgtcaccatggaggccatatccaagtgatccgagtcatcttcatcatggtggtggctagcttagctactgctactgaagaggagaacgtctaaagaaatggggatcatgattaggggtattttaatccataaaaatatacggtagaaaagacgattcaaagcatatctcatacgtataatgtgacgtggatctaattttagatttgtcacggtggtacggttttaattatgtgaatagcatagattttaaaagttatatgacatatctattttttttattaaaaagatcagccgtcctgtccatgtgagcaacaaaaaaaaaaaaaaacttcagcgcaaaggatgaacggccgagatttgacttgggctaaaccccagtagaaacacccccattttattgcttctctctttgctccgctaccgttttccctttcccggtgaccgccgccgtcgcggcgccaccccctcacccatggcgagcttgccggaggcacccgtaccaccggagagcgcacgcatgggttcacccccgccatcccattccccttctcctcctcctctccaaggagacccctccctaccaaccgacgctcctccaccggagccatccccccaaccccaccatgccaccccgatcccgccgccgtctccaggtcaggccaccgaggggtggcccagggcggaagaaccgcaacctccgatcggtgggacccccggtgcggcgggcccgccggcgccgccttcgttcttcccctcgctggagctgggtacctcggcggcgccacctgcgctcgaagccgcggcggcgggggcggggcagcccggctccccttcgccgtgtcctcccgctgagccggcggccgagttctaccccgggtcggcggcgtcatccccttcttcctcctcgtacgaaaccgcggaggatgactcgccggcgtcgccgccgcccactcctccgccactggtcttatgcgcctcgccggattcatcctacaccgagtcctcccctacgcgcgatcgcttcggcgacgaggagggctcgcacgccgcgcccgagccgccgccgccgccgacgccattggagggcgggccagatgcatcctccgccgagcccgcggcaatggcgtcccgtgcgcgcgaacccatgggctcgcgcaccgcacctgaaccgccgacgccgccattggagagcgggcaggaggggtttcagcagcagcagccgcatccaccgcctacaactcatccggagtgtgatagctcggagcctgcggagctgccgcttcctcccactagtccggctgaaatcgcatacacatcgccagattcagtcgaggtcgatgtagtagcggtgtcgccagaggaagctcctggttcaacggttgcaatggaggtaatgtacggggagactgatacctcagctgtcagtgtgtctccggtattggggagtgcggagacagatgcagccgagatcgatgtaatagcagggatgcaagaagaagctcctggttcaacggttgcaatggaggttatgtacagggagaatgataccgcagcagtcagcgtgtctccggtattggagagtagggaaccagatgtggccgagggcgatgtagtatcaggtgtgcaagaagctcatggttcaaagttttccatggaagtaatgtacagggaaactgatgccgcagcagtcagtgtgtctcctgtattggagagtggggaaccagataaagccgagaacgatgcagtagaagagatgcaagaagaagctcatggttcaaggtttgccatggaggcaacgtacggggagcctgatgcctcagcagttagtgtgtctccagtattggagagtgtggagccagatgtaactgagattgatgtagtatcagagatacaagaagaagctcctggttcagcgcttgccatgttggtaacttacggggagactgatacctcagcagtcagtgtatctccagtactggagagtggggagccagatgcagcccagattgatgtagtagcagggatgcaagaagaagctcctggttcaaagcttgccatggaggtaatgtacggggagactggtaccgcagcagtcagtgtgcctctggtattggagagtagggaagaggggtcacttcaagaatcaatgcagagaccatcttctcccacaatgaacattgagcaagagtcaatgcagagaccattttctcccacaattggcactgagacaagttcgccagagatggctcctgctggatctgagaactgtaaagtatcatggttgccgttgccccctcctacaccacttggcgaatcaatgccctccttgccagtcgcagctgcccccaaggttttattggtgatgccggaggaagcggttgagtcagtcccttcatcggaagctctggatgttgaaaaacctgcctccatcacacaggctgagcccagctcacctaatacgccaccgccaggatttgagaattttaagtcgtcatggttgccgctacccacgactcctcccccagttgaaaccactgatgtcttgccagatgtggtggttaccaaggcagtggaagcacccattgaggaagtgtctaggccattgccagctttggaggtgacaaacatggagtcagacactgtcctcagtatcttgcccacaacagtcttgccaacaggggatccactagtggag

SEQ ID NO: 9633 - DNA, 5876 bp, Oryza sativa
tacacaaaagcttgggtgctctccaacacttggatgtgaaaagtgcttttctaaatggtgaaattgtcgaactcgtctttgttgaacaacctcccggttttgaagatcctaaaaatcctaaccatgtttataaactttcaaaagctctttatggtttaaaacaagctcctaaggcttggtatgaaagattgagagattctctttcatcaaaggatttcaaaattggaaaagttgacaccacccttttcacaaaaatcattggtgatgatttctttattgaaaaggattctaatatattcaaagcattcctctactattggcttgtggtacccaaaaggtgttaagtctaagtttgttggctattccaattcggattatactggtcgcaaagtggatagaaagagcacatccggtagctgccaaatgcctggctagatcccttgtgccatggtcatccaagaaacaaaacttcgtagccctctctaccgctgatgcggcatatgtcacggcgggtagtggttttgcccaatgcctttggatgaaacaaaccttgttagactatgacatatcctttaccaaaacctcactcctatgtgacaatgatagtgccataaagatagccaataacctggtccaacattctagaaccaagcatattgacattcgccatcacttcctaagagaccatgttgccaagtgtgacatagtcattagccacataagaaccgaggatcaactagccaacatctttaccaagcctcttgataaaacccgcttttgcaagttgaggaatgagttaaatgtcatagatttctctaatgtggcttgagatggtgcaccatggttgcttcttttgcattgtgtatatttgctcctatttgctcttatgctttagatttattgtcatttggttcttcattgcgaaaatagagcatatcacattacggggaggtttgcactcttgcatgtgcactacttccttttatatatgagcaaatcaactaaaagtgctagtagtgtttttaaaatgcccaagtcaacataagtcaaaacatttgcaagttaaatgtaatttgaaaactatctctgggaaaatgtttcaaaaggttccctatatgttttccaagcctcacattgcaagcaaaatgatttttgaatgaaaatgcctttttggccctcttttgaagaaactagattcttagttttggccaaaaagaaatttatccccaaattgagattgagaaggaatttgagaaaagtttcaaaacaaaattggtagagaggaggatttgaaatgtttttggtattcaaacctatttcaaaaaccaaatatttcaaaagttatttgaaaatcaaattcgcccaaaaacccctatagaccataaaaggtcacctcctagcagttatgtgagttttgttgcaaatcatcatagtcttcaaatattatggatggttagcaatatttaaactcatatattttaaaattgctccaaaaatcaaatttttattgaattttattgtgggggggttaccggcttatgcaagggctgtgcacagccggcagggggcctggcggtctgaccggtgctataagcgcggtttgaccggccaggtgcggcggtctgaccggccacatagggccggtctgaccggccggtaggtggtcccaggacttttgtcctttttcttctcccttcttcccctacccgactccatctcctcccattcagttttttccttccccaactcgaaaactctctctctctcacctcccctcaaaccctaactccttcctccaccaaatcccctcggtttgatcgcggatttctctccggttacaccgtaagtgattctcctctgcttcctctctctattccatggattgatttgtgtttttgttgagtttttgatccatggcatggaaccctaggtgaagcagttctttgatttacaccaaaagaggtagtttcttggtgtgattcatctccccaaccggtaaatcactctccctcttatgcattctctcaaatcgatctatttcaacctctagggttaagggtagtttcctcttttgttccaatcttgatgaaataggtccaaccctttgatattcatgttccaatcttgtgcaatattgctctagcaattttttagactcatttgtgtaattgtgaaattgttgtggatgcttaggccaatgtcagtagtggtctaactggagccaaccgacggtctgatcgcggccttgccgtcggtctaatcggccgatgcgcgcggtccgaccgccgcatgcacgtggtctgaccggacgttggccgttagtctgaccggcaggtgtaggcggtctgacgggactgatgccgtcagtctgaccggcctgcagtctacggtattggatgtgagcacaatttcacttcaatcaagtggcttctaaaattcttgtaatatcctttcatcctttgctctttgacagtgatgcctccccgcactcgccatggtcgtcgtgcgcccactccggatcccgtgagtgagcctgaggagtaaagcggagaggattatgctcaaagtgatgaagaggttgaggcaaatgttgaggggactagtgaggaggcaagtggagatgatgtcagtggtagtggggaggatgaggatgaagaaagtgatgatatgcacattaatccctccagtttgtggtgaacatgaggaatccagcgcagtataccatcttgaggcatcatgatcagttcttaaggcctcgggacatcccggatccccagtttcacaccgctttccagaagactgtttatgagcaggtttatgcagggaaagcatttgcagagcataagtggatttcttggagagacatcaatgagactccagagtttgagagcttgtatgatctcttcaagactgttggcattgaccggattgtgaccctcaagcaacactacaatgaagatttgatccggcagttctatgctacagtgtgggtggctggagactatagtgagatgaagtggatgtctgacaccctctagtgttctatctctcggaggcagtttcgacggctcctcaatattcgcttagattttggagatgatttgcatgaggagcacacttacaatccgctctccatagactatctctctcagttctatgaagatggagtgcggtacacacatgggaaggttgccggcttgaggactatccccagtgtggttaatagtattgtgagagctactatcctccctcgccttggcaacaatgatgacattaggggggtggcttggcacgtcatcgatgcaatcattcagggacgtcagttcgacattgtgtctctcatgatgcaagatattgctatcaccaaggggacattcactcagggaatctattatgccccttacatcatgaggttgattcaagacaagcttggggctgctgggtaaaatttgaagaagcaagcagtaaaagccccaccttcagcatggagctccccgtgctcctaggacggtgccttcttctcaccctggagctagctaaagctcagcacctcctcctcctcatgggtatgatccaaatgctttcttccatccacaatatgcttactttgaaatgcaacccaatgaatacttctacccggtacttggggctattaataccctaagtgaaagcattcaacgcttgtctaccgggcataaagcattgcatgaggatgttcgtggcttgtgcaccgatgttggagacttgaatgcttccgtgggaagattgcacactagagtgggtgcattggattctcgagtccaaatgttggagagcacccaagcttttgtatatcatcgccgccgtgatgctcctcatccttcatcttcggcacgtccttcttctcctccacaagaatgaagacatttttggtacttgatgctaaaagggggagaaaactgtccttaggtgtgctttatgtcttgtgggttgggactagtggtagtgaggttagtcacctcaaatctaataggttaagttgctttgggctatattttgtatgggtctgggctattactctatattgtgtgttctttatcgttttgttgaactctatgtcatttggtctattcgtggtcttgttagcctatgtttgtttgtgagcccttttaggatgatttgtgacttatgtgatttgaatggttaagtgatgtgaacttgtgcgatgatggatggtgtatgtgatattgatatatgtgaccatcttatgcttatggatgaatatttcttgaagttcacattgaaatattgcttatgtgtttgtgcttgttgaaatgtgaaattgaaatttgcattggctccatatttgttgtctatgattgatatgcacatgtttaggggagcttttgatttcctttgcaatatatgtccatatgttccttctttgtttatatatatttgttgtgtttgtcatcaattaccaaaaagggggagattgaagcatctaggcccccgttgttaattttggtaattaatgacaaacgctaattgtggactaactgttgctattgagatatattttaagttaggaccatgtcatgtatgcgcatggatgactatcaatggattaaaatttgatggcgcgaagcgaaaaaaagaaaacggtaaaactagtgctttagttttaaaattgatcgaggtgaagggcgatcaaatttgctagtttattttttagtttcgccgtactatcaagggggtaatgacctagcaatgagatgattttaattgccacattaggtcattatgcatttagacttgtgctcacattttatctcacacacacaatcactttgtatttcactgggttcggcctgaccaggggcggtcagaccggccgctgtctaaccacatagtggcggtctgaccggcgtgccccggccggtctgactggccacaaaacggtggtctgaccggcgcataaggccggtctgaccggcggcacatgcgcgatcagaccggccccttggaggccgggatggtgctgctcggggtggccgatacagagccgacggagccgtattcggtcagaccgagctgatggcggtctgaccgagccgaggccggtctgacccgccactcaacgtcggtctgaccggtcaggcctatggggccctctgacagagttacaatggctagttttctagccgttgcagagtagcacggtctgactgcccacatacctccggtcagaccggcagagcacagaggtgggggatttcgccctccatcagcaagggggctctcttggcacccaattcaattgcatacaccccttgcacctctctcacacccacttgagctttgtgttcatccatctagtgtgttagagggttaattagccaagagtcaagtgcattgcttccatttgtagagctagtgtggcacttgattgatcatctccacgccgggtcattgcttgttactcttggaggttgccgcctcctagatggcttgtggagaagttgcccagtgacctctccgagaagattgtggaggagggccggcgctggttgtgagtggtttggagttcaccaccttcggagtgaaggaagaactaccctagtgatcgaggcttgggtagtcctctccgtgggccggctcccgccttgcccaccccttgacgaagggggcgtgcggtggcttcgtggttgagcggtggagttgggctcgcctcaacggggagtaggaaaccggcgagtttccgaacctcggtgaaaaatctcttgtctccttgtctcatttacttgttgcatctacatttgtgcaatttacatttctagagacatactagagatcatttcaccctaggattgctaaacattgacataggagtgtga

SEQ ID NO: 9634 - DNA, 1505 bp, Oryza sativa
agcccgcgatgctgctcgagctcatggacgccgggtcgctcggccgcgtcctcgccgcccgccgcggcggcgaagggcggcgcggcctcccggagcccgcgctcgccgaggtggccgcgcggtgcctcgccgggctggcgcacctgcactcccgcggcgtcgtgcacctcgacctcaagccggacaacctcctcgccagcgcccgcggggacgtcaagatcggcgacttcagcgtgtcacgcatcttcctcggcggcgccggcgagcgcctccgggtcccggtcgccgccggatcgacggcctacctgagcccggagcggttcgagccgaacgcccacgccggtccgcgcggcgcgtgcgccgccgacgtctgggccctgggcgtgaccgtcctggagctcttcctgggtcgctgccccatcctgcccgtcggcgagaggccgtcctgggagaggctcaagaaggcgatatgcgacggcgaggcgccgtcgttgccggcgagcgcggcggcgtcggcggagctccgcgggttcgtggcgtcgtgcctgcacaaggacccgagacggcgcgccacggtggcgcagctgctcgcgcacccgttcgtcgctcgccgcgacggcgaggcgtgccggcgccagctacgggagatcatcgtggagaccatgtaggagtagagaagagaaaatctcatcatgtaaaattgtagatccttgtgcaaattcttgagtagagaagcgaaacatctcatcatcatgtaaaattgtagatccttgtgcaaattctcgagatcaattgcacttcaattgattttttgtattttatcctgtatactagcgtagtcttgtacgctgctaggggatgttgagatttgagaaggaaaatctaaaagtttccgtccacgttttaggtggtgttctttttttaattaagatatagattttatctcgattttcaattttcatcattaaattctaacggtaggaagcaacaaactataaccagatcaattatttttaccctccgtcctaaatatttgatgccgttgacttttttaaacatgtttgaccgttcgtcttattaaaaagggttaatttgatccatgccactgcaattttgcctatttagaaaaatgctattataatttgtgtattgataaccatgccactagaatttttcaaaattggtgatatgccactgccgtcgcgtttccatcctcccccctgccttttccgtcttctttcactgttgttcacttcggcaaggttagcgccaggagccggacgtatggcacgcggcgctcgctggcggcggcggggatctactcggcgccggcgttcttggcctacctggcggcggaggcgtcgcccgtccacccgctcgctgcgcggaacaaggcccgcgccgccgccacgctggtgcattgcatggcgcgcccgccgtcattctcaccatggccgtgcctaccatggctcccctccccgtgcccctgcccatctcccccatcc

SEQ ID NO: 9635 - DNA, 2256 bp, Oryza sativa
tggccccgggcccatcctgggggtccgggggcgctgtcccgttcgaccaagcgggcagagggccagctccggtcgtcgggggcctcgggccccccgttgggtcgggggcctcttctccctgctctctcccgggtcgaggcgacacagggcgctctttgtccgagagcccgcgcggggcacactcggcttctgtgccgacgacctcgggggtagagggcgacaaacgcggccttcccgcagtggccccggggccatcctgggggtcgggggcgcctggtaccgtcggacaagcgggcagagtgccagctccggtcgtcgggggcctcgggccgccgttcggctcggaggcctctcctccctgctctctcccgggtcgagtcgacacagggtgggggtgtgcggaacgagggtcgtcctcgtcgcgctccacgaccaacgccgagctgaccacctgcggggttgccgccaggtaaagtagcaacggttcatctggtttcggggcgactaggaccgggggagaactgaggtacgccttcaactgagtgagggcccgttcagcctcctccgtccaagtaaacggcccggaacgtttgaggagcttaaataggggtagcgccttctctcccagcctcaatatgaaccgaattagggcggccatgcaaccagtgacgcattgcacatccctaagtttgctggggggggcgcatccgctctatagcttgtatcttctcggggttggcctcgatgcctcgggcagtgaccaagaacccgagaagcttgcccgcaggcacgccgaacacgcacttgtcggggttcagctttatgcgcccccagcgaagactttcgaaagtttccgctagatcagagagtaaggtctcttggttgcgcgtcttctcaaccaagtcatcaacataagcctcaacgttgcgtcctaactggctacccaaaaaaattcgagtagtatgttgaaaagtaggacctgcatactttaacccgaacggcattgtcgtataacaataagttcctatgggggtgatgaatgcagttttttcctcatcctccctagccatgcgaatctgatgataaccagagtatgcatctagaaaacacaaaaggtcgcaccccgcggtggagtcgacaatctgatctatacgtggcaagggataagggtccttaggacatgccttgttaaggtcggtgtagtcaatgcacatccgaagcttgccgttcgccttgggaacgacgaccgggttcgccagccactccggatggatgacctcacggatgaatccggcttccagaagtcgcgccacctcctcgcggatgaaggcttgacgttccggggcctgccgccgtactttctgccggaccggccttgcgcccggccgcacggcgagacggtgctcaatcacctccctggggaccccgggcatgtccgccggtctccaggcgaagacgtcggcgtttgcccgcaggaaggagacgagcgcgtcttcctatttgtcgttcagaagaccaccgattcatgtggtcttagacaggccgtcacccagggcaaccttcttgaccgggacctcgtcgcacgtgatcatccgttgcctcggggcggccgggacggaggcgctgagcctctcgtcgccaccctcgggcttggacgccgcggcgagctggttcgcgcgctgctccatacaagcaagcgcgacttggaggtcgccatggacggtgatggggccaccagggcccggcatcttcatctggagataggcgtagtggactgccgccatgaacttcaccaacgcgggtctccccaggaccgcgttgtagggcagactgagatccgccacatcgaagttcacccgctccgtgcggaagttggcggaaccaccgaaggtgaccgggaggtcgatatgacctagcggccaagtgtgccccggcgtcacaccgatgatcggctgggatggctggagcaccatccctggggccttgatggcgtcaaaggctgcgggggaaaggatgttgagagctgcacccccgtatatgaggacatgccccaacttcacattgcaaatagtgggggaaacccccatcgcgatctgtcctccccgggcaacgcacggcgggtggtcggtctggtcgaaggtgagggccacctccgaccatcgcgcccgccgtgtcgcctcatgggtaggggccgcggccagaagctctcgcttcatggccttgaggctccggcgagaagcatgagcacacgctccc

SEQ ID NO: 9636 - DNA, 2832 bp, Oryza sativa
tttatatgccgcgatgaaaactgtaactcttttacatctttcgtataaaactaatatcacgtaacgtaataagaaacaccgagggatcttccggttagctacacaaggtggtgagctagacgacttggattcaaatgctcatccattataattatttgatattaggtaatttcttaatatttacgtctttacataatataatataataggtagatataatcggtaagaacaattcataatactgattaaatttcataaagctacatatacttatatgctatatgtttaacctaatacttttcataaaactacagacttaaagtatcgtatcatattagaaaaatacaaatttaacattagttttatcacaaaactacaacttttatagccttaaatatgatatggataaaaactctaaaatctatagatattttataatttcatcagtaaatctgtagttttggatatgatgccttaaatcagtaattatatgagaaatttgatacttcctccatttcatattataagactttctagcattgcccatattcatatactccctctgacggagcgtggggctcctcaccgggagaccgcgcaggcccccctttgccagttcggccgggggcgctaagtgaggttcttcaccctcgatctgtggaatgtacgcgagagagcaaacgcacaagacacgggcgatgtagacaggttcgggccgctgagaagcgtaataccctactcctgtgttctggtggatatgtgtgaggaagagttacagagagtcggggagcaagagagttcaagctctagaacccctctttttccttctcttctggttcttttttctctcgatctcctcccccagctcaagtcttctcagagttgtccccccttttctttgtgggcaaggtcctccttttatatctcaaggggataccacatgcaccacttctacctactcttcttttgggtggggacccaccctatcttgaccaaatcttgacacgcacctccgcctggaagctaaatcaacgcctgtccttgagtgatgcccagcgccgtcactcgtcagacacaggggatcaccctgtcatttcttcattaatgggcggagttttgcaatggccgctgtccgaatgaccctccgatgggatgggtcatacctgcctccactccgctggaagctgatgcaacatgagagcacggttgtctgccgatgacgtgaccggcgtcggaccagtgacagaccggtcattcttgtccaccacgtgtcagtttagcatgccacacatctgcccttcttcatacagtgacttccttgcaatggttgcgatgaagcctggcatgaatcgagccgggactgatgtgctaactccaggagttaccacgctggctccagctagggacgagtgccaagaggctctcatcattccgacgggacggggcgaggcgtgtgacagtccgcctgctgccacctaacccgcgatctgaccggtctgtgaccgatcacacactgcgaccggtcacggaccggatatgcgtgcgccgtgctgcattaaatgcggcgtggcgcgcttgtccattccgcaataaatgtggtttggtgagcgccgctgtgcccacctaactcacaaacatggcgccaataccacagggggtcgggggcaccccagccctcggggccgaagcaggagcggcccgacccctcgggaagacaaaggaggggtggccacgtctccctcaggcccgacccccccccccccgagggggttaggccacgtgggtgactgcggctgcccaagcctctagtcatgatacccccgatcccatgtcaccgacagtagcccccggcgttatgccagggcgatcgcccccctcgagggaagcgctcgggcgtgacgccactccttaggtctggtgacaggtgggaccggtctctacaggtgggcaggaacccagcggtcgcaaatcgcgcgcatcggctagggaaaaaacgaccgataataatgagtggcctcttcaagaccgctacatttctcgaaatagcgcgcgaatcgggacgagccggttcatttcgcctggagatatgatgatggcgcttcggtcggcgagcgtagttaacgcgcgcacgatatgtctcatctcgactgccacggccgcacatccgcctcgtgcgccgcaaaagggcgagtgggattagtggaggcgtgggcgcgagaaacgagggggcgagatagtgggcgcgggaaacgaggagccgggaatagcgttggcaagggtataagggcgccaaggaagagattcgtttccttcctctcgccattattccccttgccttcgccgcttgcgccctaactccttgtttcctgtgccctacccttgccgcactcactcgttctcaagttcctcctccgccggcgtcatggcacggggctccgcaccgctcgacggtagcgtgctgccgccttcccgcatcgtgagcgagaggcaggccgggctgccgcgccgattcatgccggaatctaccgccggtcgggaggtggtcgagctgggcgagggacgcccggcaccacactacccggggcggtccgtcttcttcctccctttcgcaatggcagggctggtcccgccattctcttctttcttcatggatgttctggagttttatgatctccaaatggcgcacctcacccccaacgcggtaatgacgttggccatcttcgcgcacctgtgcgagatgtttatcggggtgcgcccatctcttcggctgttccggtggttcttcaccgtacagctagtgtcgccgccgtcggtagttggtggctgctactt

SEQ ID NO: 9637 - DNA, 7343 bp, Oryza sativa
atttttggtaaaatttattagttgttggcacgctatgtacacggaaatattgtgtgcatataatatattcttcagcaaagcacgttggtttcatttagcctctaaacagtttgtaaatctgccaccgccaaattacaatgctatgtgcagagagaagcaaagggatcaaccacctatatctggtatcaggcccatcatcaaggagggttgatttattttgttggcattatgtattgtggttgatgccattgccatgtcagacacatcattagcatcaacaatgacatttatgcaatgtttgacttagtcagccaaccgaactataagatgggaatgatggtgttcgtgacgaaaatatcaatgcaattgctctctaaccaacaatgcctcttttaaattacgagactcgtcatatgcattcggtatataatggagtactctctccattcacaattgaagtataagcttttctaacgatatgcatttttcaatctggccaaaaattggttcggccttgtttttgagaaaattcgacagaataatttgatcgtggttgatttggttcaatcttctgttttacgggaaaaaaacaaatcacaacaaaatatcaagatagcgtcaattgtagcagttctaacttccaactcaacacaagaataagatagctacttgaacttcttttccaattccaattaattctgtcattttgactaaacgaggatgatagatgaattaattcaggttagtagatgagctcttgatcggtaagttcgtttgtttttccatctcgcacatttggagaaaatattttggttcttctcgttaaaagaggagtatatgggtgtagaagagtggttgaggaagataggaatacatggaatgcttatatttatagacaaggggagtaccatatcatatgatatggtaatatgtataatgctgtcaaaactgatcagcaaacgatactcactctgttcataaatattagcattccaaatgtttaaattttgtaaataaatataggcattatagatggttgcctttgccatcaatcacctccactacccttctgctcccatctgtttcttgattaactattccactcttatttgtttcttgattaactagtaacatactcctacattgtaatgggtcatgcttatataattaaagatcggttgggagaatgattgagaataaaacattggatctggtggttacttttcacatacaaacgcgttgcgtgcagtgggaaaataagatgaaatgaggataactctgcttttaagataatagagatcaaggatgttaaaatctttacttcccattcttaataacaaatgtttatatttgtgggtggtgggactatatttttcgctctatatttttctgtgtgatgccagtgcaaacgttggccttcttcacgttccattcaccgcctgtgcatctggctcgacaagacgatgatgcacgcagcagaagagatggatgaccctggtcaaaaagcaacgcacgattagccgctggtaagtacattacggcgactagtacaccaacggtcaagcggccctctcctctatgttgcatcctctacttattcatccatcctaaaatataacttagaactagaactaggatatatcactacgaagttggttagacggatatatctaatccgattctaagttattatattttagaatagagataatatttcatagagattagcgagtaagcaacggagtcaatgcctcacaagccacaacacggcaaaatattgttgttgccgaggagatgctgagtatggttcgtgtaaaaactttgttcgatttgtaatttgtggattatatatactgaaatgaaaaaaaaaatctcaacttgagatttttctttgatacttttcaaccaaaagaattttcttacaagcagtggcggatctaggaagagatagtaggggggtctgaataaacttgataaagcttacagccccccctcccatctacaaatagcagaaaattttagcggggtttttgtggggctcccaaagttggctcgagaccccaccgcccctatgtcggatccgcccctgcttgcaagcgcatttcagatgaaatttgtgacattctagtttgagattgcctattgttccactaaaaccattgtgagataatgtgtcatacccaagactcctttgaaatatagaaattttacatgattttcacatggaacaattcgatttctccaaaattaatgtgaaattcctacgtttcaaagaaggccaagattcaaaatgatggaaatatttcacggagctgcaaataggagtaatagccacatattccctccaaaaaaaattaatttctactatccccgtcctaaaatataatcatttttagcatagtgccaaattaaatatttctaactttgactattaatagcaaaataataaaaaagattaatcatgtaaaattgatattactaaatttatcattaaacaaactatcacaatatgcagctctttttatttaaaacattttatttttatagatatcgttggtcaaagtagcatattaaatatcatgtcgagatccaaaagtgcttatattttaggacggaggcagtagttacaaacctgaacatggaattgaatttttacggagggtgtacactgtttccagccaaaatgccaagtactccttcaccgacatacttaccgtataccccctccgtttgtctagtatttgcatgtggacccgtcccctagcctcctaccgttgtttatttctcttccttccttccacaagtgtactatactcctacatagccccagaatcagagcaggcaggacaggggccttcttttgacttttctggctatcatattcacatgccatcatcagaacccatgtactccagtagagctaaacagaatgctaaaagccctttaaatggttatcaagagggcttaagtactgttgtgtaggggctagccttgctagtactaagatctacttcctccgtccaaaaaaaacacaaaccctgagtttccatgtccaactttaactatccattttatatgaaatttttttataatttgtatttttattgttgttagatgacaaaacatgattaatattttatgcgtgacttgtctttttatttttttcataatttttaaataaaacggacggccaaacattaggcatgaaaaccagggtttgtctttttttttagttttttttttgagactgagggagtactagatagagagagagagagagaggaggtaaatgtaatggtaggagaggtggtagtagtagtaggagtattttcaaggcaatgaatgagccaacaaccccattcaaaagaggggccagctctctgccaggctaggagggacttggccctggggcccaaatcattaccagctggggccccaccccacagatctgaccaccacaaaagagagaaaaatagccataaataaggaaaaagaatcttgagagaggatgagagagagagagagaggaggcacaaagaggaaaaggtcttgtttctctcactcccaagcacattgggagatgtgacagacaagtgtcactcccagctaccaccacactcccagaaccaaatctagttccaaaaatgaaaaaaaaacagatgctggttataactgataacacaacacaatcagcagctgtgctactaatgctcaccccaggtgcagagattggcatcaccatcatcattatcatcatcatcacaaccacaaaggagagcaaggcaaaaaattccaaaagaggaagataaaaagaatgttggattgttttattcatggaaatggtagcattatgtatcagcaccacaaaccagcagcagaagcagcaaaatgacaccaatctttcttttaacaccaacccctaaacccatcctgcaccaattaacaagctctcttgattcgctaaaatgacagctagcctctcctgtactaacctcctccaacctccaaaatttttttgataccaccatttctccagggaagcaatccttcaattggatttctgatgtttttgctatatggtatttacatgtaatgaaaatctcaaccatcatccctctctaactccctctccccctccctcctctcctctatgataatatgctactaatctaaacaacattacaaacttgcccttcttgagaaggagggttggctggttctattggactataaggtaaagcaaaatgtatcaaatacaagaggtgaaagagcccagaaggtgaaagaattgaatggggtcggcatatgaacggtaaaaaaggagtaacaacagatggggaatggaatggggggcaaggggggaaaattggggaggctcttccacatataccaattttagctcattatgctcatgctcgtcagggaaattattgtgcagctgatgaaatgaggtgggactggtggaggctgacaacatcatctcaagttttgacagtaaaaggctataggggggaaaggggagcactatgcatcaatgaaatcgggaaatcggggttttcggtaccagctgcttctcaagaactagatacggcatagtgccttactgagtagcgcagaacatgcaagcttgggcagatcatttccttcaccttcaccccatctttgtatatcttgaatgttgggactatccgcacgttctccgccttcgcgaccatagggctatcttcaacatttacctgttgttttgcacacacaatgcagatttgttagtgtcatttataagcacttgttggatgtatttgattggagacatgtcaagtgtctcacctttaggaaattcagcgaggggcattcgctgcaaagggagttcaccgaaggtgtaattagtgtgcactgctgattcatgattgacatgaagtaaacaacagacacccctgaagatatagcaaattgttcaatagtcagtcaattgcaaaataggcaagtctggtatgataaacctagtaaaacacatgtttcaagaatataaagaaggcagtatttcggattgttcaggatgctaccagagcagcaccaatgagttaatttcagggtatgagatcaagggaaaaaaaagaactagtagagaataacacacctggtgatcctatggcagcacggagttgttctacactggttaccatctcaacctctcctccaaatttcatattcgatacatcctcaccacgagttgtcttcaatgcaacttgagcatggaacagtgcttctgcaacctctgtatcagcaggaagctctttatgaagcacctcatagtcccgcacacaatcagcccaacgctcgagctaaataatagttaacaaggtcaacataatgtacatagagtggaaacaatatccaattactcaattccactatcaaaaataaacatttaatgcatatgattgctgcttaccttggcataggatgaagctcgccttaaaagcgcctttgtgtaattaggttgtattcttaatgcttcgttacagtcatcaacagccttttcccaccgctctagcttcccccagcatgctgctcgattgcaatagagcactggatttgagggctcatatttgagcccttcactatatgctatagatgcatcagaaaacttggcagctttatagagctcatttccttgggctcgagcctttgcaactaatttgacattatttagaatcattccaacttccgcatttccaggatcaataaatctagcattatcagctgcctccacagcagcatcaaacctgtagaatacagaataacaaattcatgctaatctattttaaccgcaatgtggaaaattgagcattattctagggttagagaatcacaccttcccaatgccatgtcgacttgggctcggacaatagagacatatgactcagctagcatgcctgacgggttggctcccatccgatacagcaacacgctgtccaatttcagcaaacttgcaagagtcgagtcagcctcctccaacttgtggagacggagaagtgcttctgaccttatcgcaagaagctgcacagaagagcaaactcagtgtgaattgctacaaaccaacaattccttgcaaccttatgcttgacattaccagccgagaggagtcagctccagcagcaatggcagcatcagcttccctcagcgcgctcttccaatccccgactttcctggcatctatgcttcttccctgatgcatctccacctcctgcagcttctcccactccgaaggatcagattgatggagatgcccagcctgcgttaagtgcctcctcgccttgctaatcatccccaacctgagacaatgcaaggtccaatcggtttaatctacaattctagcaaaaattacatcacaccggttgttccaactgtaaaatcagacatcttgcgagtcagaacaaaactaggacaaaattttcagctttgtgtggcctacatccaatgcacctaaagaaagcttacaaaatacagctaagcaaacgctcccctttcatcagcaatgtgtgatggggaaccactttaacagcacatttacttcatggccaacacaagcttgtagctttcgacaaccacaaatcaaaccaatcaattgttgcgtaagcaaaaagatggaattcttaatcatcctatcatcaagcgtaaaaaaaataaaaaagaaattaaccaacagtgacgatcaagcatgccgcacaaagcagcagcaatcctaaatcgaaatcagattagcttaaggaaaaaggaaagacgctagatttatgttgctctcgctcgcgggaaaaaagagcttagcatccacatccaagaaagcaacagcaccatgcacgaagaagtcggaggaaatcggaagcaagaaagaagcaatgcgggaggaggaggagagctcaccggaggcagaggccggcgaggcggctgtgggcgcggccgttggccggatcgaggcggactgcctcctcgcagtcgcggagcgcgtcggcgaggcggccgaggccggcgagcgcggcggcgcggttcccgcggcacgcggcgctctcggggcagagggccacggcgcggtcgtagtgccgcagcgcctcggcgtgcttgcccttcttgtaccactcgttgcccaggcgggtcacatcctggaggctcccgctgctcgccgacgacgccgccgggaaggtcgccggagatctcggagcgtgtccaagaaacgacgaggagtcaatgctgctcctcgcgggggccatgccgccgccgccgcgcatgatgctcccgtggccgtagttgccggtgccggatccgagcacgtccgggcgggagcg

SEQ ID NO: 9638 - DNA, 3676 bp, Oryza sativa
  unsure (1)..(3676): unsure at all n locations
tatatgattggtactccctccatccaaagaaaaaaaaagccaaccatgtgtcctcttctatttactacgaatctagacaaagggctgtctagattcattgtattagtagggatctcctcctaggttggttttttttgaacggagggagtaactctctatttatatctcttccttattaacttttgtttcttttcttatctacttgtatgtcttaatttggccggtatttttttcaaagatttaagtacataatcagtcctcttgacctagttactatgtactagaaagattatagtgtaagatttaaaattaatagtataagttttcaaaattataccatacatatttgaaataacaatatatatataaggtacaaattatacaatgtgaacacatgttgcaaaattttgatcccgacccttttgtgaaacatataatttggcatgtgaatatatatgtagaaaaacaattacgatgcacaatgagcggatgagctggtcggggcacgcgtcggggtcctgcctctgcaccgagaggagcacgccgatcatggtccgccggctcgccgccggctgcgcacggtcgccgccctgctcctgctccatctccttcctctcgtcgttgatcagcccctgcaggaacctcgttcggctcttgcgcagccggcacaggcggcggcccaccccttccacgttcacccaccggagcgccgccggcaggaagtcccacaccgtcgacgcgccggtcagcgccatcgtctccttcaccatcttcctgaaccacctcgcctccttgctcaccttgccgtcgtcgtcgctacacaaggcttacaaataagtgacaggtagaataagatagccatggtgaccatggtgatcatggcgatcgccgatcgatctttagcttactcgccgtagtacgtcttgtcgcagatcatggccatcatggtgttcatgagcagctcgaacagccgcgacttgagcttcactcgtacgcgcgccggcccggcgacgccatggcggaccgccgcgcggtgaaggtggcgcgccatggcgcgcgccttccggacatggacgtcggcgaagtgctgcacccgtcgcgcggacaggatctcggtgacggcgacgcggcggacgtggcgccagtagggcccgtagctggcggtgcccatggtggaccagtcgtacgacaggatccttgccgacggcagccgcgggcggtcagcgaacgcgacgtcgtgcgcgccgaggcactcctccgcggcgggcgccgaggacacgacggcgacgcggcggggcccgaggcggaggccgaacacggcgcccccgtggcgcgcgcgaggcgcgccagggtgcggtggagcggctttcttgagaggtgcaggtggccgacgagcgggaggcccgcgggctccggcggcggcggcggcacgttcccggcgcgacgctgcgtcccgcttcgtcgtactcgggcggtctccataagcgcgatcagcagaaggaggaagagggcaatgaggagggcgtccatggcggcgaggtgaactcgacgagcatgtcagtgacagtgtacatatatatgcttccgccactggtgtatatcgctttgctgaaatgcaggcttctggaaatctcaagtataatcaagtggtactagcaagttggatcaccaaactactaattcgtcaaacataacacgggacgcccaattgcccaattgcaattgtgcaagtgccaaagcgtgtgtcttggttttctcgaaaatgctatacgttcaaccgacgcgtacgaccagcgtacggctacgtcggccaagcgtacggctacgtcattggccgtctgccgtccgtaacttctgcaacgatcgctaattcaattgggtttacaccgtgtatttcgccgttgagtcgtacgctggtcgtacacgtccgtcggatgtatagcagagttgttgttttcttcgctaatcaaaaggtgtcgtgcacaatgtgtgccataacaaattttttttgttttattacttagttaattacagggcagcttgcattgtgattcagtactctctccaatcacaaatgcaacacgttttttgcatgataaaatctttgaaactttcatttattattcctactccctccatttcatattattaattgtttggcttttttcctagttaagtttgacaaagtttatagaacaatttagcaatatttaaaataccgagctagtttcaaaaaatttatcattgaatatattttgataatatatttgttttgtgttgaaaatacttatatatttttctatagacttggttaaacttgactaggaaaaaagtcaaatgacttataatatgaaacaaagagagtacatgtttttgaaagtttgttctctgttcttatgttcttatgagtagtccaccacaagagtgttcttatttatggcttttgagacgaagagatggacttactttcattcttgtttgtaacaaaaacaatcctatcatttgtgaagcaataccttatcatgccagttggatcaacgatcacaacacatttcgatattgcgctataactaacaaagcctaagaaagaagatgcatcactgaagcacgaggttgatagaaggcctccaaaggcaccttcttgggcatggtaaggccagatccttcagtcatgtccaccagctcctctccaactctttcccactcaaagcactgaatcattgtcccaaggccaaggcctaccatttgcatgcccaagttctctgcagggcatttgcgtctccccatgccaaatgggattgccatctttccttcacttcgcccatcctcaaatctgtagaaacataaatgtacgtaattacactttatataacatggacattcatgcaatagtataaaatttttggaagaatccatatgtagtacctttctgggatgaagcttgttggttcatcccatatatgaggatccctgtgaatatcaaatgtgttcacaagaagcattgtcccccgtggaatatggaaaccagcaacagtgcaatcagaggatgattcatgagggacaagaagtggcgccggtgggtataggcgaagcgtctccatgatgatgcatcgaaggtattgtagcttcgggaggtcatctgcctctagtaatcgtactggctgcccgatgaatgcatcgatttcatcacgagcttttctcatcacatcgggattgtttagtagcagagacattgcccactcaattgtatcggttgaggtacccgttccggcttcaagcgaactcttgagaaaataaaaaaaggggaaagtataattatatgtaaacaaaacatggattgtgggttcacataaatctcattcctaagtagggttcacaatttccccgcaaaaaaaaagtagggttcacaattttggttcaaaatttgtgaattttagtttgtgtctacacgtgggttgtgggtcccaatatgatgttcttcgggccaaagaaagtattgtcaaatatagcaaaaaagacctattcaaagtcaggaaaaaagatgtgttcaaaattcaaaatgttttctttaaaatttctgagagttttcctaaataacaataattgtttgtgtgatgcatggggatcctctagagtcgncgtgcaggaatgagggcataagctactcaatggcgcg

SEQ ID NO: 9639 - DNA, 1707 bp, Oryza sativa
cgcaaaaggctgctgacaagatagccgctgatgtagttgagagattccaggacaacaatcttaagccgactgagtctgataattctgatgatgaaagaactgagtctaattgattgtgtattctgatgataatgatgatgatgatggaggcacaatttgtgcaatactgataaatttatgctgtgcttgatgatttaaacttagctccagatttcttaaaagtttttgtcaaaccttattgagcctagaacccgcaaaagtttttttaaaaacttccagtcctcattggctaagccaaaaaatcaaacaaggcaatgataaatcaagtaagcaaattgaattgataaaaatcacactccattattattatagtagcccccgactgataaatcaagggacaacttgatgttaacagtcaaagaggaagatacaaaagtaatgcctaagcataaaaacgacgaagatgttcaatattccaagagttgtcgatatgagtaccgtcttcacgcttgagtcggtaagaacttggccgagtgacttcaaaaattatgaacggtccttcccacaagggagataacttgtgccgatcctgtgtagtttgaatttttctcagaaccaggtcgcgactaaaaaagctcgagatcgaacattgcgattgtaataacggcgcatcccttgtaagtaccgagccgactgaattaaggctgcttcatgggcttcttctagtcggttgagatcatctactcggtattctccgtagcgctcctcgctgaagttacgaaatcgtagagattcaaattccacctcacttggcaacatcgcttctgctccatagactaggaataacggcgactggcccgtagcccgactcagagtggtgcgcagggaccaaagtacgaatgacagctgttctacccacttgccagcatacggatgcagtcggtcgaaaactcgtgcttttattccttgaagtaccataccattagcgcgttcgacttgtccattgctcatggggtgcgctacagaggcatatcaaattttgatgccgaagtcctcacagaaatctttaaatactccgcccgtgaattgagtgtcgttatcagtaatgatccgattgggtaccccaaactggtgcacaatgttgatgaagaaatctctagccttgtctgtcgtgattgtgataaccggtttggcttcaatccacttggaaaacttgtcaacagctacaaagagatgagtataaccaccgactacctttttaaacgggccgaccatgtcgagcccccaaaccgcgaacggccaagacaacgggatggtttgcaactcctgagccggtagatgagtttgtcaggcgaaaaattgacaaccctcacatgttcgcacaattttgtcagcgtcggacacggctgtgggccagaaaaaaccttgccggtaagccttgccaacgatggttcgtgcggtagcgtgattgccacagatgcctgaatgtatatcctttatcaattgtcttccctcctctaaagacacacagcgttgcaggattcctgatggacttttcttgtacagctcggtctcatgtatgacataaagtctgctgcacctggagatcctctcggcttcatctttatcttgagggagttcttgttttgtcaaaaatcttatgaggggctctctccagtcgacttcaatcatgcttatgtcttgagt

SEQ ID NO: 9640 - DNA, 2686 bp, Oryza sativa
tttgatgacttgctattccagctcggtaccccgctaggtgtttgatctaacgactttcgcgcttgcgctgtgcgacagggtggggatcgacatgccgacgatcgaggtgcggttcgagcacctggaggcggaggcggaggtccgcgtcggcaacagcggcctccccaccgtcctcaactccatcaccaacaccctcgaggaagccggcaacgcgctcggcattctgcccaaccggaagcagaccatgcccgtcctccacgacgtcagcggcatcatcaagccccgcaggtgaaacaccatcccccccccccccccaacacactcccacacccacatgttgttttcaccaaaaaaaaaaagaacatggattctcttgtcttctggagcaatttttatctctcgtgttggagactggattagttaaatccgggtctttttttttagaattcaatttcttcgccttcttcccacctcacgttcttttcgtttctacaggatgactctgctgttaggcccaccggggtcaggcaagaccaccttgctgctcgcgttggccggaaggctcggcaaagatctcaaggttcgttcatccaaaaccaacttcttgcaaataattcaattccagatgcctgtatcccactataggcgcagtgtttcagcttctcatctctactagtagtactgctccagtacgtactaatacgaagaatgagttagccaaagaagaaaacacagagtagtacggggagttctttatttgggaaaaagaaaataagagatggatactggagtacgaattatactgggcgttcacacgttgttgatgagtataacgagatgcaattgcaggcttcaggaaaagtgacctacaacgggcacggcatggaggaattcgtgccggagaggacggcggcttacatcagccagcacgacctccacatcggagagatgaccgtcagggagacacttgccttctcggcacgatgccagggtgttggcagtcgctttggtaaattctacacgattctcagcagtagtagttgccttttttactgcttgcggattatgcgggattgcatggttggacgggcatgctaaaccaagttttcctttttcctgttgttttttttttcagatatgttgactgagctgtcaaggcgagagaaggcagcgaacattaagcctgacgccgatatcgatgcattcatgaaggtaaaaggatttacgaatccgaaataaaatcaacaagattttggtgtcctcttacttttgttaatttttctttttgaaacgaggactaagcattggttttctggtcaacttgttcaggcggctgcaatgggaggacaggaggcaaacgtgaacactgactatatactgaaggtgcatccatctttgagctagtgattaaattttaggtagaattacccaagaatttcttgttcaatgcattggacgttacttgttgcagatattaggactagagatatgcgctgacacgatggttggggacgagatgctgaggggcatctcaggtgggcaaagaaagcgtgttacgactggtgaggattgaactccaacacaaattcagattgagactaacggctatgaatgaaccacggtgtgattattcctattttgatgcgttctgtaggtgagatgctggttgggccagccagggcgctcttcatggacgagatctcaactgggcttgacagctccactacattccagatagtgaattcgcttaggcaaactgtccacatcctcggtggcacagctgttatctccctgctgcagccggcgcctgagacttacaacttgtttgatgatatcatcctcctctcagacggtcagattgtgtaccagggcccccgagaggatgtgcttgaattcttcgagtccatggggtttaagtgtcctgacaggaagggtgttgccgacttcttgcaagaagtatgttcatatctcactgttcttttttctatgaacacataaagtacagtttttgataatatatgtctgtgcaaatgccgagcaggtgacttctaagaaagatcaaaggcagtactgggcgaggcatgacaagccctacaggtttgtgacggttaaggaatttgtgagtgcattccagtcgttccacacagggagagctatagcaaacgaacttgctgttccgtttgataagagtaagagccatcctgccgcactggctaccacaaggtacggtgctcctggcaaggagctgctgaaggcaaatattgacagggagattctcctcatgaagaggaactctttcgtctacatgttcagaaccttccaggtaactgtcattacttcaaaccaaaggggtggttgctatgtaagtaaagcaatagcagcatgactgactccatggtgttatgtcattacagttgatggtggtgtcactcattgcaatgacactcttcttccgtacgaaaatgaaacgtgattctgtgaccagcgggggcatctacatgggcgcactcttctttggtgtgcttatgatcatgttcaatggtttctcagagcttgcgctcactgtctttaagttgcctgttttcttcaagcagagggatctccttttttatcctgcatggtcgtacactataccctcatggattctcaagatcccaatcacgtttattgaggttggtgggtatgt

SEQ ID NO: 9641 - DNA, 4316 bp, Oryza sativa
atattccgccacgttgtgaaacgcagaaaaaatgtatccacaatacgtagctcagcctctctccagtcggggaaattagaataactcccgctccagtgcttgaaagcctcttcgacccgtcaaaatgcatagtccaatactccatcttctccacgggcatgtcttcttggcactcagtccactcggcgacgaagtcagctaaagcttgagacttgatcgaagttcgcggcttgaaagatatatccaaagacatcaattctaaggtccattttgcgatccgcccatttgcttcgcgattgtgaagtatgtccccgagtggaaacgatgtaaccaccgtaatcgagtgaccttggaagtagtgagataatttcctgacggtaattaaaacaccatataatagcttttgaacctgagggtatcttgtcttggagtcagccaaaacctcgctaacgaagtagattggttgttggaatttttgaacatggccttcttcttcacgctcaacaaccaggactgtgcttacaacctgggaagttgccgacacgtataacaacaacggctcttgcggatgtggtgaagctaagactggtggagtagtgagaagttttttgaagtactcaaaggctttttgtgcttcgggtccccactggaaattgttggttttctttaacagcttgaaaaaaggcatcccccgctcgccgagtcgtgagacgaaccggctgagcaccgccatgcagccagttaacttttgaacgtctttctaggagctcagcggtttcatgttgaggatggcattgattttctccgggttagcttgtatgcctctatgggacaccataaatccaagcagcttccctgacggtactccgaagatgcacttttcaggatttaatttcatcctaaaagcgcggatgcttcaacgttgcggccgatctgagttgaaaaacatctctggatcatgcgttgataagttgctcctgcgttctttaatccaaaaggcatggtgatgtagcagtaggcctcaaagggcgtgatgaatgaagtctttaagcagtcggattcctttagtcggatctgatgatatcccgagtagcaatccaaaaaactgagtagctcgcagctggccgttgagtcaactacctggtcaacgcgaggtaacccaaatggatctttgggacaagacttgttgaggtcggtgtaatcaacacacatgcgccattgccccgtcttcttccgaaccagaactgggttggctagccagtcgggatgaaggacttccttgatgaagcccgctgctaacagcttggtcaattcttccttgatcgcatccttcctatcctgtgcgaaacggcggagtcattgctttattggtttagcgtcatccttaacatgtaaagagtgctcaatcacctctctaggaataccaggcatatcagatggtttccacacaaagatatctttattattttgaagaaaggtgatgagcgcgctttcctatttacaatctaactcagcgcctattacagctgtcttagtaggatcagagggatctagaggaatcttcttggtcttggtgtcgctttccccgctctttggcatcttggtcgcaggcacttctccttcgcttgctgtggacgcagccagttggatttcttctcgggcgagcgtgatctcgcaggtctgggccatctcgcagctttccttgtcacacgtgacggcttgcttgatgtcactccgcagggatatgactcctcgaggaccaggcatcttcatcatcatgtaggtataatgcgggacagccatgaacttggctaacgctgggcgtccgagtatggcgtgatacgctgtctcgaaatcagcgaccttgaaacaaatgttctctgtgcggaagttctcccgagtgccgaaagtaaccggaagaatgatctggccgagtggtgtagtagatagccctgggatgactccgtgaaagggcacattactcggctttaattccgtgcgagggatctgcatgtcgtccagagtcttggcgaaaaggatgttgagtgcactgccaccatcgatgagggatctgcgaagcttgacgttgcgaaccactgggtctagtaccagggggtaccgccccgggtggaccactcggtcaggatgatccgagcggtcaaacttaattgttgtctctgaccaccgaagatattggggcgtgtcgggctgaacagcgttgatctcccgttcggttagcttttgctttctcttggattcataagccaggggtccgccaaagatgtggttgagttccttgcgatggtcttgaaaaccagtcggggcgttgtcttcatcatccttcttctttgacgtgctttgatctccgtcagaggccttgcgtgcattcttggcgtattgttctgcgaactgttgatagacgaagcaatctttggccgcgtgattggagtttggatgatgcggacattgggagttcatgatcttgtcaaaagtgttgacccgtgaatgttgccgggaggatggtgtagtagttgccacaagttcctcgggcttgcgatccttgtgattggtacttccactcccccctgtagtcggcgtatctttcttcggcttccaagtggtgcccgactgcttggacgcggtaatggcatcttcggctttggcgtactcattggctttttcgaacatctgcttgaccgtcctgggaggcttgcgcccgaacttgccgactaggtcatcgtggcgaatgcccttggtgaaggcagcgatgatgacgtcgtcggtgatgtcggagatcttgttgcgttgctcggaaaagcgtctgatgtaatctcgaagggattctctagacttctgaacaacattgtagagatcaaactgtgtactagggcgttcaaagataccctggaagttggcgatgaagtggtcgcgaagttccgcccaagatccgattgtgccacggggtaactcgtgaagccaggatcgggcagagtccgctagggccacaaggcaaatagtttgtcatggctttgctgtctcctcctgctgcgtgaattgcgagaccatagacggtgagccaagattccgggttagtggtgccgtcatacttctcgattccagtcggcttgaagccggctggccaatccactcgacgcagttcacttgtgaaggcagcaactccatccacgtcgtcgtcgtagcgatctggtgaatggtggggaacgtatcctcttgccgcgcggcgctggttgataatatcgcgaagatcgacagggcgcctgcgatgtggggagcgaggtcgttcaactcgacgctccctgtgtcgttcaggaggcgagtggacagatcgctcgtcgtgacccctgctcctgcgactagatcccgcgccgacgacactgaggcttggttggtgatagtcttgagatcgaagagggggaactcggctgccagtcggcgtgcggacgcttgcagagttaaccgggaccgagacggcgatcatgatcttggtctggttcaagatgttgacgacgtgattggcttgattgagtgcgtcttccttgaggagggtgtcgaggagggtgatcgttgcaactgcgttctgttgaggggtgcgaaaaaccgccgttccgtcaacgtcttgttgcccgataagttctcgtgctcgtcacccggcatccaaagcgcgctatcgccggtcctcagcctcttttgcagcctattcttgctcttgtgcttggcgctcctcttccagtcggcgtcgttcggcttcctgttgcacgcgttgttcttctgcttcttgggctttacgctgttcttccatctcgttgtcagccatgaagatgccgaagtagagaggcgtgtagttatcttcaaagtcttcgtcgaagtcgtcgaggttgcggtagtcgtagcggcagccgaagtcgttgtactcaatgatctccgttggccgtgagtcgacgccgggggagctgaggtagccatccagttgttccgtcgaaaccgtgctgagaggctggagtatgatgccgacttctctggtgctaagctggatcggggtagaggccggatcccgcctagatctacggggagaagatgcccttgtggtgaagacagcagccaaatcatcggggagtttcatcaggattggcggataggccccatcgtcttgatcgagtcgtgttggagtagattggatctcgttcgagtggtttgaagccgactcggtggagacgatcttggggtagatcttggccgagtttgggataccgaacggggcggagatctggcttcttcccgactggttcgaatccgag

SEQ ID NO: 9642 - DNA, 2413 bp, Oryza sativa
  unsure (1)..(2413): unsure at all n locations
cgagcctcccacacggcccatcacgagcccgcggcttgtgactccccccgacccaacccgttccattccgttccgttccaacggaacggattccattcccgcgccccgctacataaaccccccttcgcctcggcgtcgtcgtctccaaggcttccctcccatcccaaaaccagcgcaagcgaggcgaggagtacgtagtggtaggaggtggcacgccgcggcggcggaatcggaatcgactagggagatggatgcggcggcggagatgcagaaggtggtgagcctgaggagagggggaggggggtcgtcgtcgcggggggcggcgtcgatgtggtggagcgcggacaacggggtgttctcgcggtcgagggcgtcgtcgagtggggaggatggggaggacgacgaggaggcgctgcggtgggcggcgctcgagaagctgcccacgtacgaccgcgtgcgccgcgccgtactgccggtggtggaggagggcggcggcggaggggaggcggggaagaaggtggtggacgtgctcagcctcggcccgcaggagcggcgggcgctgctcgagcggctcgtgcgcgtcgccgaggacgacaacgagcgcttccttctcaagctcaaggagcgcatcgaccggtgcgtactgtgctgtaccacactgcgtcacgatgtcgccgtggcggcggacgcggttgcctgcagggtgtttgatgatttgcgcgtggtaattttgatgtgcagggtggggattgatattccgacgatcgaggtgcggttcgagcacctggaggcggaggcggaggtccgcgtcggcaacagcggcctccccaccgtcctcaactccatgaccaacaagctcgagggagccgcgaacgcgctggggattctacccaacaagaagcagaccatgcccatcctccacgacgtcagcggcatcgtcaagccccgcaggtgaaagaaagaaaaagaagcatcacgttttcaaaattgcttatgctttatataacgttacgtgtgtgctgctctcatggtttatttgcgattttttgaagcattgtaagatatttgcttgaagatatttttgtacgggatgccggttcccaggaaacgaaatgcttttcaattagacatgtccctgtaaactgtaaagttgatttgtctttgttggagcctagattaaccaagatcatttggaatttaacttctatgcttctcctataacacgttcttttgattatgcaggatgactctgctgttaggacctcccgggtctggcaagaccaccttgctacttgctttggctggaaggcttggcaaagacatcaaggtttcaaacaaattttatttacttattttgcaataactgcgatataacgatgcgtttgggcgtttggcaaaccagtccatattcccacagatgtgtgtacttcatctttaatatattgtatacgattagcgaaaatacagagaacatacttttagagaattaatgcataaaggcttacgcatcattgcattaagttggtagaaacaaacaaagttcgcatgaacagataacttttcttaggtgacatgtcccaaaaactgtataccttgctcttgagtgatattactgataactgacatacacaatgcataatggggggaaaactaatttgcagttctctggtcaagtgacttacaatggacaccagatggaggattttgtgccacagaggacagctgcatacatcagccagcatgatcttcatattggggaaatgactgttcgggagacactctcattctcggcacgctgccagggtgttggaagccgctttggtatgactatgtgcaaggaacaaccacaagtgcatgcattcttttctgcagaattcgccttttgagaaaatcgtcatgggttgactgatacttatagagttctcttgttatgtcattagatatgctgaccgagctgtcaaggcgagagaaggcagcaaatattaagcctgatgctgatattgatgcgtttatgaaggtaaaaattgcaaatcctatataaatcagaattattctggtgtctgtagatatgattttcatacgaggtatgagtgaagttttgctataaattttctgtcctaacttgatcaggcttcagcgatggagggacaagagaccaatttgattactgactatatactgaaggtacatgcatctctgagctacaatagctactacctccgtttcaggttatgagactttctagcattgcccacattcataaagatgttaatgaatctaggcacatatatatgtctagattcattaacatatatatgaatgtgggcgatgctagaaaatcttataacctatgtgcctagattcattancatatagggtnccgagtggatgagcaggtcctaattnggcaccg

SEQ ID NO: 9643 - DNA, 7919 bp, Oryza sativa
  unsure (1)..(7919): unsure at all n locations
acatatatatgaatgtgggcaatgctagaaagtcttataatatgaaacggaggaagtacttacttcagattggattaagcaaattcgttttatttactactttacatatgtaacatgttgcagatattaggactggatatatgtgcagacacgatggtaggagatgatatggtgaggggtatctccggtggacaacggaagcgtgtcaccacaggttgaaaaatagaatttcactttcagaacatgggatttgctggacaatgttttgattgactgtttcttccaggtgagatgcttgttgggccagccaatgcacttttcatggatgagatatcgactgggctcgacagctcaactacatttcagatcgtgaagtcgctcagacaggccatccacatcctcggtggcacagcagtcatctcgctgttgcagccagctccagagacatatgacctatttgacgacatcatactcctctctgatggtcagattgtataccaggggcctcgagagggtgtgctagaattttttgagttgatggggttcaaatgccctgagaggaagggtgttgcggacttcttacaggaagtgagtgagtctactatcttcaaaaatgtatatgcacaaatttatcggttatttatcaacatggaaataccgaacaggtaacttccaggaaagaccagaagcagtactggatgcagcatgacaagccctatcggtacgtgccagtcaaggattttgctagtgcattccagtcgttccacactgggaaaagtatagcaaacgaacttgctactccattcgacaagagcaaaaatcatccggctgcattgaccacctcgaggtacggtgtcagtgccatggaactgttgaaggcaaacatcgaccgggagttcttgcttatgaagagaaattccttcgtttatatcttcagagcctgccaggttgttagggatccattcaaacaaatggagtattagtatatttgagaaaacaaacaacatcatacgactgacttcttgttgaattgctatggcagctgatggtggtgtcggcaattgcaatgaccgtcttcttccgtacaaagatgcaccgtgattccgtgactgatggagtcatcttcatgggcgcactcttcttctcagtgatgatgataatgttcaatggtctatctgagctaccgctaaccatttttaagttgccagtcttcttcaagcagagagacctcttattctttccagcatggacctacaccataccctcatggatcctcaagatcccaatgtcctttattgaggtcggtgggtttgttttcatgtcatactatgtgattgggtttgatccgagtgcaggaaggtgagatttttggacaaaatcttatttggtcagtataatttatccaatttctttcactagctattctttactcctgaactgttgcgcggcattaggttcttcaagcagtatctgcttatgttagcaatcaaccagatggcagcggcactcttcagattcgttggtggggcagcaaggaacatgatcgttgcgaatgtctttggatccttcatgttgctaatctttatggttctgggtggttttattctagtaagaggtaaaacttcatctctgtactatgtagttcttctcattgttgcattttttagtaagtcaggttcttattcatgtatgtactggcagagaaagtgaagaaatggtggatttggggctactggatctccccgatgatgtatgcacagaatgccatctcagtgaatgagtttttggggcacagctgggataaagtcttgaataattctctctccaatgagaccctaggcgtacaagcccttaggtcccgtggcgtcttcccggaagccaagtggtattggattggctttggtgcattgctcggattcatcatgctcttcaatggtctctttactcttgcactaacatacctcaaacgtgagttccttccgaattggtttgcttttgttttctttcttttcttttgaaagaaaagtgtggcaaaagctctgcatcatttcaagaaaatagggagaagataatgcaaacaaaccgaaaatatggtagagactaaacaataagacaacaaaaataaaatatgacacagcaacacaaaaaagcacctcaaatcatcaaagtttgttcattgttcttacctcagaacggttttatcttccgattttacattacagcctatggtaagtcccaaccatcagtatctgaagaggagctgaaggagaagcaagccaacatcaatggtaatgttctagacgttgataccatggcatcaagtactaatctagcaatagttgacaacacggaaactagttcagaaattgctgataattctcaacctacacaaaggggtatggttctcccttttgctccgctttcactcactttcgacaacatcaaatactctgtcgacatgccacaggtaacatattttaattccttaacttatattgtccaccagtgagtcattaatgacaattttgtcgtgaccttttgtatcaaattaaaattcaaaaatcaggaaatgaaagcgcatggaatagttgaggaccggttggagctcctcaaaggtgtcagtgggtctttcaggccaggagtgctaactgcgcttatgggtgttagtggtgctggaaagactactctgatggatgtgttagcagggagaaagacaggtgggtacattgaaggcaacatcaccatatcaggatacccaaagaaacaagagacatttgcacgtgtatcaggatattgtgaacagaatgacatccactcaccgcaagtaacagtctcagagtcactgcttttctcagcttggctacggcttcccaaggatgtagattcaaacacaagaaaggtcagtcaaaaaaaatatttttaattccttctctcagcttataatcaattgtttaaattgtttttatttttattttggagaagggtatttcttacccggcctctacatccaaccgaatatatgcagcctttttaaagtaggaacttagcctatcaaacagggaacttatctctcaaataacctaatctgaaattcgctcctatagagatttgaactcaggactttcgggtgctactcaggtcactgcaaccactaagctacatgccctttcaactgagcagagaagggtattgtttaagttgtttaacctttctctatgcagatgttcattgaggaggtgatggagcttgtggagctcaagcctttgagagatgctttagttggtcttcctggagttaatggcctctcaactgagcagaggaagaggttgaccattgccgtagagcttgttgctaatccttcaatcattttcatggatgagccaacttcagggcttgatgcccgagcagctgccattgtgatgaggacagtgaggaatactgtggatactggtagaactgtggtgtgcacaattcatcagcctagtattgacatatttgaagcatttgatgaggtgagcataccttggaatatctgctacaccttttggtgaactcttatcggttttgtaatatggaataactgggttaacttattaaaatttaacttattttggctgattttccaaacttttaatgtgaccaatgctttattgtcctaaactttagataatgtgcagggtcctaaatgttttattaattattgcagcttttccttatgaagcgaggaggagaagaaatatatgttggcccgttaggccatcaatcttcagagctgattaagtattttgaggtatagtaatgttataaaagttctaatatacctctttttggtttgttcgatactgttgttaatcttatattgtttcgtgttctcaagggaatcaaaggagtcagcagaattaaagatggctacaatccagccacgtggatgttggaggtgtcaacaatttctcaagaacaggcattaggtgttgatttttgtgacatatacaggaaatctgaactcttccagtaagtaattactattatgttaaatcctgtaaatcaaatagttgactcactttgaatcttggtagtgaaagctagaatctccttagctgctttatgtatggtggtgacaaaccaacaagagtaaataagtaggcttcaatacagttggtcagatttacatggcttctacagataatgcatcatactactgcaagtatgctactaacaatttagcttgtgataaaattcaagacaatcggtttgttcatgccattacatattgcagttttcggtagcattggactttcttttctccaaagcagttttgttgtggctgaacttgcatcaactattgccagcgtcttaacttgctggttatagaatgctagcagcattgtcaaggtttgatttcagaatactatgctatatagcaaatggacaagagctagagtggctccattaccactgcagctctacaacaaatagtggtagtgtgctccacaggtcaaattcatattactactgcaaactgttgtgcgacatgccgacatgagtcattttcacatttcatatgttcatatgtttgaagtttcaaaggttttaaatttcctgataatttcttttttttgcatttatgaataattaggaattaaactaagcctcttttttttgaacgaactggcacagagtgtgccagtttcattgaatatagtgggagtaaaagttatttacaggtgtgaaaggaaaaaaaaactatacaaccattatcgacaggacgctagatttacaggaggagctgtgttagcttctttgcatccgcgagtacccatgttttcccttccttgattttcgctaacagaattaagctaaggctgtacttctacatggataaagatttgctttaatatcttatcatcaattagattaccatatagctatgatacacacatgtttgccttttatgcgcttcatgtacacttctgagttttcagtggacatccaaaagtgtgaaattagaagtgggaagatttagtatgacctctctgaaaactttttaactaagtggtagctgtttccaacacattgctatgaaatatgataattgcaatctgaacattgattactgccatttataggaggaacaaggcattgatacaggaactgagcacaccaccaccaggttcgagtgaactatatttccctacaaagtactcgctatctttcttaaatcaatgcctagcatgcctgtggaagatgcacctgtcatactggaggaaccctccttacaatgccataagattatttttcactactgtcatagctctcctctttggcaccatcttctgggatcttggcggtaaaacgtatgtaccctaccttgtacatatcaagcatatgactaaaccatcttcaaaatgttatttatgcgccttttgcttcttgctccaggggcaagtcacaagacttgttcaatgccatggggtccatgtattccgcagtgctttttattggcgtcctaaactctcagtcagttcagccagttgtatcagtggagaggacagtcttttatcgtgaaagagctgctggcatgtattcagctttcccgtatgcatttggacaggtatttgtttttttagactctcggttggcctagttctaatctcatgtatataatgtatgacttcaaagactctgatgcgtgaattctgacttgcatttgggattgaactgaaatggctgtgcaataagctattcgttagcactgtcaagctcttttggtcccataacctaacaatgccacttttccctttttaggttgcaattgagttaccatacatcatggttcagactctgatatatggcgtgctggtatactcaatgattggatttgagtggactgttgccaagttcttgtggtacttgttcttcatgtacttcacactgctatatttcacattttacggaatgatggcggtagggttgacaccaaatgagagcatagcagcaatcatctcgtccgctttctacaatgtgtggaacctcttctcaggatatctgatccctcgaccggtaggttattctcccatctcaatttcgccccctttcttttctcatgaaatgtcgcttttattagtcctttagaaccgttttaaatttctctacagaaaatccctgtttggtggaggtggtactgttggatttgcccggttgcatggactttgtatggattagttgcttcccagtttggtgatatccaacatgtgctcgaaggcgacaccagaactgttgcacagtttgtcactgattactttggcttccatcataacttcctgtgggtggtggccgtggtgcacgtcgtcttcgccgtgaccttcgccttcctcttcagttttgcgatcatgaagttcaacttccagaggagatgagaaagtgatcattcttttttgcattcgttctattgtactactgaatagctattagctatcctgtaaatggtatagagatcatcttctagtatttcattatttcaagcatgtaaaaattcggacatctagtaggattctctaggaaaaagaacccttgttgagcttcctgcctcttgaccagctctagctgataaatgtcggatgcagatgaatgtaaagtatggccttcaatgttttcatttttgtcgaattaatgaaagcagaaaatttgttgattcaatccctttgcagcaactcttcagaataacttttgttccattgttctatagatttgactaatagcggagtaaatttttcacaatgcggttactgatcttgtagtaatttactaacaaaataacctctatttttaaatatatgatattgttttcttttgaacataatgtttcactatttttaagaattatttattttcttgcattttattatgaaaggtatttaaagcattaattttttttactaaatttttaaataaatcgaaatggttagaagtcaatagctgcgaaagtaaggcctggtgccctggtttagttcctaaattatttttcccaaaaacgttacatcgaatatttggacatatgcgtggagcattaaatatagataaaaacaaaaactaattgcacagtttgcatagaaatcgcgagaagaatcttttgagcctaattagtccatgattagccataagtgctacaataacccacatgtgctaatgacggcttaattaggctcaaaagattcgtctgtggtttccaggcgagttatgaaattagttttttcattcatgtccgaaagccccttccgacatctgatcaaacattcgatgtgacaccttttcgcgaactaaatagggcctaatacttctgtcatgatgtgcaccttctgttnnnnnnnnnnnnnnnnnnnnnnnnnccccacataactttccttttgaatttggggatgctagttggcgcagctctgcgtcaactttcccaagtcacacccgctgcgaggctgcgaccctctgtccccatctctcccgatgctaatgttaatagtatttttcctaattaatttagagttgaaagcttttcaaatttggaattaaaagtttcagattctggagtaagttttgaattttgatttgaaagttttggattttgagttgaccggcgaccgcacgatatacggagaccatgagctctttcccttccttatctggaggtgttcgctggaatcggaagtagcgcgcgtgcgctaatatggcaatttcgttcgaattttgaccggcgttaggtttcgctttacccgccactcccattttttttcccgcgctttctcgttcccgccaatccgactccgagtctctttacaactgcgtacgggccaagcaaagcgtaagcctcccgagctccatctcgacttggtcggtgcgcccataaattgcaagctccgcttcttcat

SEQ ID NO: 9644 - DNA, 5233 bp, Oryza sativa
gcacggcaaggctgcgcccggcacggaccgagatctgtgccaggcagtggcaacgaactccggtcaccccagtcgctccccgtccacagccggatcggagtcgaggtcaaccaggggccgcccccatcgctaatcccgccgccccgcccccattgctgctcctcgtccacagccgacatcactgtcgtcggtgcacagagaggtagaccggggcgtcgcgtaggaggacagcggccgccggatctgggtcgaggtcgaccggggcaaacggtcgcacggcggcatgagggcgaactccggccgccccgtcgttgctcccaccgccgccgccaattgccgccgccgcagccgccctcgcgccgcccccattgttgctcctccttctccgccgccaccgccggttaccgcccttgcgccgacctcacgccgcctctagctgtgtcggccatggcgcgatggccacgaagaagatggagaaggaaggaagaagacggaaatggagaggatggatagaaaaggtgacgtcagtggcatagttttaatttagtaaaattggaatgacacggttacgaataggcgaattataatggtatttttctgaataggtaaaattgcagtggtatggatcaaattaacacattcaaaaaataagactagcgcgcagtgcgacacggcggcggcggtggtggccagcaactcccggtacgggacgacggtgcggacgagctcctagctacccactgcatcggcctgacaccgcaggctggtgtggacgaactcctacccagtgcaatagcaaccgaactcagtaaataaaggtggaaaagatgatgtactaaggaaatacaagtggtggaagatgctagaagcttctagaaggtacatgaagaaagaaggtagggaggaagaagatcgacaaggtgcctagtgggttttttgtcccgtttgcacagggatgcctagtgggttttttttatcccgtttatcccacttctattttattttttcttctaaattttgtattatcatgcgagaaataaactagcaagcgggtttttatgtgggtagcgggacaaaccacttgcatccctacgtttgccgttcgccgatgatcgaagaacttggggagctgatctgctttgatacaggagaaagcccagtcagccacctttttggtgcaggtcatgtgacctaaagttcggcctttgctttttgagacttgaagtttgggaaagctagtagataactgcaaccagagagagagttctagtgagtccagattgtttctttcgttcatcaaaacgcccgagaaagagggaatgctactagggacgaacagagttctggggccagaggaaaggggaacaaaaggtttgatcaatcgatcgatctctcctggaagtgcaggctctgttctttttgtagtttctgtcctcttgggccaagcgttggaagtgacagagccggccctgcctttccttcctggaaaaagtacactaaaggtcccttaacttgttatcgggatacaaaatcgtcctccaaccacaaaaccagatacgcggggtccctcaactacacaaaaccggtcacaatatatccctcggcggttttgatctcggttttattctacgtgactgctgagtcagcatgggacccatgtgggccccacatgtcaacgaaacattagtgtcttcttccccacttctctctatcccctctcagcttctctcccctcccctccaagcagatcgccggagagggcacgatgcggggcggagcggccagatagaggagcgggcgacggcgcggggagcggccggtcggacagcgggcggcagctgcgcccgtcgtactggcctgccggaggaccgggcgagcggtgggcggagcaggcgacggcgcggggagcggccggctggccagcggggcagtcgagcgaggcgggcggcgatctcgctatcgttcgcgtgcggcgtcggcgtcgtcttcatcctccgcagcgagctccccggtgacgctcatggagctttcctctcaccgccccaacagcaagacgctcgtcgaggcaggcgtcgtcccggacatggtggaggagctctacatccgaaaggtagacgacgagccgctccgcaacaaagccatggccgtcgccgtcctcgccaacgtcgtcaatactagcattgatcgggatagtcggataccaccgtggtgaataaagaaggccatgtcctcacgtccaagtactccatctacgacttcgtccacatgctcaagtgcttcattcccgacgagctcaacgcctcaacctcagcatcatccgtgtcaccgcgcacgccaattcgctcgccgccgtggtctcggtcgtcaaggagaaccaccggggccactccatcctggagctcccggactgaagcgctcggtgtcgccgcgacgaggctactcatcaccctgtcagtgcacatggggcacaccatcgccgagaggctccgcaagatgcagagcgccggcgccagcgaaggaggcagacgaggggcggagggccgctctgctacgggcggttcgcggtcgtgggcggcggcatgtcggcggtgtcatgctccaccgtgcgaggtgtgtgggggagtgcggcgtgcggggtgtttgcttcgggaccatagtgcgtcgggcagcgtcgtcgtcgtcgggcggcttgtcgccacggactggtgatggacgccggccggcgaagagccgccgccgccgccgccggtggtagctcctccctcgccggccgctgcccgcgcccatccgctctctgcagccgccgtggagaggggaggagagaggaagagagatggtgaggggaggggaagaagtggctgacatgtgggacccacgtgggtcccacgctgagtcaacggccatataggataaaaccaggattaaaaccgccgatgacctattgtgaccggttttgtatagttgagggaccccgcatatctggctttgcggttggagaatgattttgtatcccgataacaagttgagggaccttcggtgtactttttccttcctaacaacgtcgctcctgggccgctcggctcggcaagcgaggcggagcttgatggagtccttgatttggtagatggcagcgtcgctcaggtggaagctactccgccaagagccctgatcccgcgtcgccgctgtacagcagcacgccatggatgggctcgaacgagtcgagcagcgtatatatggacaccggcaagtgtcagctcagcctagcttctagtagtacagcaggcgccatgaatcttgtgaaatcaatcaacttttacgttcctgccagttcatagcgactgcaataccacacaagcttggatatctagctacgtactcagccggggaagtcgtcacgaagcctgtcgtccaggggcggggtcgtcgtcgtacttggcctcgatgatgctgacgccgcagtcgtcgttgtagggcggtgcgctgcgacagcagggacggacgacggtggcatcctgtgcagcttgaatgcttggccgtcggcgttggcgaggtcgtagttagcctcccccgtcaccgagctcggcacaccaccgtcgacagcccgtgcccgtacgttcaccgccgccggtgtctcctgcccctcgagctactacctcagctggccgagcgagcgagctaggagacggcggcgagaacctgcaagtgccatgctcggcaaggtcggccgctgcggcggcgtgcgcggacgacgacgaggaaaggcgtcgtcaaggaaagggaaagaggggtgatgatgtgggtcccagagcaattttctatttttaatcggacaatcactgtcatgtgggtctcaatgtctcatggagtcttggtacttttttattttaagtagacagctacgtcagcagaaactgctgtctaaaccggcttaggattttatttgcatcggttttagaagttgagggacgagttcagggatgaattttagactccaggacaaataagggacccaaagtgaacttattccaaaccaaaatagatcagactgtaaatgtaatgggccgttagccgcagcgccacaaaaaccttgcaggctggttcggtgatcgctgggcctgccacccgtatagggccgcgtctgttcgctagatgctaaaggccatattggccatctcttaggggctgggaattatgtgccagtttagttggaaaaaaaaaatttgcccgtcacatcgaatatacgaacacatatttaaaatattaaacgtagtctaataataaaacaaattactgatttcactagaaaattatgagacaaatttattaagcttaattaattcatcaatagcaaatgtttactgtagcaccatattgtcaaatcatggcgcaattaggattaaaagattcgtctcgcaattctctggcgaactgtgtaattatttctttctacatttaatactccatgcatgtgtccgaaagcgtgaaaattttgtttgagaactaaacatgccctatgtcttgtttccatataaacgaaattttcattgataagattagctaatattttactatgaataattttgacaacctcagagaaaataagccatttactaacaatagaggtggcgagatttaacttatttttcttttttaaccctacctacaccttgtctctaccaccttaaggccccctttgattcaaaggaaattcataggaattttaaaggatttaatttctataggaatttttcctatatagctctttgaatcaaaggaatgaatcctatggaatcctataaaattcctatggaatgcctcttcccatgcaaattttgaaggaaatttaacatgaggttctacctgtgtttctctctcctcaaattcctgtgtttttcctgcggctcaatcaaacggtcattcctatgtttttcctgtgttttgcaatcctctgttttacacttgtattcctatctgaatcctatgttttttctattcccccgttttttcattcctgtgattcaaagggggcctaaggctccctttgattcaaaggaaatttataggaattttagggctcctttgaattggcggattggcataggaatattggaggatttaatttactaaggaaagtttcctatgaaaccctttgattcataggaaagtataggaaattttccttaggccccctttgaatcacaggaatgaaaaaacgggggaataggaaaaacat

SEQ ID NO: 9645 - DNA, 2815 bp, Oryza sativa
ctgagaggctggagtatgatgccgacttctctggtgctaagctggatcggggtagaggccggatcccgcctagatctacggggagaagatgcccttgtggtgaagacagcagccaaatcatcggggagtttcatcaggattggcggataggccccatcgtcttgatcgagtcgtgttggagtagattggatctcgttcgagtggtttgaagccgactcggtggagacgatcttggggtagatcttggccgagtttgggataccgaacggggcggagatctggcttcttcccgactggttcgaatccgagtcgaggagagaaatcttgacgaggtcgttggtgatgaagtcgaggctgccgaaccggaacgcctgcctaggagggaagacgaagtcgtcgatgtcggaaacgaaacccatcgcattagtcggcgaagtacttgacactacccctacttggcgcgccaactgtcaaaacaagatttcgacaatactaaagggggtggctatcaaactggaaaagtggatggtttaagagacaaggaattttatacaggttcaggcctttttaatcaagaagtagtaccctactcatgtccggggattgatctgccgagtatattattgatcgtatgatctgggtgaaaaaacgtgcccctagaggcacctggaccctttcttatataaaagaaggggtccgtattacaaaatacagtccatatccctaacggaataggtagttacaaataaaatacaatcgtaaccgactaggatcttgggtattaccttgacatacaagtttagaatttaacccaagtcattttaaagatattctatctatatatagcactccatacccagtcaaactatacatgccgtgtatgtatggggtatccatgatctccacaattcatttgtcaagtaagtacttcaatagtacaattctgatagtgcgagcatagtcgtgaaatacgacattcacaaaaccgatgataactgctcgaaaaccacaggtatcatcagctttattgctccggctcaagctaaaagttcactaaaatccggtcaagtatataaaaactcaagctaaaacttaaattttgcattaaactgtcatctccgagctgttaacatcaaaaccgacaaatccaaatcctcgaatccttatgggaagcccatttcaactcaccttaaacagtcaatgggcccagccatctatcataaagcccaacaaggcccatgaaagcccatctcaactcagcctagggtttttttccactccgcggcgtctcgctgtctctctctcctctatatataagccttcgccgccgccttctcacctttttcccttcctagcaccggcgacgtcgtcgccgccgccgtcgtccggcgtgccgccttcgtcgccatgggtaagctacaacattccgttcttctctcctcccgctcgcctgcggatctaaccgtgcgtgtgtggtgcaacccggatcaaggtcgacgagctacgggggaagaacaaggcggagctgcaggcccagctcaaggaccttaaggcggatgctctcctcctccgcgtcgccaaggtcaccggcggcgcccccaacaagctctccaagatgtacgcgcttcgcgctcgcgctcgcgctcattctctcctctttctgtgtgcccttgtgattgattgaatctctgtggttttgcagcaaggtggtgcgcacgtcgatcgcgcgggtgctgacggtgatctcgcagaaccagagggcggcgctgcgtgaggcgtacaagaagaagagcctcctccccctcgacctccgccccaagaagacccgcgccatccgccgccgcctcaccaagcaccaggtataagatttcataaaaccgtgcacacctactactgatatctaaaactcatgctgatagagattcacatggtgtcatcttccttcaaacttttagcttaacttgggctgttttgttttttttgcatgaaatgtgtacttactaccattgcagtagataacttagttaatgcagtgaattgttctgtactgctacatctgcatgctacaccattttgttaattctattagcaacgccattttgttaactgcgtggggtttcatcattgttggttgcttttaattgttagattgtacatgtaattgtagatttttattatattacttgctataaaattgcttttcttaacaaaattgtgagaaatacaatcagttttgtcagattgtatgcatccctcatcgtcaatcacttcacagcaactactaggaaacagataaaaaaatggggcatcattttttcccatgtagaatgtggaatacatgagccctgggatgaatacatattgctcacgcaatatcaagatatatgtagttactttttttgtttgttttggcagttggtacttggctgtgcttgtctgcatatgatatataggaagatattaagagagaagggtagataaaggacttgtttgctgcattctttgaaaaatgaaggctcacctttttcaattcttatagaaacatgaagtcatttgtcatcctaaacttatgttcaattttctagtgtcttgtaatgaatctagttatgttatacttgcatccgtcttctgacattttccatggttgccatatcacagctttcgctgaagacggagagggaaaagaagcgcgagaagtatttccccatgaggaagtatgccatcaaggcgtaggtcagggaacatgagagaatgttatgtttagcacatcactcagtcaatttatctgccctcgagttccttgaattttgatgtt

SEQ ID NO: 9646 - DNA, 5098 bp, Oryza sativa
caatagcagcatgactgactccatggtgttatgtcattacaggttgatggtggtgtcactcattgcaatgacactcttcttccgtacgaaaatgaaacgtgattctgtgaccagcgggggcatctacatgggcgcactcttctttggtgtgcttatgatcatgttcaatggtttctcagagcttgcgctcactgtctttaagttgcctgttttcttcaagcagagggatctccttttttatcctgcatggtcgtacactataccctcatggattctcaagatcccaatcacgtttattgaggttggtgggtatgtgttcttaacatactacgtcattgggtttgactcaaacgtgggcaggtgagatttattgagattatatatttcacaggtgtataatcagctatatcttactatagtgctgctctgcattgttctgagagtatttgtcttttttttgtttaccccagcttcttcaagcagtatttgctcatgttagcaatcaatcagatggcgggatcacttttccgattcattggtggggcagcgaggaacatgattgttgcaaatgtctttgcatcattcatgctgctaatttttatggtattgggtggattcattctagcaagaggtaaatgctcaccattatctgtctgagaagtgcttggtttgcactttttatcaaaagctaagtgttccattctgttcgacttgcagagcaagtgaagaaatggtggatttggggctactggatatccccgatgatgtacgcccagaatgccatctcagttaatgaactcatggggcacagctggaacaaaattgtgaatagctctgcctccaatgagacccttggtgtgcaagtcctcaagtcccgtggagtattccctgaagccaggtggtattggattgggtttggtgcaatgatcggcttcaccatccttttcaatgctctcttcacccttgcccttacatacctcaggcgtgagtataccttgagaactgatttgctctttttcctagagttggctatatccaaacatgagaatgatttcatcttgtgatttacagcatatggaaattcccgtcagtcagtatcagaagaggaactgaaagagaagcgtgccaatctgaatggtgagattgtgggtgacgttcacttgtcatctggaagtacgcgtaggccaatgggaaacggcactgaaaatgattcaacaattgttgatgatgatactgaggttactcaaagggggatggttctcccatttactccgctttcactcagctttgacaatgtcagatattctgttgacatgccacaggtaaaatatggaagaactcctaccaaatcaggaattgatcattagtttgcatttttctaactttcagcgtgaaattaatttcaggaaatgaaagcacaaggtgtagctgatgaccggttggagctcctcaaaggtgttagtggttcattcaggccaggggtgttgactgcactaatgggtgtcagtggtgctggcaagacaacactgatggatgtattggctgggagaaagacaggtgggtacattgaaggaagcatcaacatttcaggatatccaaagaaacaagagacttttgcacgtgtgtctggatactgtgagcagaacgatatccactcaccgcaggtcacagtctatgagtcgctacttttctcagcatggctccgtcttcctgaggatgtagattccaacactagaaaggtccgtcaaacatttttttttgctattcctacctatacttgatatagatagatagtagcttacctttgtgtatgcagatgttcattgaggaggtgatggagcttgtggagctcaagtcactgagagatgctttggttgggcttcctggagtgaatggtctgtccactgaacaaagaaagaggctaacaatcgcagtggagcttgtgcaaacccttcgattatattcatggacgagccaacctcagggcttgatgcacgagcagctgcaattgtgatgaggacagtgaggaacactgttaatactggcagaactgtggtgtgcacaattcatcagcctagcattgacatatttgaagcatttgatgaggtgagtgtgattctactttggagattcgtaccattttctcctcagatattaggatacattgcggaaagcccaaaaatcaattgattatggctgtgtttctaaactacctggatgatttgactaatatattttttgcttgcagcttttcctgatgaagcgaggtggtgaagagatctatgctggtccactaggccatcattcttcggagctgatcaagtattttgaggtaagtgatattacactaattctaatatacctcaatgacatttcttcaaaattactgattcaatcgcatctttgtgtatcatccagagtatcccaggggtcagcaaaatcaaagatggctataacccagcaacatggatgttggaggtgacaacaattggtcaagagcaggcacttggtgttgattttagtgatatatacaagaagtctgaactttaccagtgagtaacttgcttttaatcctaattgttgtttcatctttctgcaaagcaatttttttttgcaatatgccatgtaacactgattgctaccttattcaggaggaacaaggccttgataaaggacctgagccaaccagcccccgattcaagtgacctgtatttccctacccaatattctcagtcttctttaacacaatgcatggcttgcctgtggaagcaaaacctgtcatactggaggaaccctccttacaatgccgttaggttctttttcactactgtcattgctcttctctttggtaccatcttctgggaccttggcggcaaagtgtaagtaaaatgccactttctatatgcaaagagggtgtaccttagaaatcttattcatttcgtgcttcttaatccaggacgaagtcacaagacttgttcaatgccatggggtcaatgtatgcagcagtgctgttcatcggtgtcatgaactgtacatctgttcagccagtggtggccgtggagcggacagtcttttaccgtgaaagggctgccggcatgtactcggcgtttccatatgcatttggccaggtgaatggtcctcctgcaactgacattgagtcctggttgttgcatccttgagatccagatactgattaattcctctttcaggttgtcattgagatcccatacacactggttcaggctactgtatacgggatcatagtgtatgcgatgattgggttcgagtggacggctgccaagttcttctggtacctcttcttcatggtcttcacgctcctctacttcacattctacggcatgatggcggtcggcctgacaccgaactaccacattgcctcgatcgtctcatcggcgttctacgccatctggaatctcttctccggcttcgtcatcccccgacctgtaagtttcgcattcccaattgcccctcattcttccatacacttccaactccattgggtgctcatctctgtttgtgcctgatgatgtttcagagagtcccaatctggtggagatggtattgctgggcgtgccccgtcgcgtggacgctgtacggcctcgtcgtctcccagttcggtgacatcgagacgccgatggaagacggcacccctgtgaaggtgtttgtggagaactacttcggcttcaagcacagctggttgggctgggtggccaccgtggtcgctgccttcgctttcctcttcgcttccttgtttggcttcgctatcatgaagttcaacttccagaagagatgatgatgacaagggatattacattcattgagttgcaaacgctacctgaaatttgtgcatatcattggatctaaagaatttttttttgttgccattagaatattgtaaatcataccagcctttcccccttatttttatagaaagattgtactactgttacacctagtaattttgttattagtacccttctttttatagaaagatggtactacttttatttttaatttttatatggggttgtctagtgttcagttgactgaactcacattttgctcgatgtaaatgaagaacagttctgctgttcgtcactactatttttgttaattgtattgcccagttttcctcaacaactctgccctacaaaattgtgaaatagtgatacatagcctgtatatatacatccgtaagcatttaagctcacagagctcacacgtaaccggagaaattcggccgccgattagatgatcctaaaatcgttttttcttttgcggcacctaaaatcgtatttaacgtcgtgggttttggaccctgtttagaagattagcctcatgaaaacaaacagtgcccaaatataatgatttaatgatcctagagtgatatgtttggatttatgggctaattgagggctaaaagatagagagagagtagagagagaggggctaatgtttttgaggggggctaattcacttaagtcccaaattagcttacttgtttggattcttaaggactaatttatggctaaaaggttagggctaataattatcccacaaaaacaaacaggcccaaatataatgatttaatatgctgggctaatctgccttttaactttgtaggctattttcaaatctcatcaaacctacctccaggctccagccgcagtagtcattcatatacgatctggatcccataaattcgaggagcagacttgatttctgattttgctcggcaccgtgaattacttgctgaggttttgcttttgcctattggatggtttggtatactgtagtgcgaaccagcgtgtgattcaatatgaatactccctccgaaaatttgaccctaaaaatgaattaaattttcgaagcaggtcaacacattccacacgtgtcaaggaatgtaacagcaaccctggtacacgaccaaataaattaacatgagaaaaacagtgcatcaaacacccagagaccttctagaatcggcactgtacatgaaagccattagttctaaaaaataaatacatgaactgatgaaagctcattcagaccccacctgtcagtctcaccccagccc

SEQ ID NO: 9647 - DNA, 19392 bp, Oryza sativa
ccgccgccggcgaccactctccggcgccgaggcggcgaaccatgatcggcgtgctcctctccctgcagagcaaggaccccgacgcgtgccccgaccagctcatccgcgccctctgcatcgtgagtataccaaccagctgcatgccgcgacgtttgctcctctaacggacgaacacctgtgcgttcttcttcttcttcttctccggccagggatccctgcaagccgggacggagacgtcggcggcggtggtggagtgggcgatgtcgctgctgctgaacaaccccggcgcgatggcgagggctcgcggcgagatcgacgcgtgcgtggggcagccggcggcgcggctgctggaggcggccgacctccccaagctgcactacctccggtgcgtcgtgatggagacgctccggctgtacccgccggtgccgctcctcgcgcacgagtcgtccgccgactgcgacgtcgccggcttccacgtccgcaaggggacgatgctgctggtgaacacgtttgctattcacagagatccacaggtttgggatgaaccagaatccttcttcccagacaggtatccatcttcttagtgcttactctgttcatattataaataattgggaaaagtacgaattaccccctgaactattgcggtctaccgaattacacccttgaactcaaaaaccagacattgctcactccgaactttcaaaaccggacgaataacccccttgatccaatctaaagcggttttgtcctatgtggcaatccagtcagcaattcctattttaaaaaaatgtgggacccacatgcatacctccctttcccctcttcctctctctattctctctctctcacacacatatgcacctgatgcagggggcaggaagtgggcgcctgggcggcggcgtgagcggcggcggcgcgagcggctggcgactagcggacggcggcgcgagcggcagcggcagggcgcggctggtggtgagcggcggcggacgggtggacagtgtgcgggggcggacggtggacgacggtgcgcgacagcgaatgggcggtgcgcggcggcacgcggggtggacaggtggcggacgggctggcacacgcaatgagaggtgggggcggggactaaccgatgggcagtggcgcgcgcggacgagcggttggcggttgtgcactgtggcagatgagcagtcggtgcgcgggggcagcagcggaacgcggggagggcgctaggtgaggcggcgtcgccggaggtagcagcccgtggctcgcggtctgcttcccctcaccaggactccctctctctcgggcatgggcacatgtcgctcggcacgggaaacgaaggcggcgggcctgttcaagcttgttcgcgtcgtggcgagcgagcagcacgttcgccttcggcatgaatgctcggcttgtctccggttacatggcgcagttcgtggaagacagcgacgatgacgatgttgtcgaccatgaccgcatcaagcccgatgccctggacgacgagtcaagcagcctcgtgatgttgtaccgcgtgtggcggatggcggagcacgggaacgtcaacggcctcctcgccaagcggccctgttcgccgccgcccattccgccctcaccgccgtctcgagcgacagtggctgccggagccctttttgccgccgcccactccgcccacaccgccgtcccgagcgccggtggctgccggagccctcttcgtcgccacccactccgcccgccatcgtcctgagctcctctagccgtcccgagctccaccgccctcgtcgtcgtcctcgaggtgagggagggagaagagtgaggatttgggagagagatagagaggtgaggggtaaaagagagggtgagagactgacatgtggggcccgctgatttaaaaagaaaagaattgctgactgggctgccacgtagaccaaaaccgcttgtaaagctacttgggggggagggggtttcgtccggtatagatagttgagggtgaaaaatgactggtttttaggtttaggggggtaattcgtactcactcaatacttcagggggataattcgtactttttcctaaatcatttgatttttttctaagtcaaactttttaaatttagccaagtttgttaaaaatatatagtaacatctattatattattaaagcatacttgaaaggaggcaccacgttcgttgtgggggctagaaattccaagattaatcagagaaaaagaaaaaaggagagtccaagtagaaatacaatttaaaaatagcttaaattcggaattaaaaataaggaatattgaaagaagagtcgaaataaaaacccaatacgagattaattaaaattcggaataaaaataaaacccaaaattagaaaaaaaaacaaaagaagatttcaagtaggaatacaatttaaaattagctgaaattcagaattaaaaataagcaatattgaacgaagaatgcatataagaacccaatacaagattaattaaaatttagaataaaaaataaaataatatccaaaactagaaaaactaaaagagaattcaagtgggaatacaattttgaaacaactgaaattgaaaataaaaaataaaaatattaaaagaacacaatacggtattaattaaaatttttgaaaaaaaaataaattatgaaattagaaaaagaaaaataagatttcaattaggaatacgatttataaataactaattttggtgataaaaataaagattattgaaataaaaaaccatttaaaacacatgataagataaattaagtaacatgcctataaatgagtagggtggtggcggttgatacgacatataaaaactgttaataaaacaccaaataaaatcctaatgacgattaaaaggagggacgacaggcatgccgtgaagcaaacgtgcaaggcggttgccgggacttctagaaagtaaaaaaataaaccccattgataatcatattcgatttttaaaatctcaatgacaataaaaggagaaccagcgggcggggtgtataggagtatagttgcatagccgcggacggttggcgggatttctagaaaataaaaaataaattccaatgatagttatgttcgatttttaaaatcccaatgacaataagagtaggcgtcggatgggccgtagaggagtgtagtggcagcgtttgatgggacttctaaaaatcctaaaaaatgaaacccaacaagataataaaagataataaactctaaaaactatagtatccaatttttaaagattcgggacttcaaaaaatgaaaaaaaaacccagtgataatcatattcgatttttaaatctcaatgacaataaataaaggaggtggcggacgagccatagaggagtacactggcaaagccgctgacggtttggtgggacttttagaaagtaaaaaatgaactcaaacaatcactatgtttgatttttaaaatggcaatgataataaagagaagaaacagtggataggccgtagagaagtataatgttagcgtttgatgggtaaactctaaaagttataagatccaatttttaaaggttccaaggagaatgaatagaaatagtggtagatcgagcaagcaaataaagaatgagatgacggaagtaaggggtagtaactggtatgacttttaaaacctataaaattagaagcataaagatgataaggtttggactttcaaagtcttagtacaatgagatagctatttaagaaattttaagtaaaatcatattaaaaaatgtataattttgtatggtgctagccgcgcaattgtgcgggccatctagctagttttcaatataaaacaaatatatttgcaaaatatattcaatgttaaatttaattaaactaatttagtgttgaaaatgttactaatttttcctataacctggtcaaactaaaaaagtttaattaagaaaaaagtcatactaagaaaaaaagtcaaatgacttataatatgaaatggatagagtaatggatagagtagtatatatcaatatatgcatatacaaatgttcgtttcatcttactctttacatgtaacccattgtcaatatatttgtgtgtaagttgttactagtactaaaaaaagagcatcttaataggtttgcggatggacaaaacgaagcgaagatggtgatcccgtttggtatggggagaagggggtgcccgggagagaatttggcgatgcaaatggtcggacttacactagggacgctgatccagtgctttgattgggaaagggtgggggaagagctcgaggacatgggtgagtcctctgggattacaatgccaaagaagttgcctcttgaggcattctatcaacctagagcatgcatggttcatcttctttcgtcctaatatttaatcagcagttttccaaacataattggttgttgaactctgtaatcgaaagaaatgatgtagctcaatttggtgtgatttgcccatagtaattggtgcctctgttactctatatatgtatcctatgaaactttttatgaacctaactagttgagaactggtatgtgttttgataagaatatactagaaatattggcgtgctacgctgcgcccggttgacgttgccattgactttgaaggaatacccattataagtaatgggtctgacaaatgtctgaatttcattcacccgaatcacatcgatcgcacaagaacataaacatgtttgcttcggcatgtaatggttgaagtaggataaaagaacttctacagaatatctttacacaaagtggtgtctgaaatcaatgtcaacttgcaattacattggtattagaattaggcaaaattaactaatgtatggagagctcccgtgtttggccatggccaggacaccataaaaacaaaaggtaaatctttgctctattatccttccaatcgtgccaatatcattcagcaaggcatcacctatcatacaattcgatagaacatataccggtgttaccacactaatatattgaggatagtatcaatggagaaaagggaaagatgcaagtgcagtgactgattccgtaaagatgggtaaggtaaggtatatataaacagagaagatgttgacctagtgaataaagcaccaattattagtgcagtcaacaggagagaaataactcaacaaataaatgaattaatcagtgactaaatatagcagtttctttgtgtaagtcaaaactaaaacctatggatatgctatataacttatctatacaaagattaaatcatatgtaatcatgtaaggacttcacttgtcaaatgtcaatgcttagctaagttaatgtggcataaagatgtaaccaccatttgagagcatgaatacaacacaatagaacttgattacacatgctatttgggagctttgctcaacaactgattactaccaaacggttaaattctttatttgtactgtagtttggaataaactaatattaatatgaatatataatatggacatgtaactttataaagggtcgaaaaaatatgtttcaggttataacaaaatcctgaaatgcaataaaggtaactgagttttagtcaagcaaatatttagagtgaatttattttatttgaacactacaataaaaaatgtgtgtggtaagaaatatctacaactactgcttcaattggttgtgaccaaagcactgatgaagatgaattcagactttatgaattattgcatgtaaaggaattaagaccctattttatataacgtatttgaagaatacggtacatgcaaattgcgggtttaagtaagtatgttctctgaagtgatgtaccagttgtaagccttagttctggcaattcactgttaactgatcttgtcaagtaacaacaactttatagctaagttaatgaccatgtaggtaagcctaattacccacaagccatgtctaactgtactaatgcctatctttttactatttaggtcaaatgaaacacaccaattttggacatttgttatgagtccacatttttcctaccagcaggaaagaatgatgaaatgactgttgttgtttcatacagatgctgtaaaaaaagagtaagaaactataaccagaaatgtgataaattgacattaaagaatgctaagtataaccagaagaacatgagaacctgacactgttagatttgtgctgcagcagaacttgcttcagcaactgatacttgttgaatacatcaatgaggcttgacaaaaagaaattgcagttaggagcaactgcagagaaaaagcattgcagtcaacctaaaacttagtgccactgattgggataccacagttatagcgcgctcattggcaatgctctggccaatatgaaatgaagatgtaattatgagaaatcagttctgataaattgaaaattactttgtcaaatcctaaatcattgtacattgctccggaagaagaatgcacttctatgaacagttgctgaaggcgcttgtttgaatgaaacattgtgttgaatcctctcaaaagtgaaaatttttctctattgtgttaatgtaagataataattgacctaagaaaaatggttaacttaaattaataagcaacagactaactgagctttcaacgcattatctccatcatggattaatgataaatagttcatttaaatgtgcccatcttgtagagaaaaaggatgggcaaacaatcttgttatgaataaggacaaaccaaggacagtaatgagcatatacaaagaaaagcaattagaaaatctattatcttctacactgctattgggaagcaaaattcaatgtatatagtttagagtttacttaactttgtgcagaattggctacttgtgtagatcatgtgctcgagaagatggcgttctgagtctgtctgcatcctattttctctaacaaaaggaaatagtgtatgagaagctagaaccaaatgtattccatgccaaactaaacaatggagggggaagcagatctcactaaaagatatggctaactgagacagaaaaaagcaggaaacgcgaacacactatagaatcattgatttgaatattatacctgattaccagagcagttaccataccagaaaaggcaaggcagtaatgtattcagcagttacagctgcaattaagaataaaatcatgcacacacaaattagcatagtaaacatagaacattaaagataactatcaaagagatagaataggatgccaacaaaagtaggatgggtgagggtagcatacgaccaaaacagaacagagacctaatcagcatggcacaagcagaagggagagaagccccactcgtactgacctatggtcctctcgcataatagcagccatggctgttgcttcaccttagattgtgaggctaggtccccgtgccgtgatgcagaccctggttgtggctattggtcaaagatgcgaggatagcgtctaggaaggtacctaagggtggaggaggtgaggattaccatggtcaccaatggaagaaacgatttctagtgaggagggaggggaaaatcatatcagcggcacaccatattgtggattttggaggaggcgaaggctagatgagagaggtcggacggaaatagggattggagcgatgggatcggaggtaatctagaaggctttcattggatcaccttcgcagataaagtggaggccctagggcctcccgaccgagcgcacgcggccgaccaaaccgttgaggcaagtagctccgacgggaaggcaatgcgcagccgaacggtgaaggaaaccctggggaagaagaaaaaaaaagggagaaatcactggattagactgctactcagcaggaagaaagaggaaaaagaaaggaggagaaatcgccggcgacctcaccaagaaaaccgaagaggagagaatggggagaggagggatgtgcgcagcagccgagaagagacttcaccaagcatcctccactaccacgtacggcggcaggagacggtggccaatccggcgtgcgcttacacggcaagcggtgtttctagcgccgctccgtgtggaacagaagcacggaaacacggaaatagaacgtgggctgagcaatgagaaaggtaaaagcccatgtgtaaggaagggccggcacaggaaaatggcccaataggaacgcatctaatcctgtgctactaaaaccaattaaacagaatctaatatatcgctgcgcactatcgctgctaattgctaaatgcatatgcgctttaattatccgaaccaaactgatgacgtggcgcccctaatcttccaaagatcccacggggtttaagtaatctaatattagtataagttaaaactcgattggcaatggagcaacaacaagtattttgtactcgcgctggcttgacggttatccttgcctcattgtctaccatatttatggcttttacatcatgacaacatcatgacatgactgtgtttagtttctgaaattggggagaagtttagggaaagttggtagtttggaaaaaaagttgagagtttatatgagtaggaaaattttggatgtgatgtgatgaaaagttggaagtttaggagaagtttggtgtgaactaaacaagacctaaactatagtgcaaaaggttaaatgaattctgatcaaaattcgtccgttggcataccttcgcttcttcccaataaaaaaatttcgctgattaaattgtttagccaccaaatgttggtgataaacttcgaagacaattagtgacaattttgttaggagctagattttaaaaatagaattagttctaacacacaattgttacttctatttcgataaatacaaatatattttatctcaaactattgctctatttctgaaaaagtatatttattttatgtaaaattatatagatcagtttagatcgttcttatacttgtacccaccatatttcaccggtgcattttttttcttttttttcgatgaaagtggtaatttatatgccgcgatgaaaactgtaactcttttacatctttcgtataaaactaatatcacgtaacgtaataagaaacaccgagggatcttccggttagctacacaaggtggtgagctagacgacttggattcaaatgctcatccattataattatttgatattaggtaatttcttaatatttacgtctttacataatataatataataggtagatataatcggtaagaacaattcataatactgattaaatttcataaagctacatatacttatatgctatatgtttaacctaatacttttcataaaactacagacttaaagtatcgtatcatattagaaaaatacaaatttaacattagttttatcacaaaactacaacttttatagccttaaatatgatatggataaaaactctaaaatctatagatattttataatttcatcagtaaatctgtagttttggatatgatgccttaaatcagtaattatatgagaaatttgatacttcctccatttcatattataagactttctagcattgcccatattcatatactccctctgacggagcgtggggctcctcaccgggagaccgcgcaggcccccctttgccagttcggccgggggcgctaagtgaggttcttcaccctcgatctgtggaatgtacgcgagagagcaaacgcacaagacacgggcgatgtagacaggttcgggccgctgagaagcgtaataccctactcctgtgttctggtggatatgtgtgaggaagagttacagagagtcggggagcaagagagttcaagctctagaacccctctttttccttctcttctggttcttttttctctcgatctcctcccccagctcaagtcttctcagagttgtccccccttttctttgtgggcaaggtcctccttttatatctcaaggggataccacatgcaccacttctacctactcttcttttgggtggggacccaccctatcttgaccaaatcttgacacgcacctccgcctggaagctaaatcaacgcctgtccttgagtgatgcccagcgccgtcactcgtcagacacaggggatcaccctgtcatttcttcattaatgggcggagttttgcaatggccgctgtccgaatgaccctccgatgggatgggtcatacctgcctccactccgctggaagctgatgcaacatgagagcacggttgtctgccgatgacgtgaccggcgtcggaccagtgacagaccggtcattcttgtccaccacgtgtcagtttagcatgccacacatctgcccttcttcatacagtgacttccttgcaatggttgcgatgaagcctggcatgaatcgagccgggactgatgtgctaactccaggagttaccacgctggctccagctagggacgagtgccaagaggctctcatcattccgacgggacggggcgaggcgtgtgacagtccgcctgctgccacctaacccgcgatctgaccggtctgtgaccgatcacacactgcgaccggtcacggaccggatatgcgtgcgccgtgctgcattaaatgcggcgtggcgcgcttgtccattccgcaataaatgtggtttggtgagcgccgctgtgcccacctaacttacaaacatggcgccaataccacagggggtcggggcgccccagccctcggggccgaagcaggagcggcccgacccctcgggaagacagaggagggggtggccacgtctccctcgggcccgaccccccccccccccgagggggtcaggccacgtgggtgactgcggctgcccaagcctctagtcatgatacccccgatcccatgtcaccgacaccctccgtttctaaatatttaacaccgttgactttttagctcatgtttgaccattcgtcttatttaaaaacttttgtgaaatatgtaaaactacatgtatacataaaagtatatttaacaatgaatcaaatgatagaaaaagaattaataattacttaaattttttgaataagatgaactgtcaaatatatttaaaaaagtcaatgacgtcaaatatttagaaacggagagagtttatgttaatgaattcagacataacatctatatgaatatgagcaatgctagaaagtcttatatcctgaaacggagggagtattaaatatgtagtttcgtgttatatcctgaaacggagggagtattaaatatgtagtttcgtgatagtttagtcaaaatatatacgatatatacgtaggttttgtgaaatttattccaaaaatatgtatctaattgtttctctattttaaagtaggggaaaaaaatcctaaataaaaccctacggaattgtttattctcctgccttcagccgtctccacttctccacttgattggcagtcgccactgaccaactttccaaaacctcgtcgccggcggccatggcctacctcccgccgcacaagcgccactccaacgcctccacgcccgccccgaccccggcccctcctcctccctccctctcctcctccctccgctcgctctccctctcctcctccccacgcggccgccaccaccgcggcgccaccacccgcccttccagcaagatcgtccacgccgccggctgcgtctcccgctggtccacgctcccgcccttccccgacgacgacggcgacgacgacgggtcgctccgcctcgagcccttcccctgcgaccccatcgagcgcaggaccggcgccaagcccctcgccctcgtctcctcctccgccgccgaagcctcctccccctgctccgcggcggccgccgcatccaccgtcaccgagaggttcttgccggacctcctcgccgcggcttggagggcgaaggcgggcgatgtgcctgaggaggaggaggaggtgaagctgagcgtcgtggccagggtggggaaggtgctcttcgaatcgtcgtgagtctccttaatttctcccatcccatctaccatttctcgttggattcgtggaagaatgattgggtgttgatcacaaagagttgctgctgttattattgattgattttgtgtagcggcggcggatcacccgtctccatgaactcgctccgcgaagccgtgaaagcaggagaagagggctcgaggagcaatcttcataaatcgttctataccaatgtgcctagtgagtgcttggatgatatggagggatccgctgcggagaagatggggctggagtttgattcctccaaagagcactaccatgtgaaggtttgcgcgtctggtagcatgtcaattacgatgttttgggtttatagttgggtgaaattaactttggggcctgtaaatgaattgtaggtctttgacaagcgtcaaagtgattctacaataacgtgcaaatgcaccgtgcaagaagatggaaagcttgctatccataaggtgtgcttaactgcttatcgttctaaccttagcctcttaccttttgtcttattaatgttctgcatcatagattcatatgagtagtttgcacattgtattttaattttggctctacttgtgtagattatttttctgagtatgattgctgaatgcccgaaaatagagtgttgggattgttagcattttgacttgtacccatgagaaataggaacaatgaggcttcatctttgtgagatgtatggcataaatcatagctaccggtctatcatagggatcttgattcgtatgagttttttgataaagtgagaagctggctcatataaacttgtctacttcatttgtggtactagatgaagcctattagctactttgtccttccaggtgttgtgattcccaaaatatatgcctttaatcatttttgaggtcgctagttcttactgattggtcttgtggatgcaacattatagtaaatctactaatgatggattagctcgattagctacaaacttccaatactatagactggaagcctacactatcagtaagcaagataatatactatgtgcctctcaaaattccaatgatttgtcatctagcacttactcatagccttttttttttcctgtagtggaacttctttaggatagtaacttctcacaattgaaccttacattgtcagttcgcagtagcactatgcaactctttcatgctaactataattctgtgatgcaatatgtggttttgtttggttcattgagaataagtgccctgtagatgccaaggagttgctcaagtgggctttgaacgttccaaaaggttggaggcccatttacaatgcatacatgtgagaaggagagtacatattctggagtgtatcagtacagggatacttaggaagtttgtgtacagtgtacttacaatacatctgtatgtgcacttacaaagtatgtacagttgaagaggtttagatttgaatgaggctatctgtacatacacttgaagtatgtatatttgaagggatttctgaaatgttcgtgccataaaatctatctaatcatcaccaactttctgaacttaaatttttattttgaaaagctgaaatataaccagtaactagcaagtcctaattatgggccacattgcacagtaatattcaattttccatgttttgttgaattcgatagcctatggtacacagccaatgccaaacactatactccctccatccttaagagattctggccccttcatttggggacggagggaatattttggttgtcaattgtaagaaatttgtatctattagtagaaaaggtctggtgccttttttccttcattgaaagagtcatcttttgtgtcctttgctaggagtacagtagacctagcatatctttccttggatggttgtatctgagttctaatgtaatccgttcttgattcagccttgaactattaccaggttacattatattttgtttagatgacgattgaattgacagcaatcaaatcaggcctgtgttaatgtgatcatgtcctatgtctattctactgaagaaatttcatgacagtggtttttgtttcttcagtttttatgaactgcaaattttatgttaaaagcatctcatataattaattggtaagtttgttaaatgcaaattttacccgtgtaggataaataaaactttgtgtgcgttgctatatccttaaaatatatattattcaatagaagaacgaactctttggcttaacatgtttgtttacactgtcatacttttccatgcaggttcagttgaaccaggtacgccacttggtggaagatatatcctgtctgttcaaggatctggacctgaggctgatgttgtctaccaaaagaatccttaagaacttagatgtgagttgggttttgtttgaaaattctgatcctttatgttatgagacatttttggcaaagttatttggtttttgcaggctgaagtgaaaaatgcaataaattgcttggtatcttctgctgttattgatcctgatgtcaaaggtggacttagatggcctcttgggaaagaatcgattgatgagaggttcagcatagttggagtgtggcatacaaactacaaagctttcagaaatgagaagttgaggctcaagctaaggcatgctgaccggtttgaccatcgaagctcaactggagaggtttctaatgaagttacctttaaactaattggcatatctgcaagtctggaggtaagtaaaatctgctcgtaagttaatgcgtatgtgctgttcttcagcatttacacttcagtttacattcctaataaggctatgatccaaagtccgcctccgctgtgtactgcatatcaattatcatgttaatatctaagatcccattttaccgacatggggtcaaccagaattggaatatgtggctaataatttctggtcaactgtgcagcaaacggcattatgagttaatgacctttgtaagtcttgttgttttccaggctgttgatcaggaggcgaattctctgcaggagatgctggagtctgtggtaggaatgatctgggagagcggtttgagctacaagaaggcgccctgagcacagttatgccgagtggcgacaagtagacaatgctacaagagcttcttgccgatgttaccgtctgactaccttctaccctggagctaacgggcgttgatctcagcccaccccatcatgtacagtttcagttagcctgtctctactgtagtgtcagtgtgtcattctggttagcaggttaagtagtagtgagtagtctatgggcatggtcgcatggtatggtaggttttccacttacttccttgctccttggcgtcataggttgatcgaaccacctacatgagacgctaaattcaagtgaagttgaaatgactatgcaattatgcattcttctgttaaacgagaatggcatattttataatataactttgagtaaattgcactcaagatacaattgaacctacaaacaaatatctgttaaaaatctctgtgttatgtttagatcaaagaacaaccaaccaaattctaggtggtgcttaaaaaatatgtaaaaactcctacccattccatcgaaaaaaaaaatcctaggtgccagttttagatcagaatacaactcattgttttttactgttgcacaaggcttagattctgctaaaggcaggtcgagtcttatactgaaactgcaacatactcttgttgtaataacttgttgaagcctttttcaaataggggtgtgaatttgtgaaacaagatattcggattaaggctgcgtttagttcctgaaattgggaagaagtttgaggaaagttggtagtttggacagttggtagtttggacaaaaaaaattgggagtttacgtgagtaggaaagttttggatgtgatgtgatgcgacggaaaattgagagtttgggggaagtttggtgcgaaaatatggcctaaattgagtaaataccagtatattggttgatgggggcggcgggagcattaagtatatataaacactggaccgtcattgccgtcgcggcgtcgtcaacaaatgatgagtcatgctgcaagcctgcaaccctcgtcgtcgcatcgccctggcctccagtctatggatcgatcggctttgtacatcctggtccttttttaagattttacaaatacactgtcagcaaaacttatgcagagatggacatgacgctgatcgattgcagccgtagccccgtagcccgtagcgacggaccgcacggcgcgtgcttctcttcgcctcaaacctaccaggtgttcggcgaaatgccggagcgggcttcatgccgctcgctcaccaccacgccggcgaggcggcgaccgtcgggtgttgctcgagctcggccggatcaaccaagccaccgccgacatatggtgaatcttccgtgccggataacttgcgccgccacgccagtctggtacggttgagcttaattcctccttctgcgatactcttgtatgattgggaaataggaatagggtttgggatgttgcgttgttgcaacaaatatacaacgggatgggataatcagacctgcagtgccgtaatgcaatctttaacaccagccacagtcgaattcacagggtggaaaatttacccaactcgactagaatagaaggattctgttgcgaaaagtgtgattctttctttttcatccaaagttaaagaactgtttgtttggtgggtcacgaatgtgtcgatttagtcaatactcctgtcactaatcaagtactattagttgtggtaggagtactagtcaagctcaccacctgtgtggtttagcagcgttatcctctagtttgttagcaggatccacatgcgtttctaagtagatttctccatttctgcccaaaaaggccttcagcttgtgtgccaaagctttctttctttgatctctcaaggactcaaacatggctggtgttgctgcggtttttgcagggaaagctattgcaacatcagtcatcacctatgtcatcaacaaggcattcgactacttgaaggataacaaggaagctggagggctgaagcctactagagagaggctggagaaactcctccctcagatcaaggtggtcttggatgctgtggacatggagcatatcggagaccaaagtgatgcactggatgcgtggttgtggcagctcagagatgctgttgaattggctaaggatgcgcttgatgaactggagtactacaagcttgagagggaggccaaaaaaatacaagcgggtagcaaggtgagtggctctctgcatcagtataagggcaagattgttcagcgttttaatcacacatttaacactgggtcactgaagaggttgaaaaatgctgtcaaggctttagctgatgttgcctctggtgttgagcgatttatccaagttctgaatcagtttggcaataaggttaactttaaacaagaggtggaattcaagaatttgcgtgagacaagctcattgcctcatagcctagtacttggaagagaagaggagagcaatattgtagttcagtggctgaccaagcgtgaaaacagtgcatctgaacagattgttggcaacatccccatattttgtatagttggtttagggggtattgggaagacaacactagctcaagttatatgcaacgataacaaggtaaaagattattttgatttgttcgtctgggtttgtgtttctcacattttcgatgttgaaacactaacgagaaagatcctccaaggtgtgactagaacagaaataggtatgattggcctagatgctctccacaaggcacttcaggagaaactgagttccagaacctttctcttggtactggatgatgtgtggaatgatgagagtctgcgtggttgggagactttagtaagtccattaagatatgggaagaccggaagcaagatcttgctgacaactcgaatggaatcagtagctaatcttgctgcaagagcgatgcaaggagaatgccagtctttatcattgagtgggctaaaagaaactgaacttcttcttctgttagaaagacatgccttttttggagttaatcctgatgattatagaaacttgcaacacatcagcaagaaaatggtaagcaaactcagtggttctccattggcagcaaaggttctaggtggattgttgaacaacaaaagggatagtaacacttggaacagaatattggcatcaagtgttcataatatacaacagggcaaggaagggattatgacagtgttaaagttgagctatcagcatttaccaacccatttgcagtcatgtttcaggtattgcagcttatttcataaagactatgaattcacaaagaaagaattagtgtatttatggatgggctcaggactaatccaacaatcggtagatggcatgacaccagaggatgttggaatgggatatttagatgcactaaccagaaagtctttttttgagattaaatcaagacctcggtctagtcgtgatataaaatgtcgtttatttgaagaatattacgaggaacggtttgttgtgcatgatcttttgcatgaattggcacggtcagcttcagtgaacgaatgtgccagagttagtataagttctgaaaagattccaaatactattcgccatttatgccttgatgtgataagtctcactgttgttgaacagatctcccagtcaaagaaattacgcacacttatcatgcattttcaagagcaagatcaggcagaacaagaacacatgctcaaaaaagtgttggctgtcacaaaaagcttgagggtattatccctaaccgcaaattatccctttaagctgcctgatgcagtgggtgatctagtgcaccttcgctatttgtctctctctctcatgtggggcgaaggaaacacgacacattcctgttggttcccacaagttgtatacaatctatatcacttgcaaacaatgaagttcaataatccgagacccgcagtccctatggaaggacaaatggaaggaatgtgcaagctggttaatctgcgccatttgcatctaactcttgtaataaggcccatgattccttttataggaaagctgacttctcttcatgagctatatggtttcagcatccaacaaaaggttggttacactattgtcgaactgaagaatctgagagacattcatcatttacatgtttcaggtcttgagaatgtttgcaacatagaagaggctgctgaaatcatgttggaccagaaagagcatctatctgcagtaacattagtttgggctccaggatcatctgactcatgtgatccaagcaaagctgatgcaattctcgataagcttcaaccacactccaacacttttaaattgcaacttgaaggatatcctggttctcgacctccattttggctgcaagatctcatactcattaacttgacatacatctatctacgtgattgtcaaagcatgcagtgccttccatatcttgggcatttaccttctcttcaatttctg

SEQ ID NO: 9648 - DNA, 6757 bp, Oryza sativa
cataaaatcccccgaaatcaacccgaaacttactcccacaagagtcggcggttttctcttgtaattggatccgaccaatgtatgcactagcgttgggacgtatccaaggtgtattgagaggcgtatcgtcgagtatcctgaattaatttttttttcaaaaatccagaaaaatacggatacatataggatacgtatcggagcatatctgatacgtattcgtatccgctcacgtatttgacacggatttgcaccttccatgacatatccaggtaacgtaggtgatcgaagaagagcattaccaacaccccaacggcttgtggcaaggggatgaaatagaggtaactggactgctcatttctgtattctacgtacagatttttcatgtgatctggaccacaatttggtcagattttgaaaatttcgatcaaatcagacattggtgttttcctttttataaaaaaaaatccaaaagaatttcttgggtctactatcactgccttgtgcacgcccttaattaagctccagcggcgctcatactcatttggatatgttttcacaaatccatgcatattttaaagctaaataaaatagatctgggtgccatgacgaagtgttgtgattcacgtttgtggaatcttggtagatcttggtgccatgacgaatgagtgattaagcatatatgccgtgtgaatcgaaatgacgaaccgaaaaaagtaaaagaaaatgtggatagatagaccacgcacccagcttcctatcgagaaaatttgagatacggacaaggagttgtcgtcgtagcaaggtcaatcacaaacaactagtcagtccagcaactcagggcttcaatcaatcgttactatctccccgggaagataatacttgtacttttagacaaggatcaggttaaactttaaaatctttgattataaattatttttaaaatatttatttttcaaatatgattactacatgtataaattagtgttaacacttttatacatattataatagaaaataatggtcaaagttattttttagaccgtgcttttatctaaaacgacaagtattatcaacccggcgagagtatatatgtggaatcgattggcaaatgcaaatctgcagggatcaggttctggtggagtctttagtgtgactactacaatttaaacagtcacgttgagactactgacacagtcacattgagactactgaaacgattgagatcgtttaagcactgttcatgaaaaaaaaaaacaccaggcatctactatgggagatggcgctatgccgctataacacttaatctacacctaggaaaatgaatggatgagatcacatgcagtgattaacttacggtcttgtgattgcattcgatctcaatccaatctgcagctaccagtacatcctactacgcaagtttcaaaatgattgaaaaacgagaggagtcacaggtaggtgtgttttaagaggaggaaaagagaaatgtagagaaggtactgaaaacaatatgatttattagcacatgattaattaactgttaattattttaaatttaaaataattaatatggttttaaagtaactcttttatatatatatatatatatatatatatatatatatttaaaaaaatactatttaatcgttaaaaaatgtacacgcaaaaaccgaggatcttttcactactacataacaccacatcaatgccagttgggaaccccacacaggaaccggcacaaaagaggcggcactgatgtgaatactcaaagatgccggtttaggtcccaagaatccaaaaaaaaaaaagggctcaatgcatcggctcgaacattgagtcgttccccttcaccccgagacccgtcaccccgagagatccaaagcaaatcacagatccctcaacaatttcatagaaacaatcaccgttgccgccacgtcgccggatccgtcgcgggagccaccgccgccactgctccgcccgccgatgccgatcccagatgcggctccgcccgccgttgccaccccagccacctcggctcgatttgggtgtcggttttttaattaaccgacacctataacatattataggtgctgatttttttaaaaaaccgacacaatatataataggtgtcggtttttattataattgcttaaaggtgtcagtttttttgcgatttcaacccgcggaggtaggaaaatgcctatatgccggttttaacactatcgacacctatagtggcgacacctatttaatgttttgtagtagtgtttcttgtctatcgacagtctcaaacaagtggtgaagaaaatgttacagaagtggcagggtgattataccggtcaaggtttaaatcacgtacacccaacatcctaattatttttatattttaacacagtattcaaaatgttactttgagcaaatttcacaaaacttcatatattttaaccaaactattgcaaaactatagatttaaagtgatacatcacaaaattacatatacaaatgtatgggagagtatcgtaaaattacagatctagtaacaaagcaattacaaaactacatgtttattatcaactaaatcacaaaacttaaatgtttataactcaaacataatattaatattagtgctaaggatttaaacatactagtacgaagatagatagatagtacgtataagagtatagtgtacattatgctgcatgtttcatgcaattgaaagaagagatgattgggaaacaccattaatagggtggtaaaattatgagtccacgactccacctactattaggaaacaacttatcaggtttaaatcttggcgtctataaatattatgcacgtgcgagtgcgttttcaatggaaatttagtgaagtcaaaaatttatcgctggtcttcgtctcgttaagagcattgtgtgtgtctgattgcggtgtgcgtgtgtctcccgtgcggtgttggcgcgcccccgtcccccctatccttttgggacctttgaccgtttcccgagtttcaacgtggcatccggtctacccatggtcccgcccgcctggtctccctcgcggtccttgtttcctcggcccgcccaagcacccgtcggccgtcgctgccttctcggccttccccgtggcgtgggcggccgccgcccttggccccacacatctcccaccaaaccacccaccccaacgccacctacaatctagctcctcgctccgatcgaccatccatggggaccatcaccgccgccaaagcagccgcggcggcggccgtcttccagtctccgtgctcccctgcgcctgcggccagcttccccgcccgcagcgtccggccggatcgccgccgcgccgtctcgctctcagtctcaggtaatgaccgtttgatttaacgccttattattattgatgatgaaagcagagaccatatgacccacttgtcgtcgtggcatcaacatgatgggataatggcaaactgtgactcactcaagcagtgctatgactatgtctatgttggcaattctctgaaaatgtaggtgtgttcgtgataattctattaagtttttgtgttgtggaaaacgcaccgattatacggccgttaatacgttgacagtgattagtccgtcacgtttttgcaaaacggtcttcactaatcgtttcacaacgaaaaaaatctcgtcattgccgattaatcttcccgtttgtgtctaatcggccgcataattggcctgatcaaaaggctgaaccaacccacaacgactaccctatcccatttgttgttttctctagtaggagtataaagctagctataccagtacgtgaattcctctagagtatctgatgccgctgcaacctggtctaggatgtgcacgcctaaagtttctctctgaagaacataagataatccatgcaaaatatttttccaatgcactaatactagacagatttctatatctgtataatagctctcatggttttcaccttttcctaattgtagcatattatatatgtagtgaatttccaatatatgagtctacaatatgcataacaatatttacatattcacaaccgttaaatttccgtcaaattccgattaatcgtccgtattccgattaatcgtttggcggtacccactctgtccaacatccgcattccgtcttccacaacactagttttgattatgttttcttgtaaggtttttttctatgaaattttctaggtttctcttgtgatgaaacttatattttgtatcattggtgatcattaccattaaaaagatgtgaacattagagaatgacctaatatcaaataattagtaattagaaggggtgaggcttcgaacccaggtcgtttagcccaccaccttgtggagctagccgaaagacccccgggtgtttctcaatgatcattaccattcaacatcatggttcaaaattttcgaatttggattttcccacgcccaacagggattacttttggttgaaaaattttagtcgcttgaatttagcgggaatttgttcaaagtcagcaaaaatctgttcgaattttaaaatacagcactgaagtattttgccgagtcaaacactgtccaaatgcccacatgttcatgatacgacattatttttagttttaccttttgttctttttatcttttaccaacttcgacaacttcctttttgcttgtcaatactagttattcactcttacgaatatgaaggaaaagttgaatggtttgacatgccacaaatttgcttttaaatgtttaaccaatcgtaacttcctatttctcgtagaacttggctacattgcagttagcttaatttaatttcgtttaggttcggttggtgcttaaagtggagttgcgtgggaaatgtgaactggtaatggtagttcacatatactatatatatctgttattagacagcataaacttatcttgttgttttgtattttggaatatgtaatgcttaagatttatatttatactgtttcagttaatcttcttttgcgaaccaaaaaaaaaaagtgttactcacctaaactatgccgtttgcaggtgtaagaactcatgttgcagctgttgaacaagcagtggtacaagatgctattgcacagtcagaggctccagttgttgttgttacaggtgcttccaggggaattgggaaagccattgcattggcttttggaaaagccggctgcaaggttaacacttagtaattgatttatgcttatacatctatagaaattttatcaaaagggctgatgcttatctgagccactgcaactggcttatctgagttacagcaggctggaaacttaaatggttaatttatatattcaataggatcataggagtatcccaaatgactgttattgacaatctgaatagatgaattgatgaaaactttagttgcatgctaccctgtgaaagaaatttaccttttatttaccttcaagtttcatgattgtgaatcatgtaggtgcatctagaacaatacaaagaggattgtatctggaaaattgggttcaaatatttatctgttgcctagttgttatgctgaactagaataatttccctgagtataacacaagttttacaatcaaaggggaaaaaaaaactctacttacctttcaggtcttagtgaattatgctcggtcttcaacagatgctgaagaagtctgcaaagaggtaaagctttgtgttgactagttactttgttcatattttttttaaagcagcataacgtagatgatttgtaatacgagaataccccgaagcattaatttaaactaaaactgcgttatgttcttatctaaagtaaagagtaaatttcacaaaaccataaataatcaaaggaaaatacaattgaatgttgtttccggggtgcatgtgttttgaaaattttgttctgttgttctgccttaaatagatggaagaagatactgaggtttccgtattttacagattgaaggatttggtggtcaggcaattaccttccgaggagatgtttctaatgaagccgatgtggattctatgattaaagcagtaagcatagtccattcgtgatactctgtgatactggttttctctcttcaaatttctgaccacgattaatcatccaggctgttgatacatggggtacaattgatgtacttgtaaacaatgcaggtactcctagtggaatattatatcttttttttacacaaaaaaaacaatttattttacttttaagttttaaccctgaccattctgatattcaggaatcacacgggatacattgttgctgagaatgaagaaatctcagtggcaagatgtagttgatcttaatcttacgggcgtattcctttgcacacaggtactaatcacacattttctcatattttgtacttaaaatgctttatgcatcatactgcaaatgttttttttgcaggctgcgacaaaagtaatgatgaagaagaaaaaggtactccatatagttcatttctttaccagattgatatttgattgttttttaatatttttatattttttttcacgctgttctgtactgaacttcaatacggcaaatttgcaatatagggaagagttatcaacatagcatcagttgttggccttactggcaatcttggccaagttaattatgctgctgccaaggctgcagttattgggttaacaaaaacaactgctagggaatttgcaagcagaaatattacagtgagcacattttctttcattttattgtttcaaatcattcatctggtaatcaaattg

SEQ ID NO: 9649 - DNA, 16878 bp, Oryza sativa
gggggccttaggattgtattcatatagctcaatttcataggaaaataagcaagaggttcaggccccatttgaattgtaggataaatagaggaaaaacaaaggaattgaaatcctacactatttatacctttgatttgtaggaatgagaaaaggaaaaacgtaggaaactttccttttcctacgattctagaggaaaaacgtaggaaatttaacatccactccaacttcttggaaaacttcccttgagtctatctctctcatctgaatcctgcgtttttcatgtggtccaatcaaacggtcattcctgtgtttttcctgtgttttgcaatcctctgttttatacttacattcttatcagaatcctatatttttcctattcctccgttttttcaatcctacgattcgaaggggccctctacctcttggaaactatcctttgctttatttgtttcctatggtgctattaaagggaccctcttcatattccatgtgttttccattcctgtaggattaggagaacatgccatttcaattcctacgtttttcctattcctgcgtttttcctatcctgtgtttcaaaggagcctttagaggatttcctttctataggaatttttcctatatagcccttcgatcagggcccctttgatttataggaaaaatgtaggaattttggaggatttcaatcctatggaaaaaaaaaatcctatgaaggcatttgaaacaaaggattgaatcctatcgaatcctttaaaattcctatggaatgggtaatcctatgcatattttggaggaaagttagcaagagatctaacctcttggaacatttcctctgagtctctctctctctctctctctcatctgattcctgcgtttttcctgtgatccaatcaaacggccattcctgtgtttttcctgcgttttgcaatcctctgttttgcaattgtattcctgtcagaatcctgtgtttttcctattcctctgttttttcattcctacgattcaatggggccctgaatcaaaggaatggatcttatggaatcctatgaaattcctatgaattgcctaatgccatgcaagttttggaggaattctaacatgaggtaaaacctcttggaaactttcctttgagtctttatctctcctctaattcctgcgtttttcctgcggtccaatcaaacgaccattcctgtgtttttcctatgttttgcaatagtctgttttatacttacattcctatcaaaatcctgcgtttttcctattcctatattttctcattcctgcgattcaaaggggccctcaaaagtggagctatctttcttccatcttctcccaccacatgcaaacgtcactgcacgcaaatatctccatatgctccgcgtgaataaccaccggatccaatattgtatttttctattagtcttctattctaattataaacctgatacattacaaagtacgtatgttactagtcttacgaaaataagctaaggtttacgaaaacaaaaccaaattagtaagtaaatggacacgtctataacatacactatttctcctgacagttcaaattgactcagctttccgacaatatcgatttgtcaaaaatatcctacacctacatgcactccccaaaatggcattgccctatagcagccaaacgatcgaggtcctcaaaagcaatatacgcaaatttatgtcatccaattaagattataagagtatagcgcaactacacaagcagcaagtcaaacaaactacaactatatcactataagttgttaaatttatgtccatcatttattttaagttgttaagctggtcattcggcctccacacctctagtgaagtggatctacaaggcggtcttcttcctaggaatcggtggcggatcttcgggggaagttttgttttatttctttgtccttgggtgctctaacctccactacagatgccccattttgggtatgctccttagctatatctttgcagcttgccatggccggtttcatcatctccattgccgtcgactttggtcggatcgccgtctttgtggaagaagcaaggaaaggacccgattgtttttttctactctttagaagtccttttctgcaaatttcaatgtatttgtcaatttgccccagtctgaggggcctttctgtaaactggttgtactcccagttctctattaataaatgtatacgaggctttaaaaaaaacatttgacaccgccggagaaagtcaaccctctagaaggccatgtaggcagcaggcagcttagccactgtcaacacttaattaattactcctcctcctagatgcacgtctacctgcaaaatcttgtgcctttttcaacaagcaaactgtacgtatctttgaacccatgtggcccgagagatgcagcggatcgaaggactcacctgtgaattttgtgaatatgcatgtgtgacgcagtgatgttgcggcgttctagaaggcgagcggtatcttaattgatgtcatctctttttttttctcctaaatggaaaacaacttggtacttcttctagaagcggcaactaatgatggagactcccaggaccttgggacgaaagttgcagtaacgtgtccaaagttatactaggtatttccctccggtacaagattccgtaaaaaaaaatcgacaatcaataatttgttaaatgattagtttaagaacaaaaaatatacatttgttttgagaaacactaataaatatcatataaacacattagattttacaggcttgtttataatataaaaataaatctttagaatcttatctggagcgtcaaatattcatgattagagattttttttttcaactacagcttatataagccaaagacatattactgatataaaaaaaagtcacgataagacttttatgcatttattactatcatcagtctaaaaggcacgagtatgacggaaacggaaaaaaaaaggtctaatttgtctaatattaagctccaaaattcaaaactagctagccctaaacaagtagtagttccaaatgtattgtgtaacaatccttcttcccaagtagcaatagaaaaaaaaactgttgtgagaaatccataaacaagagagttccataaacaggagagttccaggtgtgaaatcccatgactactcatatcaaaattcagaggcaaggtgtctaatctctttctcattttcaaagacgtagggatctccatctttgctgagctactgtctcattctccgtaagtgcttctcctacaaactgctaaacggtactccctccgtcccacaataagtaattttaattttttgtttgcaacgtttgaccactcgtcttatttaattttttttgcaaatataaaaaacgaaaagttatacttaaaagtactgtagataataaagtaagtcacatataaaataaataataatttcaaaaaaatttaaataagacgagtggtcaaacgttgcaagcaaaatcttaaaatcccttatattttaggacggagggagtattattttgcgcaaaatattttatatagaagtttattaaaaaataaaaatttcaaatttgtacttcatagttaatacttattttttttaaattaatacttaattaatcaagtgctaattgcatgcttcgcttttcataccacttattagagtaaacctttcgcacttacaaatgcagctttaggcggagttcgattggacggttgaactaatgccacatgaaacaaggtaagccattaaaacataattaattaagtagtaattactaaaaacttggaaaaataaacttatttgatttattaaagaaacttccatataaaaatatttgcataacatactgttggcggtttacgaaacgtgttcacgaaaagtgagcagcatgtccaactgaagtccgtctcagataaggtatctgtccttcccctcccccctcgcagtcgcgggccccgttcgctctctctttttgtaaagactcggtactagcagtgttcacacaactgaccaactgaccgatacgatcgagaaagtgagaagtcctgggacatttgcatgtaccggtgcaatttccagaaggaaaagaagttaattaagcttaattagctaattagctaggagtacaaatgctgtgctccaagacgaccttcccaagcaattaagccttggttaccttggtcagcaagaacacacatcttatcgatccaccagggcattcaaacccgtcggctatcgatccattccttcttgcagctgcagatgatgtgtgcccgtgcgtgttttgcattctgcctacctcgtggaaacttcgaatgatctcacgcgcatgctgccaaaaaaaaaaggaaagaaaaaaaaataaagacatcgtgactgattagaagttggtttaatttaactaactgagaagacgacggacacaagtcatactcatattatcagagctagcgtatatatacgttgacaggtgtcacaggtcactgattcgtggaaacatctcacttattgatgtcttcgtatgcatgagaattcagttaattgatcttgcccaataattcatgggttcatcgctgccaattaattaaagctactcttcgtccatctcaaaatgtggtagtactaatttctaaacgaatatgaatatagctaaaaaaaagttaatgattatattttgagatgaaggatgtattagattttccttcatattagttacgcgaaatctggaaactctcaatcatatcttgcttgtggggataatctgggtgatgatcgaatataaatataatatagcaagaagatgaagatgcatgcatgcgactcaagcctttttttttctgaatgaattagttggtcataaattatatgattatgtgataatatttttaagtgtataaacgaataaattctattaaaaactttaaattttgttctataaggtattttgagaaactttttatatagaaagttactaagtttttaaaaaatgtggtactgtttaaaatgttagaaagtgtgctcataataatgtgtactaggtgattcccggcccataatttgctgcaggaattattaagtaatttttaatattttttaataaatgagctgagagtaaaaaaatattagttattaaaaaccaatcaaactggttagccaaactatgtttgtagagaaatggatttcatagattttatggatgaaatataatattctacgttttgattatatagatgattgtattataaaaaaagatggatatgtatcttgaaaatgttgtgaaaataatgtgaagagtgatgattagatatgcttacatattgatttgtcgaattcaataaatggtagatgatgctgcatgcttacgtaaactttgtatgtaattgttactagtggatgatgaggtggtatatttacatattaagtttagacctagtgggtgggttgtaaatatatttttatttttatagattccgtgataggtaaagaacgggcatatttccaagctttaagcgacgggttcagtgtaaagataacataatcacgatgatttaattacttaaatggccacctttatgggatattttgtgaatcgtagaacgatcaccttttccgtgacgaagtagtactgtgggttaggcataaaggacagtacttgtactacgtttttaattatatcacaatctagcttaggctgctaatctcaattaaactcattttctaaagagggccaaattaaggtgcagactgttatgattttgttgattttagatatgcttttgatccacgcacgtgatttatcatcgatttcacaggtcacgggcgtagctcacgtgcaaacggataggcggaaaactatacaaactcaacgttcaatcgaatgttcggccggttaatttggctctcaattggtaagcctcgcgtgaccgttgatcacacaaaaggaaacaaaactatatttactccctccgtcacgaatttgtgttttccagtatccaacatttgatcgtttattattttcttttatatataattagtatttttttcttatataaatagttttttatgtgtgacttattttttaaactttttcataaatttttcaaataaaacagacggttaaacgttggaaaacccaactttttaaaattcatagaagctggcaaccaaccagctgcttctcagaattttaaactccttaaacagtcccatagacacatgagaacccacgtttcattaacatgtagtggtaaatagttaaatatcaaatataaaagtgtggtaaatagttaaatgccctaatttttttttccacaggaaattttgtgcgtgtacgcagtggtacgcgtccgcaggaagtacatgccccgatccgcaagaattaccagctggcgagctatatactactcctaggagtgacgtacgtgcattgcttgaaaattgttttgaaaaataagctccatctagattgatctctaatgatcttgtcccctaagttaagcgttgacttgccatcaggctaaaattattgaccgatctctctcgtcatatagtaagataataagatatcgatgtacccaagctaggtggcaggtaattaaatactaggagtatctctaatggtttggttaattaaccttagccaaaaggcccaaaaccgttagaaagatttttgcatgcgtgagttgatgcgtgtcctagcatggacacaattagttaactacactaatgtactgccgtcactgatgactgtattaccataccggcacagggtttagttcatctgtgggaccagtagcacgtggttttcgtggacttgtcgatcgtagtactactgtgcagtttgtgctttgcttggttggctaatttcggttgcaaggggaaggttccccccccccccccctttttttaatatctggtcaattaagtaatcaggtctagagcttgaccaatatctactgaatgatcaggtatctgagaaaatattattcaaaggcttgagaaagatcgaggtatctgagaataacagtattcaaatagatgaaaatgatgcagaagaacgtgcatcatgttgtgcttgcatcaaatgattcctttgtaacaagaaaatcgacagcatatatggggttaacgaccgaattcatggttcgtaagaataccatcaattttatcggaaaaaaaaagaataccatctgtatgtggtaatgccgtaacggtaacatccagcttcccacgcccacgttagtagtatggagtatatcaaaacttataatcctataaaagaacaaattaattagggaaaataaagcaagtaaccctgctttgtcattattttccctgaaatatgcgatgccgaatcaaaatatttaaacagaggcgtggaggaggaagagagatgggagttcatttcgaaggttagtgcgccctcgaagcaaattcgtgcctggttcgaaatgacgaaagtgacaagtctggccgtaattcgttggcagcaagctatataggagtatgaattattcaccggtgaaaagagcttaatgaacttttcgtttcaagatcgaagtagccagaagtctccggaaattaatgtcaaaatttattccatggactatagtctgttgatttcaacacgcgatttcagcggaaaaatatacgcagtccaccttgaaactttgttcaaagataattaattactccctccgtactcgtaaagaaagtcatttaggacaatgtttaagtcaaaccttgagaatataaatcataaataactcttaagttgttgagtttgaaaatataaaaaatatatgaatagatttatcttgaaaaatactttcatatttcaataaatatttttatagaaacaagaagtcaaaattgtgttttggagaccgtgtcactgtacgaaacgactttctttatgagtagggagagagtaattaagagcggctaatcctgcataacagctagatagagtacgtattaaaatactgacagtttcaatcgatacaatatttcgatcagtccagttagctatacctgtttgggtctgtcctaaaataaatgcagtcgtcgaaatccgtgttcaacgtttgatcgtccgtcttattttttaaaaaaaatagtcacacataaagtactattcatgttttatcatctaataacaataaaaataataatcataaaaaaatttcaaataagacgaacggtcaaacgttgaagatgaatagtgtaaaactgcacttattttgagacggagttagtatatccgaaaatgcatgtactcgcagaggcagagctagatccaccggaacttatttgttagtaaaatttttacaatatttgccctaaacatattgcaattttttttagactagttacatacctgcacttctttggttccaaaataaataaacaaacccagtatattatcattttagattcgtttattttaaaatggataaaatacgttgtaatagatcaaacccacttattagggagggatgatagttattttttcgcaaggaacacgctacatttgttaagaggaggatgataagatgatgactctgcttttaaaattgtagacaagacatcgagataaggccggcccatgcaaccctgcttgtccctgtgcattattaggctgtgtttgctggaatgggttggcaaccatctcctgcgcacgcgctattttttcaaaaaaaaaagcatcgatatgattttttaagcaactttcgtataggatttttttttaaaaaaaacgcatcgtttaacagtttggaacgaggcggagggtgttgggaaatagaattagagcaggtacaataacaagctattagtcagctataagtatattttaataagataaacgatgagagagaagagtagagggctacagatctgtagccagctgcggcacagactccaagacgtaatgtatgtatgacatgtgagaccatatattaatagtatagtaagtaactattgtatgaattggctattagattggttatagatgaattagagctagtagtgaggtatactattaaacttgctcttagcgtgtgtttggcagcccaggttcccatcactaactttacgcacagagaacggagcgatccattagcatgtgattaattaagtattagctatttttttaaaaaaatggattaatttgatttttttaaacaactttcatatagaaacttttttaaaaaacacatcatttaatagtttgaaaagcgtgcgcgcggaaaacgagtgagaagggttgagaaagttgggggcgaacacaccctaaagtattgtactaagttgcctggatggctggaaggcagagctaaaatgtcttactgctaatccgtaactactaacatatactactagtatatttaacgataaaaaaaacacgtgttcaatgttcgcggcgaggaacggaatcagtcggtcgcagccgggcctctgctaaaaacagcatggagtacgtacacaaataaacgcgacgtcagcagtcaaccgggctgatcaattcatcgttccgatcgacaaacgaggaacaatcagacggacgaaccaacccgtcgagctagcgctccggcaacagtggcgcccgctgcttttttttttctttttttctttttgacaacagacgccagctgctgggatgatcgatgatgcccaaaacgtcgcggtcgatcgatcggtggcgagcaaaagcccagcgattgatcgtccaaattaatcggcggcgcgggttcgtgtgcgcgcgtgacgaattggcgatggcgcagccgtgcttgcgtgcgtgcgtgcatgaaaacgtgcggcgttgtgctcgtgcaggcaggccgatcatatctctgtctcgtagggatagggatgcaagcaggaagcaggacggataaacgggatttttttttacccgtttatctcactttcagtgtattttttcttttaaaatttatactaatataaatgataaactagcaaatgggttattacgtggattgtgggagttggctacttgcatccctacctggggggatggtataccaggtgcaattttgactgatcgtgtggacgtatacgtgcggaactatgtgggtgtgatgcacctgatcgacgatgcagattgcagaaggctacgttttgttgaccgatcccatcagctgcatgccacctgtgcacttttgttaattcctgtttttttttcctgtgtaaatattccgtccgctgtgttctttctcgctcgatatcgtatcggtcagtggagtttttttcgcagacaggtgagattgatcgatagatactagaaagacaaacatgcatgccagagaagcctagcgaacacaatatttgaccggtgtaaagcttattcctcgtttctccggtaaagctgttggtgttttgtctcgggctcacgacgaagagggacttacgtgtggggttacgcgctgacttgcagggaaagcgtaaaggcgtatgcatgcatgcatccagctcggtctactagctaggaaaagggttaaaggggtacgatcgattcatttccatgtagtattgtcatttgtcaaccagtacttcctccgtatatcccattttaaacgtagcggtaggtatttatgttcaacgtttggttgtcatcttatttaaaactttttataaaaaaataagccagacataaaatactatttatattttatcatctaatagaaaaaaaatattaatcatagaaatttttaaatgaaatggatggtaaaatgttggacacagaaatctacaactatactttaaaatggaacataggggtactatctttcagtaagttctaaaaaaaagtactatcttctgtagatcctggctagttaacatgttcggtagagagtttttcggtagcacgttttctaaactactactctctatgtttcacaatgtaagtcattctagcatttctcatatttatattgatgttaatgaatctggatatatatatatatatatatatatatatatatatatatatatatatatatatatatatatatatatatatcattaacatcaatatgaatgtgagaaatgctagattgacttatattgtgaaacataggaagtaaacaatatatacatttttttaaaaaaacttatataaaagtttggttttaaaaaattaacttaatttttaagtttgtaataattaatactcaattaattatgtactaataacttgtctcattttatatgcaacgaaaaatcccacttcaaactcacaaccgaacttagcctaagacatggtcatcgaatttctagctatgccttggaagttggaaaaatgcagcgagaaaaaaggtttagggtctctcaggttcataggttttctaaattacatgaataggaaatacacgagaataatatatgaatacacgtgcaaaacaaagaattgtaatatgaatcttttcttcgatgagctgaataaaagaggatggagtggatgtttttattcctatggaatgaatacattttgaaggatttatggaggattgacatagtgtttctatgtaaaatttcctttaaatcctatggaccgaatgcataaatagtgtttattccaaaggaattgagaatacctttaggaatccttcaaacataataaagcacacttgatatatgggacctacccacatgggcgtatatgtcataagcacacttgcctttaatgtacattctagagtgacatgtcacaaattgagtaagcaaaacaagacattagcaaaaaattttaaaatttcaacaaagtttagaaaaatgtgtcaataaaccaagaaaatgtctaaaaagcctgcttcattcgcacattcgatctcgcggggaatcttgtttaaaatgcaagattgtatatcaaattattacttcataaatatgatttgaatcatctcaaagagaaaaaaaacacatgcttttcatgcatgcatggtacgtaaaggtcatagtcggatactatttgtacttacacgtatatttaatagaagcatgtacattgtgctctgtattatactatgatatcctttgatacagtgatacacatgccctgttgagttttagcaaggtaattaacttgaccacatgaaacaactctccaatttataatttattaaaactatccaagaatctaagataaggttggacaatattaattctttacattttggacaagattaagttcaaacttttataattttgaatggcaataactttaaaaatgttttgattaaaggcagtactagaactttatcttataaaatactatagtaaaagtaaaaatatatttacttattgcacatattataatagaaaaacatgattaaaatatatcttggagataatgttattgtccaaaacattaagaaatatgaaaccggagaaaatgtatattaactaaatcaaatagataataaaaaatcaaccagtgtttgatctttattttggcaaacaaaacttaatcactgcaaaccgccatagatctctctatttgaacgtggaccaaataaacaactcaaggaaatggtcacaggagaacaaaacagtgaagtactcttacgtatgacacggaagcttccgatgatgccatgagaacacgtgaaaccgaatctccatggacaagacagcatggtggcatgccaaggctcaacgctcgctgtgccgttccaactcgatcgagtacgtaattagccacgcctaatcagttacttaggcgatgtacgtcaacccctcacgtgccgaccctctagaaggcctggcagaatcagagcggtaaacctatattattacaccttcgtcccccaaaaaaattatttataaatttttatgttcaatatttaattatttaaaaaaattatataaatcttaaaaaataagtaacatatagagtattatttaataacaattaaaatattaatcataagaaattttaaataaaacaaacagctaaatattggataaataatccacacaaataaatttttttttggaggatgttgtaaatgggggcttgactagtttggtccgacacgactagtaaaagcaaagcggccagccacgtctctcttctgcgtctcccaggtgttgtgtgtactacttctacgatcacgagcagcaagcaaagacaaggcgaggcgtgtgaaaagtgcttcaacgtgccagttttgatgtgacaaaaggggtttggctgctggttaattaataggaccagactgccatttgtcccctgagtaaggccgaatatattgggtgttttggttgtgtttgtgtaaatccgggcactacaatttgtcaatttccctgttatattacggaagcctgtctgtgtctgtgccgtccgctccacttcacacaactcatagatagtataagggccattttggattgatgccaaaatgtgccatgccaatttttttagtttgaatagtaaatatgatggtttagtttgaagccaaatgaatggtaatgcccatacttaatttggtataattctagaactttcttcaccataatataaaatttggcttccaattggtattaatctaaacacattacttagaattctaccctaccaaattattggtagtttcaaaacatgcctaggttttgtcactaccaatgttttggtatggccctaaaccaaacaagccctaagttcaaaaaaatatctaacctaaaatcaggatgagacataatttagtaagatgattatgtcccatactaattctatgttggaatttttggaacaaaggaggacaaacattccaataactcttcctttttaggatgactctgtaccgtgggaccgtgggagtgttgcattatcttgggaccgtggggggaaatttgcaccgatttttcgtttttagacattctttcgaggaatatccaattttgaggtttagaaccctagcaccttaaaagattttgagagttaagaaaaaaaaagattcaacacagaacatcaaaatgaggatccaatggattataactttatttatagtaagatatggtttctattttattaactattgcaaacatctcactatttgatgtgaacacttactacaaggattatttacttcttacataactatgttcacaaattgtgaggatatatatgccattctgatgtttggaagttctaaatttaaattagaattttgtggcgtttgaaattgtgaacttgaatatggatggaccgtatgcattagaaatatttatgctttagttattatgatgatgtcaaattagatgtaaatataaattatgtggtggaatagaagagaaaaggaaatagggggtaagaaatgaggattttagagttggaggaaatcttggttatcagaaaatggggacaaggacaaccctatttgacttttgggtgttctaaaataatggctattgctcaaaatgctctagggtacaacaaatggcctcatcttttttattatactgatgtttatcagccaaaatttgaatttttagccttaaatttgaagctgaattttgagttttttttcatcgaagtttacttttcagcctttacttttagattgctaagaacacgtatataaaaattttatttataaattacttttcgtttgcagatacgccgttgcgctaaaacgatggcttcaaaaataacttttttggccgtactattttccgtgagatactcggatgacgtgatgtacttgagtaaaacaaagatactaatccatcatctttttcagaaactctgtgtagtgtcacttttgtcaaatccgaaaaatgcattagcaagataaaagccatatatatatatatatatatacaatactctatacaagtactacctccgtctcataataagtacaactgtgaatatccatgcccaacgtttgaccgtccgttttatttgaaaaatttgtgaaaaaattaaaaatatttagtcacacataaaatactattcatattttatcatctaatagtaataaaaatactaatcataaaaaaaattcaaataagacgaacggttaaacgttgaatatgaatagggtaaaactgaacttattttaggagaagagaagtactataagggcaagttttataatagaggaggtggtcacatataattttatctaaatcatctacacattaatttagaggtaataaatacaatagattgcatctatttacactacacccaatatatttgctaccaatccacttctctctttctcttccatttcttgaaacttgtatggaggttaccccttgcatgaggggtggctgctcttctctctcttctctcctccacatcatcatttgagtctatatggcatcttggaattagtgataagatgattatagtacttgccctaagaaaaaggaaagaaaaagtatgtgctttcagactataccgcagaaggaggacccacctgtcagcccaaacagcagcacaggacaggagtaccaaccccaatcccagggatacgatgacagacacgccgctggccgcttgacctcgcccttctagaaaccccacacatgcttggtagccacggctgcatgcacaaacacacacatgttgcccgtgtacggtgctcgattcgtacttgtaccgaaccgagcaccagcaggctagtcttccacacatcccgcctccgcgcctcgctactctgacccgcgtcccccacctcctgcactcgcacaaacagaccacagcaacacagcgcgccgcctccccacccaccccaagttcccaacggtttcccaccccctacaaaaacccccacagccccactcgggaccaaacacaccacaccccgcgccgcgccgcgccttcacttgcaaaagcccggaagaaatcccggtgccgcgccgcgcagcgcagcgcgcagactgcgaggaatcggaatcacaacaatcacccacctcgagaagcgcacaacggagagggattagaattgatagctctcggcgaggaggttttggtggtggtgggagatggacgcggcgggggagatccagaaggtggcgagcatgcggctaggggggagcatgaggggggacagcgggtcgatgtggaggagaggggacgacgtgttctcgaggtcgtcgagggaggaggacgacgaggaggcgctgcggtgggcggcgctcgagaagctgcccacctacgaccgcgtgcgccgcgccccatccctgccgctcggtggcgacgacggcgccggggacggaggagggaagggcgtcgtggacgtgcacgggctcggcccgcgcgagcgccgcgcgctcctcgagcgcctcgtgcgcgtcgccgacgaggacaacgagaagttcctcctcaagctcaaggaccgcgtcgaccggtgcgtgcgttgccgccagttctcgtcttggcatggccgcgtttctctgctttgcgcccgctaggtgtttgatctaacgactttcgcgcttgcgctgtgcgacagggtggggatcgacatgccgacgatcgaggtgcggttcgagcacctggaggcggaggcggaggtccgcgtcggcaacagcggcctccccaccgtcctcaactccatcaccaacaccctcgaggaagccggcaacgcgctcggcattctgcccaaccggaagcagaccatgcccgtcctccacgacgtcagcggcatcatcaagccccgcaggtgaaacaccatcccccccccccccccaacacactcccacacccacatgttgttttcaccaaaaaaaaaaagaacatggattctcttgtcttctggagcaatttttatctctcgtgttggagactggattagttaaatccgggtcttttttttagaattcaatttcttc

SEQ ID NO: 9650 - DNA, 14855 bp, Oryza sativa
tactttttctatttgaatcatcatcttacatactatttaaatttaaatcacatcgaatgatataaacttatgtttttatgtttgtgtaaacttatgttgtttaagcaatcttacatattatttttacttaatattatagtaaactccacccggggttccatctttacatagagttcgtttgcccagttgacaagctgttgctcacttgcttgtcattacagtccaagcatctgtgcgaccaaaggttgatgtcatcggcgcaacaccgaagagcttaggaaggttctcaagcctaggaagggaggcgagctgtagtgattcgatctcagtttaataattcaacgtgcttgacagatttagataagttcaggacatattcggattaccccatcccccttataacacagattatccatactgtatgcagccagccagccacgataataggatccacttaagtacttgccagaattttctagttgacaaagccacaattggtagaggtgaatcttggaaatttaaagaagatgaacagcccaattatctttgaaaccgcacttgcccgattattccttacattacaaaagttgaacaacaaattattttttatggtgctgactaaatcttcgtaagaagatcaaccatggaagctcgaggttgatagagggcctcgagaggcaactcctttggcattgtaaggccagagcactccctcatgtcaaccagctcttccccaaccctttcccaatcaaaacactggatcaatgtcccaagggcaagtcctaccatttgcatccccaaattctctcctgggcaccgccgtctccccataccaaacgggatcaccatcttcccttcgttttttccatccgcaaacctgttaagatatattcttagtagttcataacaagttgtgaatgaattttagtaaatgtaaagaacatgatgaaacttgaaaagaacatttatatgtgatatatatatatatatatatagattaatatcaaactttaaaatttttaaatataaataatttctaaagtattgtcttagaaatatagatatcctacttcaataaaaaccataaatttctttatattttctatatatattagaatagaaaatagtgattaaatttgtttttagattatgttatttttaaaaaaaaccaacgagtattatcggagggggaaatagtacagtacctatctgggatgaaggcttctggttcatcccaaacctggggatccctgtgaatggcgaacgtgttcaccagcagcatcgtcccctgggggacgtggaacccggcgacgacgcagtcggcggacgactcgtgcggcgccagcagcggcaccggcgggtacagccggagcgtctccatcacgacgcaccggaggtagtgcagcttggggaggtcggccgcctccagtagccgcgccgccggctgccccacgcacgcgtcgatctcgccgcgagccctcgccatcgcgccggggttgttcagcagcagcgacatcgcccactccacggtcgccgccgacgtgtccgtcccggcttgcagggagccctggccggagagagagacgaagtagttaaagcaaggtgttcgtccggggataacgcgcggcggcggcggcggcggccggtactcacgatgcagagggagcggatgagctggtcggggcacgagtcggggtcctttctctgcagggagaggaggacgccgatcatggtccgccgcttcgccggcgcgtgatcgtcggagtcggcgtccatgtccttcctctggtcgtcgatcagcctctgcaagaacctcgtccggctgtcggacagctcccgcatccgccgcgtcatcctgccggcgtccagccagcgcgccggcgctggtaggaagtcccacaccgtcgacgcgccgctcagctccatcgtctccttcaccaccgacctgaaccaccgcgcctcctcgctcacctcgtcgtcgccgtcgccgtagaaggtcctgtcgcagatcatggccatcatgatgttcatgaacagctcgaacagccgcgacttgagctccacccgcgggggcgcccccgcggcggcggcggcccgccggtagagacggcgcgccatggcgcgcacctcgcgggcgttgacgccggcgaagtgctgcacccggtgcgcggagagcagctcggtgacggtgatgcggcggatgtggcgccagtacggaccgtagctggcggtgcccatggtggaccactcgtacgacaggatctccccggacggcagccgcggctggtcggcgaacgcgaggtcgtgcgggccgaggcactcctcggcagccggcgccgacgacacgacggcgacgcggcgggacccgaaccgcaggcccatcacggcggcggcgccatggcgagccgcgagccgcgccagggtgcggtgcagcggcctccggaacaggtgcaggtgccccaccaccggcagcgccacgggccccggcagcggcctcccgcctccccgccgccgccgccgcctccaccgccgcagcgccgcagcagccaccaccaccgccagcagcgcgacggcgacgctgccgaacatcgcgtcgacggccatgacctagctgatcgggcgcgcgggatcgatatggttggagtgcatgcactgcggtgtgtgcttcgtttgctcgcagggtgggtgcatgagtttatactgctgcaatggcgtaaaaaataaatgaagtcatccggcggcatgtgcatgtgccgcgccggtttgggcggcggcgacgagcggctgacgtcgccggcggtgggcgagccgtgcggggctctccggtgtccagacaccggctcacctcatcactgtcgatagggctagccaaggacacatcttgtccggtggaggcggtgacacgttgtccccaagtgattaattatttctttttttttagacacatgtgattaaatttgttgctgtgcaagggcattctatgactgatatagtgatggcattttgcttgcttcggtgccttaactggctgtttgctagttggagtatgatatgcgatttttttggggtataaaattggttcagtaggcctactgaatcaataatgttgggtgtattatttggcataatgttggctgttctgtgaaggtattgagcaaacgttatttgtccttaaattcaaaggttgataggagtagtagctgcttagagcatctttcagatcatggagtgctatatggatatggctatcccaagacacgccgtttttggcatggatatggtctttaaggtgcagtgacttaactttggagtagtttattacaaaatttttacagagcccaataaaattataatattactttttgagacaaacatacagatactgttttccatgtgtctaatctaaaacattttaaaacgtagataggataagtacatactgtgtgtttaagtccgaccaagtagtccataatggatctcgtgtgtttttttgcctactagctactcttagccaaatatagtcaagcactgaagaaacagagaaaagaaacacctgaacaattcagcatggatatccctgttattctgtcaagtttcagtgtcatgatatataatttttcttttaatttatggctggtgggctgccgttttcattcatttggagtagtgaattacatggataagaaagtaaaagggattgggccaagaaccacaagctgagcccagagtccgataacaacaggcctcgtacatcagtcacaaaggactaagggcatgtttagttggtgaaatgaaaattttgggtgtcacatcaaacgtttgaccggatgtctgaaggggttttcgaacatgaatgaaaaaactaatttcataactcgcctggaaaccgcgaaacgaatcttttgagcctaattaattcatcattagcacgtgtgtgttactatagcatttatggctaatcgtggactaattaggctcaaatgatctgtctcgcggtttacatgcaaactgtgcaattagtttttctttttatctatatttaatgtttcatacatgtgtccaaaaattcgatgtgatgtttttggaactaaacagcccctaagaaaaaaaagttcaagatggaatgccaccaaattccgcggatcttctccctccatattatttattaggctatataatccttccaacatcacatactatttattactatcatgtttgaaagtttgctctctcttcttacttaggctgtgttcgctagaacaagttaccatctggaatgtgatcatggaaaacagagcggtttattagcacgtgattaattaagttttttttaaaaagtgagattaatttgattttttaagcaactttggtatataaactttttgcaaaaaaacacaccatttagaaaaagcatgagcgtgaaaaacgagggagaggggttggaaaaggggcatccgaacacagccttagtagtccaccaagtgttcttacatatggcttttgagatgaaaagatgcacttattttcatttttttaacaaaaacaattccatgatttctaaagtgataccttatcatgccaattcgatcaactatccaaaagtttgatatagtattgtgtaattaattaaagctagagtaaaatgcactagcggtacttaaatttgtcatgaggtttcatttaggtacacgaacttgtaaaacacacatcgaggtccctaaacttagtttattgtatcatcctggtccaaagcgttgtttgatcgtggtcttatctacatggcatgccacgtggacgatgacatgatgtttttttttcatttccccttttctttttcctcatattcttttatcttcttcctccacaagagccacctcgagctcccccgcgtcgaagaggccgaagaagagaaaaatgaaagaggaagaagggaggaaaaaaagaaataatagtaataatgtgccatgtcgttgtctacatgtcatgccatgtaggcaagatcacgatcaaatgagactttagaccggaatgatacaataaaccaagtttagagacttcaatacacactttgcaagttcgtggacctagatgaaacctgcttaccagtttaagaaccgtcaatgtaatttactcttaaagctaataaaggagatgcatcagtgacgcacgaggttgatagaaggcttgcagaggcacctccttgggcatggtaagaccagatccctcggtcatgtctactagctcctctccaactctttcccactcaaagcactgaatcattgtcccaagggcaagacctaccatttgcatgcccaagttctctgcagggcatttgcacctccccatgccaaatgggattgccatcttcccttcacttcttccattctcaaatctatagaaacataatatgctataatttaatacgcccgtacatatatatagcatttttgaaagaaattgataccgatacctttcagggatgaagcttgttggttcattccatacttgaggatctctgtgaatggcaaatgtgtttacaagaagcattgtcccacgggtaatatgaaaaccagcaattgaacaatcagtagacgcttcatgaggcacaagaagtggcgctggcgggtataagcggagtgtctccatgataatgcactggaggtattgtagttttgtgaggtcactcgcctctagtagcctactggttgtcctatgaatgcatcaatttcgtcacgagcttttctcatcacattcgggttgtttagtaggagagacattgcccactcaattgtatcagctgaagtatctgttccggcttcaagggaactctggagaaataaaaaacatgacaatattatcattttgatatatttatcatggaaatatttttcataaaaagattaaaaataagatgcatgggaatatttttcatataaatctaacattatcattttgatatatcactattttagaatgaaggaagtatgttttggggaatattatatacaattggagttttcttctaatattgtagatgcaatttagttatatatatgtgtttgtggaatgatatgtgatgatataatttatattgtttacttttttcacaattgtccatctatttcgatatgggtcttgaactattaatttaatcataatgaacacaattatgcaaatggattaaaaactggatacttatgcaaaattcaaaagtaatggtttgtttaaaacccatcatgcaaatcatggtttatgcatgggtgctgcttgtctaggtgctcaaggaggggagaaattaaagggatgtggctttgcaacccccttttgagataaatttcaatgatccgttcaatgatttaagtggaaactgaagtttgaattattttttttcatttctagattttctttattagaagcgccaatacaagtcatacaaatgggttagtagatcatagtttatttactccatctatttcatattacaagtatctttgattttttttccttagttaaacttctttagatttgattatttttttaaaaaaaatagcaacatctacaatatcaaattaatttcattaaatagaatattgagtatattttgataaaatgtttattttatattagaaatattgctattttttgtaagctttaatcaaactctgacttagaaaaaaaaatccaaacgacttataatatgaaatggattatgaaatggagggagtagatacgaggggaagaaggtggcgagcgcggcgtgcacacgtgtatgggtggtgtgtatgcggtggtatgggagtggagaggggcgtacgtaatctatgtgtgcttgtgtgtgtattagcagctcacgtgacatcatacactcgtttgattgcaatcactttttttccactatatgattggtactccctccatccaaagaaaaaaaaagccaaccatgtgtcctcttctatttactacgaatctagacaaagggctgtctagattcattgtattagtagggatctcctcctaggttggttttttttgaacggagggagtaactctctatttatatctcttccttattaacttttgtttcttttcttatctacttgtatgtcttaatttggccggtatttttttcaaagatttaagtacataatcagtcctcttgacctagttactatgtactagaaagattatagtgtaagatttaaaattaatagtataagttttcaaaattataccatacatatttgaaataacaatatatatataaggtacaaattatacaatgtgaacacatgttgcaaaattttgatcccgacccttttgtgaaacatataatttggcatgtgaatatatatgtagaaaaacaattacgatgcacaatgagcggatgagctggtcggggcacgcgtcggggtcctgcctctgcaccgagaggagcacgccgatcatggtccgccgcctcgccgccggctgcgcacggtccgcgccctgctcctgctccatctccttcctctcgtcgttgatcagcccctgcaggaacctcgtccggctctcgcgcagccgccacagccgccgccccacccctcccacgtccacccaccggagcgccgccggcaggaagtcccacaccgtcgacgcgccgctcagcgccatcgtctcctccaccatctccctgaaccacctcgcctccttgctcaccttgccgtcgtcgtcgctacacagagttataccagatccatggtggttaaccaaaagaacttacgagtcatgcatcatggtgatcttacgcgccgtagtaggtcttgtcgcagatcatggccatcatggtgttcatgagcagctcgaacagccgtgacttgagctccacccgcacgcgccctgcagccgccccggcgccgtggcgctggcgcgacgccgggcggcagaggcgtcgcgccgtggcgcgcgccttgcgggcgtgggcgccggcgaactgccgcacccggtgcgcggagaggatctcggcgacggcgacgcggcggacgtggcgccagtagggcccgtaggcggcggtgcccatggtggaccagccgtaggacaggatcccggccgacggcaggcgggggcggccgacgaacgcgacgtcgtgcgcgccgaggcactcctcggcggcgggcgcggacgacacgacgacggcgacgcggcgggatcccaggcgaaggcggaacacggcaccgtggcgggcggcgaggcgcgccagggtgcggtggagcggcttcctgaaaaggtgcaggtggccgacgagcgggaggcccggtggctccggcggcagccgcagccgcagcctcccgcttcgccggcgtcgtgcggtcagcagcagcagaaggagcacgagcgtgagagcgatgagaagagtggaggtgtccatggatctgggaactgacgattattgtagcagttgcagttgcagatgcggcaattttttcagccatgcagacacatcgtgcacaacccgccagacgaccccatgtggtgacctgccactaccggcttgattagaccagccaagcagcaaggcccaatgtccaatgtccaatgtggaccatgttctggttctaattttgtttatttctatttttttttaatttaaatagaaaaaatatccgtgcgttgcaacgggtgaagactattttaattgtattattgttagatttttttttgtctaaaaagtatatgggatttttattttgatatgatatccaattcgaaacccttgtatttttaaaagcaaacgaattttaaaaccaacttaaatacggacaacatactaaaactatcagcggaaacaacttcacagcggaaacaacttcagttttaataataaatcacttaatcctaaatggccgaacggaatcatatgttgaaaaaattatgttaaaaagaatcatgtgtagatgaatccttcacaaaataaacggacatgcatgcaagccacccatacaaaaattagtatgtttttcatttgcatgtgtacaaaattattgaaataacacaaacaaatctgtaataaatagtatgtaacatatgcttagaagataggcaatatttttcactgagacagctcgaaataggaagacagattgtgatagacgttgggcccttttacaattttaggcccatatgtgcaaaaacgtattggatgtgcagagaaaaaaaaaaaggaaacgtgaatatggtcaaaatgctaaaaacatatatgaatcggaacaagacggcttgttggaatgaagggacggcggacgaaaattcgatgagtataaaattatcttcaatttttataataggtaaaggttacgacggaaacattttgttctcttttgaagcatttttttgtttttttttgccttttattattttggatggatttttttcacggactggtggactgccttttttattgttgcatacaaaacaaatctttattttttgtttttttgaaggaacgaactttttttcgccgctctgggggaatcagacttttcttctgggggactttttcactcttttttaattttttttacggatggtttttcacctttcttagttcttacgaggaatcggacacgttttctttttaaggcggcccaattaattcgctcagatggaaacattaaattaaaacctatttaaacacgggtgacctactaaaatctcgataaaaacaccttaaatttttataatagtagagatagagataaagaagagatagagatatatggtttagttaagatgaaacacattgtgttaaattcgtttggatatatattttgttagaaaattatgagttgtaattagagtccaatcatctcaagttaacctgcgagttttttaaacagatttcttttacgattccttatatatttacaaaagcaaacgaacttaaaatcaactcaaatatgaatttgtatttataaaggcaaacgaatttaaaaccgactcatacacggatgacgtaccaaagtaccggcaaaaacctctttaatttttataatagtagagatttagagttttttcatctcatctctgaaatttcttttccctaacatttatttccttgttcatttttccttttagcgttcactcctacgcttggatatataatcctcatgtaccttgagatattacgtactccatctatcccaaaatatgagcagttttagctctaaatttaaacaataatatatttataggtaaaagttattatattttaggacgggcttagtagtcatggtcgatcataattgataagaagtactatcattaaaaatttacacatatcatcattggtatctaacagatatcattgttgataaattgatatttatcatcaccggtacctcacgtgtatcatcagtagtacgtacatgtatcatcgtatattcattggtgtttacatgtatcattaccagtacttcgcaagaatcattactgattcctacatttagagcgtccccagcagatctttcatccggtactccatccgaaatatagcgcatgagaggagaaaacggcgctccagcagatacggtatcaaggcctcaaaaaatagaggatgcaccaaatcagggagagttcggccaaatatggcgattctctctcctcacgccaaaccttattgcccgcgctcctgcccacatccggagttccggatcaactttcctccatcgcaacctccctttcgtcgtcgcccggaggtatggaagtagagaggagagacttactggatctgccggcggaggctcggagtagaggccgaggcccgcccgcccgttcgccgcgggatgccgttcctctgtcggacaaccgccgcccgcgccggtcattcctccgcccgcaaacccgccgcccgcgcctgcagccatgcggccgccgcccgtcgctcctccgcccgcaaggccgccgcccacgcccatcgctcctccacccgcgaccccgccgcttgcgcccacgaccccacggccgccgcccgtcgctcctctgcccgctccgccaccgcccgcgcccgtcgctcctccgcccgcgaccccgccgccgcgcctcgccgcccgaaaccctcgcccgtgaccccgctgcctccggttgtccgctgagggaagagaagaggagagcagtagtagagaagacaagaggagagcagaagaaaagagtagtagtagctgtacacgcggctgctatattgattttggaacgtttacaaacaaataacgattttacagtgtcccatatcattttatttgtgttgctatgattttttttttgctatgattcactcaattcaaatataccaattaaaaattaccagttaaaattatcactgttaaaattatcgtgataaatagcaccgcgttaaaatttagttgttcaaaatatatcccttaaaaatagaaatgtaaagttagttaaaagatattataaaaaattggatatggtatagatgatctgctggagtaggaaaggatacgagtgaggaatcttttttggatggctatccatatgggcatatggaggatgagatttggatgagctgctggagatgctcttatggtcattggtacctgcatgtatcattactcctacctacatgtactatctgttatccgatactactctgtcaaaaaaaaaacgaattcctagctatgaaccttgacacatataggattggtcttttttttaggacggaggggtaagcatcatcactcgtatttatatctatcagaatggatgttacggtatcatataggtgtcaccaccggtacctacaaacatcatcattggtatccgcaagtatgatcttctatatctatttatatcatcaccgatatttgacatacattattagacgacattgttagtgtatagaagtgcaaattttagggtcatatgtatcatcactttatataagcaaatgccatgatgtaggattgaatagtaagaactaagccaaccagaggggtggatgaatggatgtagtacctaaaaaccgaaacttttagcagaaataaaagttaccatcgaattcaatggagagctcgacgtaatcggtctaaccgccagatctactccaatctgactgcagtgccgccgctggtctgactgccgcattgtcgccgattggattgccttcctgccgccgcctcctcgctggttagaccgcctgtattacttcagtcaaaccgtcgggacctaggaaagcacgtatcgatgaaatacttaaaagtagatcaactttattgcatcaatatgtgtttacgaagtacaccaacaacactcatcaccaaaatctcgactaaactcgaaaccctaacttttctctcaactcaactctctcaaaaaccaatcccaagaggccacaccctccgtctctatttatatccaatataggcagcctaaagctacgaaccaaccttgtacaagacatcctaatccactagaaaacatgtccgtaaaaaaaaattaaactttactaactcgaattgtatcaaatttggacaccctccaaattcaactccgctttccatacgcacacaacaccacatgtattccatatggaaaccttcacctccacgtgcattcttctctagattgaacattccgcgtgatatccttgaccgcccggacctcaacctcccgatcctcccccaagcctagtcccgatccatcaccgactatactcccatggcctcaagcaacacttgcacatgaacaacaactaaactccatatccgagtacaagttcgcactacttgactcacatcagcacataatagcatcacatacaaaaagaaaccaactagaaatcatatccatgaagcaatctagaaatcccacgagaacaacccgaaattgattcccacctagagtctgccggtctaaccgtcgggcaacacgatcagatcgctccaacactaccggtctaaccggcggcacctgcccggtctaatcggccacacaaagtcgagaaacgaaaacactattcaccttatttttataaaataattacttttgacaattgttcatcaccatgattaaatcattacatgactctacaatccctccgtgatgaacacattggcaaaatcctcaaaatgcaatttggtgtttttaaaaaatgaaaaacaaaaacaaataaaaaaaacacaaacaactcaaaaatcacaaaagcaaaaaagaaaaactctctcctttttcaaaagaaagaatttcttcccatattggcaaacaaagcacaaaatcgactattttttaaaagcaaaacaattcaaatccccccggtgacttggtaacaaaaaaaaattcaaatctccccctttgaaagcatgcattttgtatatttctccccctttgacaatgatttcatcatgcatttgcattttaattagtaatgttcaagagcttagcatcatacatagagcaattcatgttatgtgttgtaatagaaagaagatgaacccatcaattaaatagcaggcatgcactagagtataatcatgaatcaaagatattactatcaagttcaaatcaacaatcaatattcataatttcaaataatttataatgcaatatattcacaagcacataggtttaaaagtcaagcctacacatatctttctcaatattagctctagcacaaaacaaccaatagaatttgtaacatttatttgagcctttttgttttactcatttttttctctcatttattctggaaacgtccttgtcatcaagactatttttgaggattcggcacccattattttcgctcacatcgaatacgtccttgttgtcaagactgtttccaaggattcagtattcattttttttctctcatagaaattattttattctcttgcacgatgagaaaataaagagcaatttgaggaataacaattcaacaatcatatacataagcattcatcatccaaactatgtactagcttcaacattgcatttttttcttaattcaagtaaaagaattagtgccatgcaccatctcacttaaaagcaatatctaagcctcataaaaacactaaaatgcatacacaagaatatacaaaatacatggcaaaatattatgaaccttcataatattgctagcatgcacaagaatatacaaaatgcataagacaaagctctccttttcttaattttttttgttattttcagatttgcttgataacaccaagagcaaccccccctctcaaattaaccttcaattttccccggacaaaaatcaagaaggaacaaagcttttgaaaaagacacccaattgccaacaatatcaccaaggttctcatgaattgatatgtatctacttgtattaaccaaaactactacctcaaacactagcatacgaaaagctaataatcaagagagtagaacaatattaatattatgtcattccaaaattattttgatgttacctcgaaaaacaatcatcttcacaacgttgaacgcatatggagagtatgccgccaaaatacctacaaagaggaagatgtcgaggcctgtgtgttggggttaatcataagaaattttggaatacaacattaagtcacacgactggtagaaccaatagatacatatgcacacacaaaatcagaaccagacttacctgaaaacttaccttgtctcttcacaaaagtctaatttgaattatgcgcaaaactcccccgaggccagtctgatcgccgttgtacctgcagtctgaccgggcttggctaccggtctgaccaccggttcacctgtggtctgaccgagcatcgcatatgaaaagaaaccatctagaagttatatccataaagcaatctagaaatcccacgaat

SEQ ID NO: 9651 - DNA, 35463 bp, Oryza sativa
gccgctgctcccaccggagaatatcaacgggccagatccgcaccgccggtgcccgggcagccgcgggggcgtgctctccgccgtcagctcgccggagtggctcctcccgcccgccagcgccagcgccccggcattgaccggcgccggcgacttagccgacccggacgacgacgacgacgaggtcgccacgctcgaccgcgcccgcagcggggacaccggcgagccaagatcggcgaacacgtccgccttcgcgtccggcttgtcccgcaccgcgccgccgccgccgccgtccagcgccagcgccgccgcgcgcacccgtatccggtccgcctccgacatcgccggatctcccgctctccgcctcagcaatgccgccacctacacccctcaaatcctcctcctcctccaatcccgagcaagcaagcaggcatagaaccacacccccccaagaacagcacagcttttgcccccaccttgtgcgcgcccgcggcgagatgaaccaccaccaccacccagcaagaactgcgagcaataaatcgccgagcaaaagcgcgagcggattccccgtgaggaggagaaatggaggatagcgtcaagggaagaaaagggggggggggggggggcagaagagaggagaagagaaggaagaagaaaggggaggagtgggaagcaggggggagaaatagcagtgggtggggggacttggggaggggctaccctggaattatggaagaaatccagggggcagagtgcaaaatatgttgtgtggttatttgggtcatctctggtgtgggttttgtggtttttggtctctagtgtcattggagtttagggtttttctggtttccttcttccgtttttgggtttttaggtgctggagtttcaattgttcttgttatgtaaaaacttttaagctgggtttgagtggctcctagtagtttttttttctttatagttgtttacttagatgaaagggtatagttgtttgtttggaaaaaaagggttagtttcatgttgttttcgtaacgtcggcgtttttattttatcgtgagtaatggattttctcaggtaagtataagccacgtcattattcgagcatctttacagctatgttcaaccataattattaattagcgttgtttttattgaaaaatcacatgtggcaactagtgttctactgatgtcaaagtcggtcgtgcagaaatcgacaagcgtaggcacttaaaaagtcatggtcaatgatgttctggtcttgttttgtagtcgtgttgttggttgatatagtgataagctttaaacacgtatgcatatatcttttattacatatgtcctaaatttttctatcccttattatcatcacgatgtctatatgagtcagcaagcaaaatacgtgtaaagagattatctttttacatatacgctcattaacattatcgtgtgatctgaaattttccatccttaattaatatcacaatgtccgcggggatataaaagtttgatcacatcaaagaagctttgaaaattacgtattagataatatggcaataagctttctacaagcgtgcatatctctagttacattgattccttaatcttccataaccttttaggtaacaccatgacgtttaaaaaaaaaacatatttcatcaacacaaaggtttcttatacaatttctgaaatggagtggcaatcttccagttacgcccacgtttagattttacgtccgcacgtattagggtctttttaacatagtgccagctatatttttacttttcttgagctatagttcagccaacagtttatgctcttctcaaaaagagagtggagatggctgaaactctcacaaaatgaatttgaaatgtagtgttgtgtttagaacgctccacaattttacttgagactcaactttaataagagatatctaagttatatgggatacataaatttcataatatggtaacaaatacatagttcaatgataacgaagaaaaaaccaatcatgtttttcatctgttttcactgttcttatgcaggaaacaaatgtaaatatgcatttatgaaatcttcaaaaacggatgcatattgcattttccgaggccatcaaaattcatgagagaaagagagagagggaagcatggagctcggtcccgaagctttccagccttctctctcacactgcatacgcaagcataccctaaaaaccagagaatctgcttcccaaaaacagagagagaagggatgagaagagacagcacaccatagatttccagtggacgccaaaatgaccgttctgcccccacaacaaacactgtgcttttcgctttcatgttcttgccaaccacgcacaccggaacacattccttcctaaccgcttcctgtgtctcaatgttatccttgtataaaactaaataaaaagctatgcactatgtcatcatatgtaaataaatttctaagttctggtgagaaacatcaacacaacattcctcattataactgtatcactatacaaaacaaaaaaaaaattggtcttcgcatgtaattcagtctaaaattattattattttcttcagcaagctttttggctcctttgaaacaaagtcatgaaatattatagaaaatttgcatatatagttctttggattaaaggaatagttaaaaaaatcatacgaaattcctttgtgttgggtcaaaacaggaatatttaaccatttgccacatttagatgtggcaattaactttttgccactggacccatatgtcattaagataggggtgacaaatatttatttaccaaatttaaaagtgacaaatagttaaaacccctgtcaaaacatagtgatcttggaagaattttattcatggaaaaaaaattgtctgtgtttatctttcctctaattgctacgcttccctgcattccatcgaaacagttatttctatctttttagggggggttttaatcaataggacactctaaaccatgtattttccatgttttatgatgaactctttccatcacaaaataattatttttctagagttcaaaaattgtctcaaaatagttcatatcatcctatctatttgtcccatcaatcatctcctattctagcttctctccattttatccccactactcacctacttacatttcaataagagatattgcagtattttctttttaaactttaatttatactaaacagtatagaatgatcagtattataggatgggagggagtgagaatattgtagtgtaaacgagccctcaatcctaagggcatgttagatctcaggagttgtttagatttcaacttttttcctttaaacttttaactttttcatcacatcgaactttcatacatacacaaattttcaactttttcatcacatcgttctaatttcttcaaactttcaattttggcgtggaactaaacacacctcaccctaaaattttacaccatatcacgtcaaacgtttaacacctacatgaagtattaaatataggctaaaaaataactaattacgcagattgcgactaatttgtgaaacgaatcttttaagcctaattgctctatgttttgaaaatttggtgctaaagtaaacatgtgctaatgacgggttaattaagcttaataaattcgtctttactgacggattctataattagtttttttattagtgctgaatattccatgcaacactctatataatatcacatgtgacacgccaaaactttgcactcctgtaccaacaccaccaaaaacaccccctaagttgatgtttgtaaaatttacctacccgctaccaacaaaccatacatgcaaccaagaaaacacggaaaaaggagagcgaagggcagtatggtaaattgacgttccccacgggacagggtcagcaagacatgcgtggcgcgtccggggagaacacccgcactgccagctaagcacgtccacctcatgtgggcagtgggccccactcagggtaggctcgggtcgtcaccttcacgtcggccgtggagtggagatcccgacggaatattccctccgcatccacgtggcaagccctgccccctgactaagcggcctccgtggatttaatcgaccacatttcaacttttcaactttcactctgtagaactgaaaagattaatagagcagagtacatttcagagtattgagagattagcctcttggcttactaaaaagataattaacgtacgattaatgttaaaacttctataatacaaacttaaatattgcatttacttgctaaaaaagcacttctatacataaagctcttttaaaaattgcaccgtttaacggcttgcaagcatgcacgtcataatatagtagctagttctctgtaatctactagtatttgtgttagggtaaatataaaattttggagtaattttatgagtattaaacttatttctacgaaaatcatgtattatttgtgttgctaaatgtgtccttttggccgtatgttcacaagtgatctccattactttagtgttttaatggagataaggtttggatggcataacacaatattccactatgaaagtgagccataggtaggattaagtactgtttaagtgcccaagccaaacgttaacaccatcaccaacaaaataattaggtaggtgaaccgctgctttccgtttaggattaagagcaacacgacgcagattgaattataaacagcagcgtttatattaccggtgtaatgcccatgttggcccctagcatttaccttaatctcaatactgccacctctactaaccacaaccccatcttttgtcttattcgagtttgcaaacgaaaaataatttataaatataacttttacatacgtcttcataatgatctaaaagcaaaagctgataaataaattacgatgaaaaaaaaatcaaaatcaactctaaatttaaggttaaaaatttaaaatttaactgataaaatataaacataaatataagggaaaagatgagtccgtacatctcatttttaacattttgaccggcaactctcgcaactgtgcatgccatcatacgtggcgttttgatcatgccctcgtgccagctggacgcgatctcctgtagcgtccacagcggccgccaagtacacggcctacccgttctgggaaaaaagcccaaaactttaccattattagtttattattaccggtttgttacacactgcatgcgaagccaccggaaattttatgcgagaaggggaaaatttgcacggcaattagctgtaatccggctgggaatttccggctaagcaagtacttaatgtgtccgatcatatcatatcgccagctatgttcggtgcaattagtggcttaagtccgagagaagtttttatgtgcgtgcttaatttgttggagagggtactggatgggcacagcagaactcaacccggtgcaattcacctgcaaaatggtgaggtttttggagatggagaggtgcggtttaaattgtaaattgtgcccgtcggattttattccttaattatgttacgtccatcatacaaaagtagttgtaagcatatgggattctaaagattatgacaataacaaaaacactgacggaaggaacataaatgatatagatggtttgacgtatataacgacaattttcatttcatatctatatcatttatggtcatgcagtcatgccctcatataacatgtggtgattcctttagcaaaactttcaatatttgagtttcgatcattttctattaagtaacctagataaacgaaaaccatatttgtatattaccattggaaatactttcaggatgacacagttaaatagctcatgctgtgatcctattttaaaaaaaaagttatcatggttatatcttaaaaccccgcgtcatctatttggcatttgtcatgctaaagttttacgatatttgtgctgacttaaattcaccctccactaaaaattaattggtgatgaattgcaacactgaaaatcattccatccctacctaagcttggacttcatgtctacccttccaatgcttccgtagttccattccttaagttttctatgatgatgataaagctagcttccattctactactgccaccaccacgtaccattgcatacgcacacatattgaaaccagcgaagctaaccctcatggatggtggtttacaatcccatcatttagcctttagttcatatgcataagcggaaatttaaaattttaattttaatcccagagttacttttgggtgtttcgtattgtacattctagcgttaaaaaaaacgcgttaaatagttttatttataaatcaattttattgctaataaacagtttcactataagcataagagggacaataattatattattctcttctctcatgagggggtttgatctgttcaaaaaggacaccacagtgcaaaacaaagccggaccacgctatgtgcttgggctacatatatagtcctttccttgccacgcacatatataggggagactggtcgccactgaccaacaactattggatcctaattaaaaagcctctccatggccggtaacacacagtggcggcgtgcatggtatcgtgcaagtcagagctaaaaagctggagtattgtgttgttgccagccaagtcggatgatgatggagacaccaaggccaggtcgtcgtgcacacatggaaaaaggagcgaagaatattgattttgggctttgtttacacgccgtgccggtattattttctttcgttatctgagatacgacgtgtaccatatactatcttttttttctcctgaaaaagggtgtaccaggtttgttctaactttcttcgattatctactacgcaatagcaattaatacgaaaatattgacttctataacttttttttttattggcgataagttgggatgaaaaaaaaatcagttctagcctgatgattgaggatgagaccaatgtcggagaaataggagtgataacattgtcggattaggataaaaccagtttttagttacataaataatactatatgtaatatttgatctatttgggtggaaataagaggtgaggtgcaaccaacctactcttctctcccagctgtacttgtaaaactcctggtgcatcttgtttggagctctataaaggatagggtcttgtttagttacaaattttttctttaaactttcaacttttccatcacatcaaaatttttatacatacgtaaacttccaacttttttatcacatcgttccaattttaactaaacttctaattttagcgtgaactaaatacaccccacgttacacacatggagagcggttttaatgaagaggagaaatgggaaggcaagaaagaagaatactagaattcaaggaggtcacattggccatgtcatgtgcctggaggccgtagacgagtcgtagtagattctctcctctcttctctctgtgtatgtgtgtgcgtgtttgtctttctgggctctggattgcagtcttgcagaggaagcgaggccatgatctgagcacggaaaacgctttggctgcacacaaaggctgcccctttttagctgttctgttcactggcctgcaggccatgacacaagcctcggctccagcacccacttcttccagggaggcacaagccctgaagcaccgtatgtatctcattggatgccttcgtctcttctgatattctcttctccggggtgtatgaactatgaagaatgtgggcactcaacgtgccaaaagcttgaccagatgtttatgttcgtcttgaattattataggttggccatgtctcgaccgggcagtgtgcgttatttatacttgcatgattacatttacatcaaagataacatggcttgtctgttaaattagactttggaaatgtcatgtgttcaaggtatcaataatgtaccgtgcatatcaccgtgtcgatatgtcgcagctcagctccatgaaactctgggcgtcagacgtgcatggagctactatagccacaggccacagctttctattctcctttaattaattaggaataccagatactgagtgtgtcggacagggaacagagcagaggaccgatgcgaaactcctgaaggcatcccggcgatgtgatgcaacaaggacctaggccaggagataaaaacggtatattttcgaaaacaatgctccgtcgatcaataattaaccagatttatcaattaaactatttagtattgatatcaatatgataagatattatctaaaaaatcaatatgataagatagaaattagaaaacctctcttacgttatgtggtaaaaaatatcggtcagaaatgatacgctcggtcagtagttgcaatttgcaaattgctgtgatcctatactcttcagtaattagtagtactactcgtacagtactccagtatatacacactcgtttattcccgatgcacacaggcgtttcttccggtatatgtttcgcggggccaactactctgccacacaacgctggctcaacaacccccccacggtaaacgaccgacctcgagtcacgtacggttagcgccataccggatgccaccccccaccccctccaccgcgcgctcatacgcggcgtggcggcggcggtgccgaacgctgaccccgaccccccgaccgacgacgacgagaacgcacacgcacacacgcacgcgcggcagcttgctaggctagcccgcctctcggccgcggcccgcgcgcgcgcgcatcatggcggactggatgcggtgatactgggatggcgcgtcgctgcatgccgtcgtcgatcgtcactactcccgcgtgcccgtgcccgtgcgcgcccacccacctctccagcgaggtggagcgagctgcgctacacgcggtacgcgcgctagctgcagctgctgcatgcatggcggctgggtggctgcctttggctggccgcgggtacgtacgtatagcgaccggaccgatcgacatatatgcggggtgatgggcggccgcgaccgcgcgcccatcacatgcacgctgcgtgtgcgtcggtacgtacgtacgcgcgcgccgggtactcgaaaggctgcgtgatggatggggtgtggcgcgcgcgggaggacgggacgggcgccgcacaacgtaattgcccatcggctcagctgcgtgcgtgcgtgcgttcgtgacgttttgcaccggcacgcgataggcgcgcatgcagccaccgaccttcacggggccgggagacccacatcggcgtttcttctcgacaaacagctcttccagtcttcttcttcttgtttttttgaatggtttagcgaggtttcagatgaacacaattaattatgtatacattgcacgagtaacttttcatctatgttatacacatagttattttcagcagaataaagaaattaatatttaaagactccatccgtttaatattgtaagttgtttttttttcaaagtcaaacttttttttaactttaacaaagtttatagaaaagaaatagcaacatctataatattgaatcaatgccattgaattcaatattgatatatcttgaaaatgttgctattttttctatgaacccaaccagaagtttgactttaaagaaaatcaaaacgcttatgatatgaaacagagtactatataatacttcatccatcccataatataaggcgcggttaaagttggtacggtctccaaaactaatctctagcttataatttctcataaactataaggtctgtagcaacaaaattataactatatgaaagtaaatttatatctcaatccaatgatataatttttaacaaataaaatctatttcatattatattaagtattggtcaaatcttttataggttgaatcttgaaaacacttgtacgccttatattataggacggagggagtatatgctaatttatttcttttaaaatagtggtagtattactctgaacctttatatgacctgtgtacaaactaaaatgtacactatcatattcttggataagaagattcgaattctaatatgttcccacgacttcaccatcacagaccatactaatgatgcttttccatgcatgccaatcgattcgatcataaaacggtggtgtgtaacaagaaaaagggggtgggtgattaagcgttcaagactgctaaaagcctaagatgctttctgtgcacgatgtgtacgatgattttgcctaccgccaatgattaatcaggcgattaacaacaaacttttccacacaccaccggtacatatttctctcttgcacatgacaggcgaaaaaaaaaaggaaagaaaagtcagcacaagagaacacgacaagtgtctcaacctaaactcatcgatacgataaagcacacgagagccattaatacgtagctgctttaatttcgtggagtattccttactacacatgaaccctactcctgttaagtacgtacgacgaaaccactaacaatttaattaagcaaatgcctcgctggtttccagccatctctgtgtgctgatacccaaactgcccaagttttgaaccacctttttccagacacaagctttaacaactaagagcacccgcaatggtaaagtagggtgctctctataaaacatgtacatctcagcaatagactagattaatagtaaaccacctcaatagtatgtctacataggtatctatagctctctcatgcattgcctcgtttttctctatagactatctctaagctagtagatagctttgctctctctcttcatttaatatcttccaagtaggaaaatatgctgacatggatctcttgtagatagcttatagataaccattgtgggtgccctaattaaggggagtacttaattacgagtactactcaaaagctggcaaaggtagtacgtaccacgtattagctaattctttctttccctaaaccagcgaatagtcttacactccctctgtacatcatacattctctttcctgaacgtgcaggtaattaaaagagaatagaaattactgttgcagtcttagttatgttctcctatttagaacagtaataatgtactagtattattgttatgtggctttttggaacgtgcgtataaactttcccagtgattaatccaaaattgatctctctaatgaaattaaaggtacttgtatcaatctatctatctatctatctatctatctatctattatcttctattatatactaaaagttcattaatcttcctacaaacactcttaaggagccacgtggcttcctaaaaacgctctcaagccgccacgtggcactctaataataaattagagaaaatcctacaaattctgagaaaaaaaacaaaacatctagcacttaattttcacttaaattggtgggacataatatttcaggccattagattaaatctattaaaatcattccttctaatatagatacgatgcatggagaggaaggtacgatgtactattcgtaaacagaaaaaaaaatcatatgcgatgcatatggaaggagaggaatgtacgtatgtactacctaaaaaaacaaaaaaaaaattacatgatatacgtttatatgaacgtaatgtaagatcgtatgatcggaaattaaaaagcataaagcgaaaaaaccaaatatatataaaagtccactaaactttctacaaatgcttttaagctgtcacgtgactcctacaaacgctactaagccatcacgtggcgctctaataaattagagaaatctaaaactttttgagaaaaaaaggaaaacatcatatcattgattttcacttaacatggtggacccatcattttatctcctattatctcacctgctcacttctttatccaaattttctagatagcagctcagtacataaacaataagaaatactatattaactatctattatatagtaaaaatcaaataaactccgtacaaacgctttcaaccaatgaaaaaaaaaaccaatgaaagtttgttgatatttcttcacgaaagagatatataaagaacactcaattcaaaattgaaaatacgttactttaattttaatttttttgttagaactattttcgaaacaaactaatgcgcggattatcttcctggttgtcatgaaaagacaacctttgctatcatgattatgttctcatatttagagtgtgaacaatgtattgttgtctctgattaacttaactagcaggtccattaagattataacgatacgacggtgcccaatgttaaagcaatgtaatgtacttgtaatgtacttagcacatttttaaacagtcaagggaatacagtaggtgctgccagtagctagcccagtcagtatacaatgcgactatctaatctaaaatccagtgatttgatttataataatcacatgagtacgtagtacatatggttgtcgcatccatggacgtgtacgtgttttgtttagaggagacagattatctccaagcccccatggccctcctgctttcggtttggtcggttgttgcagtaattaaacatgagcacgccttaatcctcaattagcaagccgtattaagctaattaacaagctcctctctctaattaatcttaattcttctctcatgagacaaatcttccaaagcgtccatctgatgatttgattaatccgagcctacacaaggctgggcatgcaagataggtgcatggaatattacaggcaggcaggatcagaaattcagaagtactacacatgtgcagtccagctgacactggctcttataatctcctcccttcacattaatcaaatcactcacaaggtgcatgcatggattgttcattagttggttagtagttaattagggcactcgttgatggagattagaggtgaagttatgtgagtggatggatctgggccgtccgttgctcctcgagatcggtgttgagagccattgatcggatgatgcatgcatgtactgctgctgtagtggtgtgtccagtgcaggagaatcatgtgtgtgtgggtgtgcggttcttgtcttgtccctgagtttaaattagggctgcagattaggtgctgaactcatgatgtttacaataatcaagctcctctcagacagatgaaatgtactataattaagaaggaaaaacaaatgcttcacaccagcccatgcatggtccctaacagttactgtttctgctcttttaaagaaaactgcacgaatcgtaaagcaaattacatgtcttgctaatactccgtgataaggaattttttatgttcaaaacatgatttctttgaaatttaaattttgacattacaataatttataaaatgtaataatttttatgatatcatgacaattcttttaagcaaatctactaatactatttcttgtttttaaagtaagcatttcagatgttattggtgatcaaagtttcaaagtttgatcaaatcttatcataaatgctatatatttataacttgagggagcagtttcattttggcttgtatcagagtagtcactacagctctcttggtgaatggtgatttcaagtgcctatagcagctcacatggaagatgaagtcattgtacgtgttctcttagccaattaattaagctgtctctgatctgtgagcatttgaaaagcacccgagttaattaaccaaaagatcagttctagttgggcatatggtatgaatgccagcaatatagtactcctagtgtgcctgtgtgtgtgggcaatgcaagccaccatgtttgcaagatttgcaaggttttaaacaaatggatttgatccaacaagaggccatgtgcatcctgtcagcaaagagaggggataactgcaccctcattctgtgcacttaccagaactgagacctccatagattccactgcactgtgcatgctgtgctcacaaaacacaaaaggaaacacaaaataattagttatctaacaaatcgtcctggcacaagaaacagagtttgcaggccagccattggctctggctgctgcttaatcagtgagaaaaagcaagtgattacagagatggatggccttgatcagttgtgtgcttgggatgacagtatctcctctctttggtggcttttggcttgcacaatggtaataaggttcagagcttttcatgtgggaggttcagtgtatgcagctgatgaagaagctcttcttttgtgcagagcatatttatagtttacctgtggcctgtctgtctgtcctccatggaaagataaagcgtcaccttaatcattgcatcccattattattattgcacactacagattcttgtgtgtgtatatatatatatatatatatatgtgtgtgtgtgtgtgctgtgtgagaggatttgaagccattgcagttcttgaccttggcagagtggacgttcagaaaactattgaattcaaggtcagatagatagatagcacaaaaggtgaatcaattggagcatggcaacagcaagcatactaaaagggagcaggtctgcttgacccagattgaggccatggcaaaatctatccaatgccaataaaagttgtcatgcaatgcaatgcaagggatgtttatggccatggtggtggtggtggtggtggtggtggttgttgttgcagcagaagcaagcagcagcccagcatgtgagctgagtggccaaggcataaatgttgatgagaggagaagatgtgtgagaaagagagccaatattgccaagggggttaccctacccctcttgtgaacccctaaactaaagagttgagaaaagtagatggggttgcacattgcacacctgtcctacttaatgcagatcaccatccacctgtgagtgtgtgtgtaatgcatcaatccacgtttgtttatcatttcatcctctctgatgatcagatgattcttcactcagtcacatctatgctttggggtcacaggttaatcaacggatgatggcacaccacacactacctagctaccactcctacttggtactcccattggatcaaatcaccgccacattgtttcatcttttcctcctctgatttgatctgcacttccaactcaaacctaactgagtttgtacttggtgaaccctctgatgagcctgcaaccaccactacaccccatgcctactgcctgctggactcagatgtcacatggcacaaaaaccatagaattgaactgaattattaacctcacatgtttcccttttcacacacttgtcaattgtgagctttgtatgtatgttcaaacatgagtaaataacatggttgtgctgaagatgaagctagggggtcaaatgttgcattgtgtctcaagatcccaaaacaagaattgttatagttatcctttatggcagtaagtactactagtaagtactagtaactaagcttagatttggtctgaagagatgtgccaaggaccaacaaggagagggagtaaagcatccaatggaacagttaaattggatgctattggctcacttaacacccccacaattaaatcttggcatgtgcagtaaaaattgtttgaccgtactgctgtttgtggcaatggtaacttggcaggataggagaagataaaaaggagattagactggatagatcttgcttaggactagtagtagtactggctagtccaggaagagtgattggtctatgttagatcgggattcagtagttattgattgggaattatatattgtcctcatggaccaagccagccagagtaatattttttttccttcctttttttgttcagagtccttgccctaggatatggttggtttgtagtaggatgcaagcaatgtaggtcagttcaaatttaagaaaatggatgaggctatctctttaggtgtcctttgggtgtcagatttcctgaagtttttgcgggaatttaaataattcatctgaaaattctgtaaaatttaactactccgtagtgtccaatccccaagcagtcaagcaacagcttactgtatttatttgtggatatttatgtatttgattatgtaaccttctttttgctaatcctaagtagtattaaccaattacaaaccttctgaaatagaatatttgattacttggattgtgtataaagaaatattatgttgaatcctttaattgcagaccttgtgtttgtgaagtcaagtatttttaagaagtccagtgtcatgaaaagaagttcagatcacactgttctggttcaattttgttctatgttgagggcttcttctttctttgtggtgttatgagatgcaggcaagcaaagctttaatgctgtcagagtgaaaactgaaactactaaagcatagtaggaacaaaaggattataacaagcataagatgacacagcattaggtgaggccagggtacataattttcattgtaccatgatccaaattcatagtgcttttattgtctcctctccttcgatctgaagccttgtaagtacacaattatatgcacagggagatagaaaacatacatgcatgttgcattagtccgcagacagctacaattacttcacttccctgacccaatctaaccatccttgcattgacaccccccgttgtgcaggtgcagcatctatttgctcttgatgatagttgccactaaactgtactataatgtgctcagggcaaagaaaaagaaaaaaaggctgcagccttttcattaaaaagacacaccccaattgcaaccttttcaggtagctagagagcatctcacagatccatgatggcaagcaaaatatggctttctgcataggttgttctcctgtggtttttgaggcagaaaaaaaaaagagagaaggagagatgcatccatccaatccacatgagccccaaccaccaagagttaaaggctttgctcatggcaactactgccttgatctcttctccttgacatgtactaccatgtaatggggtttgtgacaaagttgggagtagcctcaaaccagtcacaggcaccctgggttggctgggttctcaacatctgattgaaggtggtcacacagcagaaccgggcctgacaagtccttttcccttctaccatatgcatcctctttgtactctcaagactgtccccaagaaatattctcttcatcttgagattttatcccccactttaagccctcaacaaggtagttcccgttttttatatttctagaatttttttaaagaaagttttgttgataatttatagtatttgttacaaaattcaagtgctacattattttggaacatttacaagggcgtattggcattttctatttgattagctaagttagccgaggctaatgaccaaattaatttcagttagtaagaataatcgacgaatttctgaacgaaatattcattatcgattatttcggtatcagttagttcggttaggtttttcggtttcggccatttttctcatgcatagttggattggatggtgaattagtgagtgttgtttttctttttctttgagccgatggtgactggtgagtgagtggtgttggcaacagcagaggcatttgcctgcctcaaaccagagatgccaacgttttgcagcggaagggaacaaaaaagcccacgaaaagcccatgtgtactcgtctcgccaaaagcccacagagtggggcctacttgcaaaatcgttccttttatgccctctctacctggctccgtgcttcaaacaaaagcaggtaatagctctgaattattcatgtgcggcaattgagaaataaatgtatactgtaccggtgcattggacatggttagctgatctctccgtaccaagcgtaataaaaacacacaagcacttccctgcatctataatttgacctaccacacaatttgttacacttagcatccatgcaattctctttttgtccgactcttaacaaaaaagataaacactacgcgagatgttatgttacttgtgtggttctagtggctaacaaaaggtaatcacatatgacaaaaagatcgatgagctagagttcaccatatcgaacaggtgtaattaatcttctcccccgcgcgctaacacgtacgggtgaaaaagaggaggccgggtaagtagctatagacagcagacacaggtgagtcccacatgttccgtagccgccgcacaatatctggcctcctacctctgcctccgcctccatacgcacggccgccgcgcgcacaggggattttcgcggatcgcgcgcggcgcgtagcggcgtgcgtgttagcgtacgtaggtgaggccgtgagagagtgagctgtgagcggccgcgcgacgcgacgctttggcgcgcgcgggcgcggcggcggacgtacgtgcgacgtcgcgtacgtcgtcgtgactcacacagaccaccatgcgcgcgcgcgcgcgcgcggggcttcgctcgacgaccagccggggccggtcggcaggcggcggagacccccaccgtgcgcgtgagctggctgcacacgccgtttatgcatggtgttttatagtatttggttggagagatgtgatagatcggattggaatgaatctatcttttgaaagtttggtttcggaatatggttagaatggcattatttttgaaaataaatgttatctctagatctgagtcaattccataaaaaaaattaaacgactaatccaactcacctcctttatctcactgatatatgggctacacataattctcatttattaaagaaaaaattaagactatacaatccctctcattttaaaaaagaaaggatcatttcgtctcaaatatcaaatagaagtaagtagatagaatcattccaactgatggacctaatccattttatttcatttctaaacctaacacatattacgttctcatcctctatctttcagactttcactagtctgtcgtcacccatgatgagaactaatcccaggagagtgggaagagagagagagatggctggagagatcgatgagcagaagcgatgcaaatgcaagcagagcatccaatagatttgaacagaggagagggggacctgtctctcctcattggattccccctctctctctgcagccacacacaatgtcacaatgccactatccatttcttcctcgcatcgatattccattgttcccatctctgccgtcgttgatcgtctgctcgatcgctacttcatcatgtacacatccaacattacgtgcatatacacacatggtaataaatcctcggatcagattttgccatggatgaatttaatctgtccccctcagcaaatcaataccgtagcatagtatgcagtgatcactatctcaaaacgatatagagggatcactatgctgcgttcgttcgtgagatagggtgagaaaacacctcgttttccttgcgcacgctttctaaactactaaaacggtgtgtgttttacaaaaaattttctataggaaagttgttttaaaaaatcatattaatttttttaaaaatttaaaatagttaatactcaattaattatatgctaatgacttatattattttgcgtatctttccaatcttcctcattagatagattatgcatgacgcggcgtgagggagctatagctcgtggtccagatgttgggagccagcctgctgttattacggtcatacgacgccaccactatgtgtccaaaatctataggccggcgcgccttcccaggtaggtacgttcgcgtacgtacgcgatttactcactcacgtactgcgcgcagcagtgtgcatactgcgtacctctcgatcgatcgatcgatcgatacatcggtcggaccacacaaatatgtacagcatccgggaatgattaaagactagtagtaggctaaggctgtctttagatctttccaaaagttttgacgtatcccatcggatatacggacaaacatttgaagtattaaatatagactaataacaaaacaaattacagattccacctataaattgcaagacgaatttattaagcctaattaatccgtcattagtaaagttttactatagcacaacactgtcagatcatgcagcaattagacgttaaagattcgtctcgcatttacacacaatctgtgtaattagttttttttcctatatttaatatttcatgcatgtgtccaaacattagatgcgacagggtgaaaaatattgccaggggatctaaacatgccctaaatcagttttactttatccgtcccatgaaagacgaacctaataccaaatacaacatatctcagtactatcaatctgaacagttagttatattatattatgaacaatgtttcttgttagtttttatgttatattatgaataatgtttctttttagtttttatgggactcacggagtgttctatttgttccaaaatactgtacgaatctagaattggatgagacatttcaactttttcggatttgtagtataaaaaatatcacatctgattctaggttcttactacctccgtcccaaaataagtgcagccatggttttcagcgctcaactttgaccattcgtcttattttaattttttttgaaaaaaattaaagacataagtcacgagtaaagtactatccatgttttatcatcttataacaacaaaaatgctaattataaaaattttttaaataaaacaaacgatcaaagttgggcgcggaaactcatggctgcacttattttgggacgaaagtagtatattgttgtagcaggtacttataacagtttcaacgtctcgtcgtgcagttggatcgatcgatcgatcgcatcatggtccggcagccagtgaaggagtagctaaaagtagagtaggcgaatggtggcgcaacaacaatgcgctacagtggctaagccgttgaagtccgaacgttgcacagtgtttctctgtacccggggatcgatcccatgtatgattggcaagtagtactagtacatattggaccaaccatggtggctagctctgtaggtacgtgccaacttatacacatatacatgtatgtatatagaggtcggatcaataaaaaaaatattatctaaaagacttgtatgtgtatacgtatacatatacatgtagcgcattggttctcaccgagaagaagtagaagaaagatgatgattctaaaattcattgttctcgaccgacaactgcagcgtgatcgctcaatcatgcgtgcactgcgagtaactttcttgtgacgagcgagctggtactgatggattgatgagccacctccactgttccgctgcccaatcatggccaggccaaagatcacggcgagacagccagtataaaatatgcatgcacacctctttttttcaagaagagaaatcttcttgcgaatggaaatagacagtactacctagacacggtggcataataatatgggccttgtagtttgctgcccaaaccaaagttctctttttaagattatggttcagatgagggattgtggtcaatggttgagattaggaagcagatgaggaaaaattaaataagaaatagctggttgaagggcctatccattttagaggaacttcagcacataggaatagaaatacatgcacacttcaattcataggaatttttccataaagtttgtgtagatggaaaatttccttttgttttctctttgtaacttgtagggaagaaaatttttttttggttttcctatatctacattcgtatgaaccaaatgacattcatacgaattattccttaggaatctaaattctttgaaattcctctaaaacaaataggcctcaaatgagaaagtaggcggtgatactcttatatctctactacttaaaaaatttaacatgtttccgtcgtccgtcaacataaaaaaaacagcgaaaaaacaactaaaaaaatccgattccctagcgaaaaaaaaagatccgattcccacctaaaacaggaaaaaaagtccgatacctggcgaaaaaaaagaaacgtagatggaaaaaatatatctgattcccacctaaacggaaaaaaaatccgtttcctggcaaaaaaaaaagagaaaacaaatgtagatccgattcccacaacgggaaaaaaaagtccgattcctacaaagcgaaaaacaaaaaaaatccgcaaaaaataaaaaaaaccaaaaaacatatagaaaggtcagactctataagagagtggcaaaaaaaacgttcgtaaaaaaacgcacgaggaaaaaataaaaagggcggaaaaaagcgcggcaaaaaaaagtctaatttctattcgcagttttagtagtccatatatatctcttatctatctctaatttaatctaatctaactatttaaaagaagtttccatcatatattaaaaaagaaaaatgtacgagaaaataaaaatggtttaaaaaatgaaatgttagaaaaaagcgcaaaagaaaacgcgctagagaaaaaggtttccgtagtcaaaaaaacatatgagaaaatatttccatcgtctgaaaaaaaagaaaaaaaacatacgaggaaaaaactgtcagaaaaaaagctaaattgatggatgcttggtcatataggatcatcgattttttccatctcctacactgctttttgtttcgtcatctattctcctgtattggagaccctgcacatctctgtaggcaattatcagactatttttatgaagaatagctactattcttgataacatattatataaaaataatattagaaaataaacataatttaattgttatttagagaatagtgcacagtttatgactctattttatgtagacttgaccatgcgaggcagtctagaatttgattggttgcaagaatgagtttaaaagaatattttagattatatgcatgttgtcatatgaacaatccaattactttaagtaaagcaaatatgaataatccaattattttagataaagcagacatcggtaaggttgccatcatcgaggttgggccattacatttaagatgttctaattttttgtttgtcatcgacatggttatacatgtaaaacgtatgttatcattagttttttcacccgttacaacacacggacatgtttgctagttcttaaagaaattttaagctctagatgttcatacatttatgtggagtaccaaattttggcagtgttgtgatcaatgcgcttgatttgaagtcttgccatatttctataatatttgagtgaaaacttccggaactacttttttttagagcagcaatatttatatatgtatattcaggttgtcacttaccaaattttttcgtttcaaataattttatagggttcaaaatgatagcaaaccaaacaagatattcatccgttctcaaactacgcaatattagtattcttgggaaactaattccaagtaaatcaatgtgtttttggcccagcaagtgcttattaggagacgaatccaaacaattcaaagtttagaatttgaccaatgacatgacaaaaaggaatctttcatccctacctaaacaaacttatatatatttatctaatgatgaggtggttaattacaaagtactaccacatcgtttagagatcagcagaaaaccattaaccgagattcgttgtactgcacaaggaaacactacacctatagtcctatccataggtactccctttatctcacaaaaataaatctacgtgaggatatgataaaagattgtccagattcattgtcttacataaaatcacatttgcactagactttttttttatagagaaaatccatgcatatgcatgcgtgtgcgttgcctttacttttttcatccgttaccccccaccatgaatgtgatcacatgcacggcacgccatgatccatccatccatccgctttgcaccctatctcgcagtattcccccgatcaggaggctacccatgccggttgctcgcggcctatcccgccgcgccttgccctccccggctacaagagccaccatatcacaatcaatgcgtagtcgccttcgccttgcagtttggaggggtcgcacgggctcgtgtgtagcaaacgatgcgcccatcttttagccacccccaggctaccgatcgagcaagagggtagtgaaagcaagtttaataatagtatagtcaactactagctccaattcatctatagctaatctaataactcattcatactatagttacatactacactattaatatatggtctcatctgtcatacacactgcgctttaaagtccgtgctatagctggctacaaatttgtagcccgctgcttttatctcttctcacttatctctttaaaatatgtctgcagctggcttatagcctgctattgtacctgctctgagggtgaggccatcatgggatgggaggacacatagggcatgatggagatgggagcacgccggccggatggatgttgaccccgagcatgcatatggttggatggagcgaccgtcacagtggagtttgaaggccagccagccagctcccagctgctcgctaagtcgctagtgtgtgtgcattctgatgtggctgaaatgtttcacatggttcatcgatggacggatgctccgtgatatcaagtccatggaccaagtaaaaacataatggttggctacagtcgggtatagctcctgtttggggatcttctacttctggtagatgcaacaactcaaaatctcaggctctcccaaacaattcagatcataactcttgattctccaactcaatagttattacaggaactatggcttgttcgatttggaggaaaaccaaaggatttgaattcataaggattaatctctatgtgtagaaaaccaaagaaaatcctcccctttgtcccttgaaaaaaaaggagaaaatatccccttccaacaagttgtaaaagagagaacaaaattttccatccattcaaatctcttggaaaattcctatggattaaagtgtacatgcatttctattcctccatttatcatgttcctatgagttaaaattccaccaaaccgaataagcccttagaaaataaactagtacccagaattctaaattctcatctagttgtatatttattaactacttaaaatctctagcttccaaaacaaagctagtctgtctacacgagaagagtgttttagcactaacatgggcacttgacaccaagaagaataagctatggaaaactaatggtcaaggtggtgacctgacccaaaaaaaagaaatgcacgttcaccctcaacaactttaatcacaattcacagaagacacgggtttctatcgacaacggttactgttgtgttgatgggcctatacttctggactacacaacatggggccttcacagaataaatgaattacatgtaggggaggggagtatctgagtaaatcgccttgggtccatttgcacgaggcccattaaacctggtggagtggtggcacattctgggcattcaaaacatcccaacaaacatgttgactgtattcatgaactctacaatctacagccgtctgaacaaatatattatacacaaatagaatttctcctgtttcgcctgtccaactaggaccaagtgtggaagaagacatcctgactcctgagaaagggaacattctgtaacctctggaaggctctgaagcagcttcatttgggggcctcagtctcagaccatccagtttgcaaaactgacatgtaaatacactactgccgcaagcaggttgggaagaaaaaaggcatgatgctcaccatataggaacttcaacatttgcaaaacgaagatagagggccctcaattgctacagtaaatctagaataggtggctgctctgatgaaacattggaatgaggagtacgtgatgctcgtgaaagtgccgattgcccttgatttctaccacgccctcttccaacagaagcagatggaggaggagcaagcctgggtggaccctgtgttgtgctgcttgacaatgaccctgtactccgtcctccaattggatttccaaatccaagagctgagttgccctgattcaagtaattgcctgttgagttcacggccattaaattagtagtgttcggtttcgctgaccagctcatttggttggttttcatttgtcccagagaaccactgttgccactgaacccaatatttcctgtacttagtccagaaatactttggcttgtgcttgacaggtgtccaacagctaaaatgctggcaccactgcttgcttttgggggccagtcggcaaaaggatcaatatcagcaagaccatcactagatagccctccagatttactttgctcactaacagataatggtgcattaaagtcagacgatgtgttttttctaggaggccactcaatgtcaacaggaacacatgaaccagaagtttggggtccagagcttggtgcaagagattgcagtgatggaagtgatggtgcaggcgaaattgtagctggtgtcacttgcgggattgcagatgatggcttaggttgttgagtactgaaatcaaaaggaagtgccgagggttgctttgtttgagtgctgaaatcaaaagggtctgatggttgcttcatccgtgcattggaatcagatgactgtgatggagtgcttgctttcttagtagggccccagtcctcatcccatgcagcaccctttgcagtttgtatctgttcagtttgtcccacacctcgtgacaatggctcagaatgaatcccattagccaatgagggtgatacttttacctctgtattcccattatctgtaacagtcacaccacgcttctcctcaatcttgctgtagaagtaggcactaatttagttggcatattgattaacgcatcgcaagtgtggtgggacaaaaggtaccttgtgatatccttgacaaatagtatgtacttagcaaattgctgtacattcagttgatgtgctgtgagcagtgggaagacgagaggaatcacgtactccgcagcaaactcaacaccacactggatcattggcaaatgagtaaaataagatatcttttacaaggaaaaatcaattggcataaaaaataattgttcatgatttagcaatactgaaacaaactatatcaagaacaaacctgtttaaaaattgcattagccactccaagggtgcacataagtgttggtgcggtgtggtcaacagctgtacaacgccgaagagtttgcaagatctccagtatgccttctttatccaaagatggaacaagatcccctaaacagcgcaaggcatttacacgcacctatattttcaagtcacaattcaaaatcaagatcagaacaaagaaacataaaacacaaaataatataaggtacagaaggctgccttcctggtaattaggcgggattataatagggggtgataaaatacagaagaattatataatagcactatagtgacactaacatctaagatcttaacactcttgatcaataacaagctataggatggagtagctacatagaaaaaccatacactcaacatctcatggctcttatatttctgtttatttattttatgtgcaaacgagacaggagttttcccttttaattattcttttttaaaaaaaaagttgtttcatcatacatgctatttgtgtgttttaatgtgtattaatatggtacaatctgacacataaagtacccaaattataaaactaaaacatgtattatgcataccgcagcaactgtagtctttaaggctaatccatgtacgcgtggcagaacagactgtttcagtagctgcaagaagaaatcactgagtgagtacaaaaatggttcatgtggaattgttgattcttttgtcattgtgaagttaatttgtcaagtgagcccttactcaacgagaggcaaagatagtggctttctcaattgtgatggagaaaatgaagctacagtatatagtttatcctcattttaagaatatatttcaatgctaaccttcacgtcaagctgacgagacaatggcactgtccgtcgcagtacttcttcctgtagtcggggatcagtgtcatcataagcccgtaccagcataggaaggacatgtgatatcaaatgctcttgtgtggcctgaaaagagaagcatggtaaagaaattgattaggtcatctggccatggaaaattccagtaattacaactattgtgttggtaccattgtgaatttagattataattgcatttactatagagataaaaagagcaaaaacaaaaacaatgaatcagtgcagtatttataaaagtaacttagttaccttgtgaataataagatccgcatgcttcacgagcaaaagaagtgtttcacctgacgctgaagtaaataccggaacaagggccggcagtgttgaaagctcaaaatcacctttgtcctgccagagagcagagaacaaattttcagaaaaaaaaattatagcatttgcatcataaagaaacattaccatataacatagctttaaatgtatttcactttacaaactctatgaactcacgaaattgaagcataacaaacaaataacaatgttcgagtgttagtactgtggatgactctgtgttgcagcaagaatgatacaaccacattaaattggacttactccagtcaaaagcaagttcagatgaaaaacagtcaaataaaatatgatacttcacattatgcaaagtggtattacagaaccatggtatcatcccattagttaacaatcagtgagataagttcttactatcattgaacaaagaatataattcataaaatatttaagaaaaaggtattcgtaaaacacaaggaacatgacctgagattccgctattgttagaaccatgggcaaaatcattggctgcatgaccatgttgcgtaactcagcacagagaggtggaagaacctggttgcaaacagagtcagcttacagatagtcaatatattaagtaacattgtgaatcagcattttttttccttccgatagaaagaattcgcatgcacacatatgcaaacataagtaagttgcgcaaattcaatacattaatagaaaatccaagaaatgccattgacaagcactcaatttcaagaaatgtcatcaagtacaagttccatgaaatgccatcatacaagcaactttgtcccaaaaatgccattgccgttagggttccattagcagccctccgttaagtgctaaggatgaacagtgcacttaacggcgcgggattgggggaaccctaacagcgatggtatttctgagataaaatcgtttgtacgatggcattttatggaactcgcactcattgatggaatttcttggatttgggtgtttgtcaatggcatttcttggatttttctcattgattcattgaatcaaaactgtagataaggacaaaaaaggaaagtgataatgctaatagaaggatcaacaaaagtgattcctctctaaaagcaaacaggaggcgtgattcacctatgtaataaaggaatggaagttagaacattgaggtgtgtatatgttatctttttattttcaatattacaaccaatagttctcagtgtctcaacatttttttttttggcaaaataactagaacacactgaaattttgctatgtgatcttgataagctcaatagcacaaagaattgggcaatgatattgaattgaaaatttaagatggacttcctgttaattttatgagtatagtatagctgtcgatgcaaaaatacttatcagacaactgggaataagtaacatggaataattagataattagcaggttctaacatcttctatgaagcagcacacaaaccaagaaaatgtggccataatttcataagaccacacttgatatgaaaagtggagataatggattgctcatactttataccgaagaactcgggaatcgaagtccttccacatatccgataatgccttcagaaactccgtcttctgcatattgtctctctcctgaagacgatattggatcaagattataaccatttctaggtaacaaattagtatgttgtctgtttagacaaacaacagtcaagcagataaagctcctagttctgtcttcccacgtacaattgaaacttaagccaggcaaacgagattctcagatagaaaataagcaagctatgatatgcatatatatgaaacaagcaactaacttatctgtgaaaagaaactggagtaatagacacatacaagcaaatggtcaaggaaacgaagagcacgcaaccgcgtatcattccggaagaaggaagagcctatcagacagaaggtgcaacatttcaaaagaatttcatgtaagtataggtaacctggtgatctccaatcaaatagaacatccaaaaactccattctggaagatcttatgcccaagataaagaaatgataagtgataatttacctgtgaacgccatagcactagggcgtgatgctacatcaactgatagcatcctttgcaaatccaccactaaatcagcaggaatattagaaaaggcttcacttgttaaatacgtcaaggaattcatatactgcaaaacaaaatgaaacatcaacacatctttaaaaatgctaacattgcagcagatgcaaccttaattccttaacagatggtttgtttgcataccaaagggaaactacatacatgtaccaacagcagttcagagatcaggtaattaaaattcaaaaaaaaaagcattaagaataggtaaaatgtcaaaatccagattcaagacataccattttcacattgttatggcaatccagaagtggtctacgagcaaccaggtgataagctagacatccaaaactaaatatgtcacaagccgagccaactttagaatctccacttcggaccaattctggtgcagtataattcagagatggttgaagaggtaaagctgtatcctcaacatcatagtcctttagagggaccaaacagacaaatagattatgattcaaattgtgaaaatgacacaatgatgggtattagaaagcaggttccacaaacagctaattacattgacaaacagtgttagcaaaaataattacaggggaagccaagttgtaaataatgtttacttgttcactgctaagtacttaagtaggaaatgatttgtgccattataaagaaaagcacttccattgaatgtggaaataactcagataacagtagctgtacatgcttgatgagttaaacaaaaaagagcaagaagaattatgtgctttatcatggagtgcaatcaggtcagctaagagaatctttatcaattatagtagaaatatttatgctattgctccaattagttagtgtatccaaaatggtaaaacaaatacacagcttaaaagctatcacataatgcacaactaagcataaattacttactaaccgaatagtggaattgctgtgttgatgtcaaactgcctgtggcttggtcaacagaaagagcaaaaccaaacccaccaagtttccaagatccattcaaagttataaagaccgtctgcaaaagaaatcaaattattacaacgacagaacataagacttgcagatgaagaccaaataggctaaatgcattatgcaagagcaggggaaatcacagattcaaaaattaactagtatatgcatgatcattggcaggcagtgttagattatgtgttcccgcaacaccagttcgtgcagcagattcttttgaactcatttcatgcatagttaagtgcgcaaaaaacagcatgataaaattgagcggctagcctagatcacagcatgatatgaatggacttggctaagcattcatcagagacaactccaaggcaaagaacattatattgttgtactagaaaacttgagaaactaactaaagtaaataaaacaggtaaaatgaaaaaggattctaacagatttatgacaaagcacatccataacatgaaacattcgtgcagaaactatgagttgaagaatgtgctgcattcaacctcgggtgatatagctcgatgggcaagatgggcattgttatgaagaaagtctagtgtctctgagacttgtagcaacccgtgtttaacctccagtagccccatttcctgaaacataacaataaacaagcaaatctcagtacagctgaaacacatcgtcatgctttatagaacccacggcactttttgtaaatgaatgtattctaagtaccacgtaacaatttatatgccttcccaggaaacttggcagatttcagacagattgattgcattagaaagttaactgcaaagaaagctcgctgcaaatgtttataagtaccaatgatcccatttaatgaattttctggatatggcactgcaaagtgttgcatacaaaagacaaagccttatgtcaattttcagctcaaattatgttctaacgcacaaatctagataatgttactaaatatatcccaactcacaaatggtacagttgccagtttaccactgtcagtaacactaatcacttcaacatgttaattagaaggaacttttgagctagcaaacatcccatgcccaaaataaaccaaatcacagatcttgtggactctagagcggctaattactagcaatcgccaaagtggacatctaggcacacggaaacctaacaaaaaataagcgaggcagcatcgctccgtaccatgcccttgagctccttgggcaccttgccgacgttgtcgaggcagccgagcgcgttggcgacggacgcgaacaccggctcggtggccatggccatggcggccttggtctcgtccagcgcctggacgacgtggagcaccccggggtgccggaggcgcacgagccgcgcggcgtcggcgcgggcgaggtcgaggaaggcgtcctcggcggccttggtgagccccgcccgcgcccgcgcctcggcgagcgcccgcttgtcgagcacccagacggagaccaccgggtagggcgcggacggcgccccctcccgcggccgcgccgtgtagatccgccatgcgaggccggggccccccgacccggcctgctcgagcagctcgaagtcctgcagcggccgcggccccgtcacctcctgcaccgtcgtcgtcaccgtcttctcgatcaccgccgacgccttcgccagcgcctgcgtcagcgtcttcatgttcagcgccatctccccccttccccctccgcctccgcctccgccgccgccgcagccgccgccggcgagatctgggagccccccgctgcttacgtcggcggaggaggggtccttcgatcggtcggtcggtggctgcgtgtgtttggtgatttttacgggtttttgtttcttaatttttccacctaattttcatgattttttttctctcattctcgcgtgactccgagacagcgaggaggatgcttcgtggcgaaagggttggattggggaaattttggttcgatctgggccgtccgttctgtctggcggatgggatggacgggtaggattcgtcgattcggtggggaacgggaggaagttggtggggtgcgttaacgctttcgctaatcacgttccgattcagtcaacggatttttttaagggggtaattgcgaaattaacaacacggtttttgtgctgtataacctgtgttaccttcaggtatacggttgccagtacagcgagaaggcggataatggtagtacggacctgtttggtataggagttaggtctaatgtggagttgtggagctgcctaaatccagctccacaactctagtttatttcgtgagatagctcaacccagctccactcccagttttggtggagttgaaactatttggctgagctccaactccaggagggttggagctgaagctgtgtcaaacaggtcctacgtaaaccttttctgaaggcgtaaaacactagctcagcttagacgtttagaacttgattcgcggagtggtggtgtttttaaaagccttgttagagggtgtaattaactcattaaacacccaagtttaaggaatgggtgaaggttaaacacctaaactatcagtcaaagtagggcgtcttctttattgctcgaaggtgtttttttcatttggatctgttatgaaacaacagggtgatatcatccatataaaaggatggatcacaaccgaaggcaaccgcgccttccttaggcgctccttggcaacagacgcgatggttcccaaccatcgtgtctccggttgccaccccttccccatctatatattgtaccgcattgatcaataaaggattccgctcattcattccctacattcttgtgcaattctctctctctctcgctcaatccctctcgctcaatcaatcttattcacttttaacatgttattagcactttcgctctcgcgaaggagatcgcgaagtgaaagaaggaagaaacatcgcttttgatctaacagaaaagcgaacagaagaatcaacaaagaaggtacgatgcctacctttcattggattatggatgccgttctcggcctctctcgcaatcagcgcgtccgtcgccttcgccatcttctccgtcgatgggagaggagtcgccgccaccaccacggtcgccaccaacaccatgaacgtcgggctagggctggtgcccgtcgccaccaccctcgccgacgcatcgtggtggccactactccggttgctcctccttcgcctccgtctccgattgccgtcgtgcctcgccgtatctgtgtgcagggggtgcagtactgcgcctaccacggatggacagcagtggtgacactgcccggcgagccatgcgatctttccccggagatggagtcgctgccgccaccaccgaccgctccttcaccacttccaccgacaccaagttgactccaacgccgttcccccattcccgcgtcaccggggtccggcgggaccggtaccctggctgcgcgcacgagggagccgcccttcttcaatccgtcctcgtctcatcgtcatgccggtgaagccgccgctcgccgtcccggcctccaccacaccttcatcgtcgttcctcatggctctcctagccgtacactccctaacggggtgccggggaatggtgtccgggctcggccggcctccgattccgatgaggatcgggagccgtcggcctaatccggccggcaaaccgccggcggacgaagaggtggccgtggcggcagtggatggtggatggcgacagcggtgggtggcggattgtggatgcaggcagtggtggacaacggcggatatggaggcagcaacgccggcgcatcacgcgtcggcgctgcaactgggagatggcggcggcagatggtgcggcggcgacggaggaagggcggcgccaccctcggcactccctcggcggcgtcgttggcgatccacggcggcgtcgttagcggcgaactggcagcggtcggcggcgaaatggcggcggtgggcggcgaaaagggcgggggcgtgagcggcaaaaacggcggcggcggcgaaatcgtgggggcggttagggttaaccctaacacccccggcggctcccccctgccttttgctgtgggccggatgggccggcccaccgccccccttgcctgccggcctagtgccacacggtggt

SEQ ID NO: 9652 - DNA, 33250 bp, Oryza sativa
ctgcagccccttcctgggaagaagcaggaggcagcagcatcaggggttgtgtgggtcagaggagctggccaagcggcgacggattgtctcgaggctcgagtgtcacgtgcacgtggatctggtcaatcaggcaagtttgttggtggttctattctggctcgaggcgagagacagaccgagcaatttacttagctgcaagcagtaaggaattggtagtgcaataattaagctaatgcatggacaatatggatacgtggtagattaattgcatacatgtgtatgtgtatgcatgatggtcaacaggcccaggattggatgcacagcacaaggtgtggcactactaagggatggtcacgtggaaagcaagcaagatgcagtatttgtgcagtggtgtcacaggccattgagcaatgcatggagatcaaagcaagcaacggacttcatcaggggagaattgatatatccatacaatggacgagatggcatgagctaactcggttgcgttggcatggataggagatcatatttacctggagtccagaacttgatgattggtgcaaagcgttggtttggcggcgtggctcacaggcacaagacgggaggcatggtgcagctttgtggtgatcaaggtgatgtggttagtatacggctcgggagaaggtgcgcgaggtgtgcatctatgtcggttaaactggaccggcagggtggtcagaccgacggactggttagactgcggagtttggacggttagaccgggttcaatggacgtgtggtttattgcaagaacttgttaacggatccagaagaaggacaagaaggttctacagatggatagcttacaagtgtgaagggcgagtagactgtcggcaacaggctagtcaggtcacatatggaattatctgacggaaatgtgatatatctgggactcgataaggggttgagatatatggagttatgccagaggtgaagaaaaagtcccgggcaacaacgggtcaaatatcgttgatagggtcgacgatactgtttggcagtacatgatatatccaagatatgcaggttggcatgatggggatatatgaaatctgcgtcactgaagaggaaaagcaagtgctatggtgttaatttcttcaagtgattcaaggcaacggtgaattttctcaaagtattataggttcagtttacggatgcgggaaagcgagaatgttagatttattagatcggttcataagacaacaaggaagaaagggttatcttcaagtctggtgagtttgatttatctatttggtgatgatgcaggttatctgggcatggattagatcaagtcaaatttaagatggaagatggaggtgaacatggtcttcagggagtcaatgatgtgacagctaggaagaaatccaatttcgcttggcaagacgactgagatgataggtgaaaaggtggagcactgttgcaggtggaattaagaggaagaaattacagggatagcggagtctcttgaagacgatgggtctggcgtagactcgtcgggcggcttgcggtgaagctgcaaagaagacaacccaagtctggaggacaggtggatcggtatggtgattctactacttctgggtggcgtatattcgccaaggtggagtttgttaaaataggtgtcaaatatactagtcctatttggttacagttggacttggagttgtaatagatgttagggggtggagttagagtcgtactctgtaacccggtatctctcttaaatagagaggggggcaccacaatgtaactatggcgactacaatgtagcgtagacacgcagggagatgatggcagcgtaccatggactaatagcgactaggtgctatgttggttgcggaggagcacccataatcagagccccggggatgtaggcttcggctgagcctcgttaacaaatatcgtgtgttcttgtgtcgtcatctagcatgtcttgggtgatcaacgactgaagcgatcgggaaggttagtcgtcgtttcactatatcgactaacttttataacaggatgatatattaaaccaagtttagagattttgatgcgcgttttgtaagtttgtgtatctaagtgaaactttgaatccctagtgtgttttactctataaaaaaacacgaagtttttcccgtatcaaatcctagaagggtgcagtagagcagtgatgaatcgatcagacacaagggacggtatgattagagcagtgatgaatcgatcagaccaaagggacggtatgattagatgctgttgacagacacacagtaggagctgaggctgtctctgggccaacatgacatggccctgttcttctacaactgccgcctcaattgaaaaacaagttgcaactaactttgacaaacagccccgaatcttccatctcaaggtctctcaacaggatggctccaatttccagcttgaatttgactagtttactccgccgctcgcataataaatctaaagaatcagcaaccgatctactatgacaaatgcctcgcctaactgcatgcgttatcaggtgaataaactactactaggtgttcttgtaccggccatagctcgtagcttgtggaagagatggacaatgatgcatgtgccaatgagaatgcattctttgaaatgagtgatgtttttctttgacagaatttacaacctatcagttttcaaaaaagaatttgcaacctataataatcaggcaccgaatcgctctgttctgttctgtttttgtgcagagataagcagcacatgagatgctgacaactaaaaataatttccaaataatttgccaatgatgcatgctgacaaacttaatgaggatggtcaagattcttgctcgaaataatttctaaatggagaagttagagaaaaaaatgatactctaaatagagttctgtgcaaatgaggaaaattcagagttaattacctccattgtgctgccattgctgagcatgtctggaaaccagtggccatggccgttgtgccagcttctctgtccatcagcctccgatgccttgctccttgttcttgatctctttgagaactattgcaacgaaaacgaggacgagctcgattagagaaacaaatggatcaggaggattaattagtggaacaaacgatcgcgcgcactcacctccaccgacacgcatcgccggtgagccgagctccggcgagcggcatcttcgtcgtcgggcgagctcagctgccggagcgcgccgacgagcttcctggccgacgccgccgagcgcgtgccgtcgtccgcggcggcggcggcggcgccaccgtggcagcgcctgccgttccacgacgactccgacatcttcctgctcgaccacggcgacaacacgacgccgccgccgccgcccacgcctctccggccgagcaccaccacccctcgcttcttcagcctcagcttcctcagcgggtccgacgcgccggacgacgacagcgcgcaccgcttccggatcttggtcgcgacgaccacctcaccgtctctgtccaccaccaccgcgccgcgcctcagcatcgcggtggccgcctcaacgccgccgccgccgccgccgctcctcctcctcctccttcttggcaagaacaacacgagcagcagcaacaatgtgagctcttgtatggacagtcacagtggcgacagtgacgacacatcaaaagaatcgctacttcttggatttgcattgggatttgggaattgcttttggccaacatggacagcagcaagatcgatcaatgatgggtgtttgtgtggaatgggatggaatcagcaacaactgctgcttcgggcacggctttggatgaatcttgcggacatcgaactgatcaaagggagaaagcaaaaggaggaagaagatgggcagctttagtggaaggaataagaagcagcatcaagaatcccagcaaaagcaagcttacgatgtgaccccctcacatctcttcaagaagagaaaacacttaaagaatgagaagcagcatctctcatgatctccattgatacagagaaagatcctcacgattcacaaatctatgggaactgatgcaccaaaatatccttcaaattgttaatcgatcagcacaccaagaactggaggtacagtgttgaaggaaaccgaggatttatacttgtatccggcgaaagatcgctgggtttctttacagtacgaacagagcagagaagatcactgtaggaccacaagttcaaatggggttcaaactgtccaaatcaaggagagggaaagggaggagtaaaaaagggcagccatgaaaacaaatctacatggaatgttgtgctaggaactgcagaagtatacgccagtatgaccaaaacaaacaaacaaatcatacaaaatgcgcagaacaatgccgaattcaacgaaagaagaacaggttacttaaactaactcacccattaaagcccagaagcagagctgcaggagtaatcaagctagatcgccaaactccgctgatcgtcgcagaactagaatcagttcttgcgcgccatgattgggggactcattttttgcagtttgtgatcgagagggcacacgagtgcgtgcgtgctggggttgaagcaaatgagggggacaagatgatgggtgagtatatgggttgtgggggatgtgaaattgacaaattggtgtccctttgctgcagaatgagctgtctgtccgtccgttgcatatgattggagatttgggtatgcagtgttcggttctgtgtgcgtgagagcatatatatgttcttcagttaaagagggagaggagaggatcacaaaattccaaattggacagatgcttgaggcggcttaatcaggtttgggagatcaatcagagatgaaaattttcgttgcatactttaagggtgggtacaactgtacatattcaatggacgtcagattgctaacgactggatatcagatagtcagcaattataacgtcagatgtggttaaattttctccctcagtttgtacaccgaaagcaatagtttgcccgcgggaaagattttgcttaagtgtgtgttaaagaacgagtgtttagcgtgtacgtgacagtttaattcttttttttttcgtttatattagctgacgcactagcaaagaatgagtatttatgcatccaaataggcagacgtataggttcaggctaaatggcactgataaaatggggtaacagcgttgaaaacacggggggcttgatcattgcttccctaacaatccaaactaggagctcttgtagggtggtaaactagtaatctagtctatataacttaggagagtataggagttggtttctaggtgattcggccaatgtagcagacgacaaccagccacagccagcctaattacctaacctttgagacgatcgacggccggccaagttgagccatccgacattagcagcttcgttaatcctcaggcaccaccaggaacaaactaaacaacccaaaaaaacatagtagtactagccggcgacgcaacgcacatggggaagaagttgttgtttttttttttttttttggaaagaaggaaggataggaggagcagcgagatcaggccggcatgtggtcgcagatctcaaggagatcggagaaaactccccccacaaaagcagagtagagcagagcaagacattcaccgagcaccacacagcccacctcgatggacctcgatcgagtcgtgctcgccacgcgcgcccgcgctcgctcaaccgatcgagagcagcggaagccagccgcctcggcgaacgcggacgcggacgcgggcgctgctgccgcgcgcgacatgccgatcgacgtcgcgcacgtcggggggagcgggaggaccagcggcgccgcggggggcatggcggcatggggtgatgtgggggtggaaggttcagctcagatcgtagcactgtagcagcttgtggcagggttgccgcgtgcatggcacttggcagcatggctgcatggacggatggatggatgcagacaaacagtaggcgggcgcgtgtacccgcgacatgggtgggacggggccgactagcgcgcgggtgcgggctgcggagtggtgtgcgtacgcgtacgcggcagcgcggcgtgtaatgtaacgcctccgtcacaacatggcaacgtgcacggtcgaccatatcatatcgctccacaaatctgtaattatgtatcgtctcccgctgcgctctgacacgatgatctccggtcttaaaaaaaaagaggggaaagagattaagtttagttttcttttgtgctgggctgtggtacgtgctgttgggctgggctagagagtaaagagaggttgggacgtgtcacgctgccatgtgccaagttttggggttcagtgagcccggtcagctagcaggtcgacacctatttgtttgatgagtagacaagttgtgcccaaacctaggattattctaacgagtagcgaaggaattaacaggagtattaaaataccatatttgcattattcacatacatggggtgactactgcgcgcatacgcgccaactaaattgctggcgcgcacgtcagctgccccaccccagccctcccttatcttttttttttctttttgcaccttttttccgattttggtctctccggatgcgtttttctttttctttttcgccgtttcttttccgatttttttcaatctttcgcacacctctttacaaatatataactcaaagtttttaattttgatttgaaatttttcaaatttgagttgagttgaaagtttttaaattttaagttaaaagttttataatttgactcgaaagttttcaaatctgagttgaaagttttaaatttgagttgaaagttttcaaatctgagttgaaagttttaaattcgagttgaaagtttttaaattctggtcaaaagatttgaatattcgagttgaaattttttcaaatttaggtcgaaaggtttcaaattcgggttgaatttttttaaaatttgagatgaaagctttcaaaatttaacttaaaagttcaaaattcgacttaaaagttttcaaaatttacattgaaagttgtagattttcaatttttttgtgctgagaaaaaaaagaaaggttagcttaatataccataattatcgataactaattacgtatacgattttttttcttcaagtcctgcaaggaaaaaaaattcgagtcctgcgcagttcgttgcggaaaaaaagaaaaaggaggttgtagctagtgggccgcgcacgagaatatgggccgaaaacactcgcgacttagctagctggcgcgtctgcgcgcgataggaatctcgcatacatgggcacaagatctggttgttggtaattaacctggtccaagaagaacaactggtgacaaatatgtggaaatatggtcaatatggaatgcgacgaattctatacgccatcgagaaattctgaagagtatcaccgcgaccgttcaatggacatcatttggagattaatgtcatggagagaatgttgcagaaaatggaactataaacttctaactcataataacgctgtaaagattaatgtcgatggtgcctttgtcgaagatggtcattttggagcttcattacggccattagagatgatcggggcatgttcagaatatataacaaatggctgctagtatcgtctgctattgctgaggctatagcagtttgagatggtgttcatatggcatgcgagcatgggtttgacaaggtgatctattgaattttttttctcattcccatcggacagacgtatattcagcatatgttcattcctgggtgaagtatagaacttgtttaattgtttcgatattgattacagttgctactcttgcaaatatatggcagcacacaaatgtgtgctgaatatgtattcggggctagagtctagatatgggcgctggtagcaacaaacaacgaatgtgtgattgtctagtctaagatcctacttaattcgactgagaatgaagctcctaattccaaaaagaaagaaagaaaaaactatgattactcacatataaccaggggcggatccagaaacaaaaaattggaggcttgattatacagtttcttcaacctccagccatctagggacctttagtttattattcatggtgaaaaaattgaaggggtgctccgggggacatccatgggtcttgtgggcacccacgttggatccgcccctgcatataactgtgagggaaactaattgatgaatgctcacgagtgaccaaggtagcaaacatcttatctcatatatttaggcttcgttcgtaacggccagagtttggcatgtaaaacgagacaaatattagtgtattaattaattatacaccggaaagatggctttatttggtttttattcaaaaaacttctatatagaaattctttcagtaaaacgcaatgcttagctgtttggggagtgtgctcacggaaaacgatggaagtagcccagtcaagaatctgatctaaacgtaggcttagtctttatcccatccattggatctctagattaatttcccaccattgctgctccgcatcagttccttcaagccaccacgcacctgatgagcgccactccccctccctcctactagcctcaacgccagccgctagtgagccccgccactcctcctacccccatgttcctccttcctagcgagatgtcgataagctcgggaaccccttcttcatctttcccgtcatgtcacttcccctacatattttcatcctccatggaaaggtgccgacaagcttagatccctttttttttctacctctagagacatcaatgtcctcatcttcctcctcgctgatgagccccttgcctcatcccagggacactgacaaatggcatgcacctccttgttccttggatacagacatgatggtgagctccacacaagttatgggtagaaaacttttgaaattttgagtagaagaactttgattcgaaagttcaagggtttgatataaagtttttgagttttgagataatagtcttaggttcttaattagaagtgttgcgaccaaaatgatactctttccattctaaaatataacaatttatagcatttaaaatttgtcctaaagtataacaaattctccacctatattctcttttcaatcaatcacaaccttattccattcaagtcgacatgcttttttaatacccgtgtccaacctattacgtgtattttgagatgaaggtattactccataggcttcctgctttggtccatggaacccgcagccaaatgcctagcttaaataaacgtgctagatattggactagtccatgattagcatgttatacagaagcctagttgcctagtttttgaactcaaaacttaggttttggttttccggaataagtttactttagtctctcaatttgtcatcaagtctgaatttcttccctaaactgaaataacaggtatagtccatcccacaactcacaatatcgtgtcaactttggtctcttggcagtatagtggccagttttggctgacgtggcgagtgggccccacatgtcagggccatctattcttcctccaacctcccctctatctccatatccgattcttctctcttcctttgagtgtgctaggcgatataggagaggaataggagcgacaaggggcgtcggtgctcgagtggacggaaggcctcgacggcagtagtggagggtgttagagctatgagtagggcatggctcacatgagtagggcagcaaccggtaaagggagtacgggagatgaccggaatggcgatggaaagagctcagctctagtacgtagcaaagtggatgttggaaataaacacgtcatggtgtattcctggcgtggttgagtcagtgtgtgtgtgtcgtgctgctgcatgtgtgcgtcgtgtgcgttctgttagtttggttgagtcgtgatcacgagtgcatggctgctgcatggttgtttgcatggccgttgcagtgttgatcgagtcgtgggtgtgcatggtgtgcgtggcgtcggttcttgcggaggaagccgcgtcgtccgggcgagcgtgtggctcacggcgacgtcgagcgggttctgcggaacgtggcgcaatggccggcatggaggctagctcccggtgtgtcaccggtctataagaggcccctgtactccttcgttgtttctttgcaaggttcagtgagtaataaagccaagatacaggagcgatcggctccgcggcgttcgtcgctgtaaaatccattgttcatcgtctccctcaccggcgtttgtgttcgtgagtgtgagagtgttcctgggctgagccaacagtggagtggcggtggtagcttgtgacagtggctataagagaggggagataggaaaattggattcggtgggttgaggcagtgatgtggtgagaggagaaaggaagagggttaccggcagagaagattgcctggcaatagggattggctggacatggcagacagaggagagctcgaagagattgatgcatagtggggagaagggatgtgatgatgatgaaccgcagcagcagcggtgcctacggggaggaaggagcagagaaggttgcttggtcggctaagctgagcgctcgtgctcagctgtgcgttagagctatgcccgtcgttcatgctcgccgccacgtcgtcacttccgccccttcccccaatagcgatggggaatggaggagagagaggggagatggggaatcgctgaatcagagatggggaatggaggagagagaggggatgtaggccgctgcagtagttgtagcaccggagttatcttcgtcgtcaccgccgccgccaccaccaccaaaccagccctgcctccgctggagaagggagagaaggagatggacgcaaagctacggaggtggcacacgcggacggcgaggatgggcctttcgcagctgacacaaaggggacgatggccaccctcgtaaccgccggcggctccaacacggggattcagttcgctgttcgcgtgcttctctgctatgctcaccttgccttgcttgcaacaccgctgcaccaagctacaaccacttgctcgctaccaagttcactttaggagagagaagagttggctgctaatatatggggtccaagtgcgctccccacgtcagccaaaactagtcactgtactgtcaagggatcaaagttaacatggtattgtaagttgggggatgtgttatacctagtattcggttcaggaatgaattttagacttggcgacaaatttgagggaccgaaagtgaacttattcctggttttccttcccgaacgtccttcctgatgcaactctggataacccagggatcaacaacggttgggccaagccaggccaactccataaacagcccaggcccatcactacaacaaccagcccacaactgttcgtatcgctgtcagtctgtcactcacccaaaaacagaaaaactgattggaatgataactgcggctattcccgagctttctcaatttttaccaaagtttatcaaacccaccgaatctcgttgaactttttacccatttagcgtacccatcgattaggtcgataaccacgaaaccggaggaaggttttcgtcggttttggatcaatccttttattgcaaataaaaacgcaaagatgcatgtaatgatgcaggcaccaaccaaaactgttgacaaagcgatcgatcgatcgacaatcgacaggcaccacctgtcgttctcagggacgaaaagaggccgaaaagctcagcggcgaaatcgaccgcgaatctaaacattctctagcggcaaactgagacatgccttgggtgctcccatgtgcaggtgacaaaagaaaattaagagcagagcaggagctttgatcattagctcacatgcatagatcgatcaagcgaggaacatattcatggtaccttccgtggattcatggccccatatatagaattcgcttacaattttgctatatatttgtcgacaaattttctcccaaaaatttgacagatgtaattacagtacaaccgtagtataattacactgtaactataatataacttgtatgtaactttcaaaaatctctccataacatattattttggtaaaataaaggttgtgggaacaatttttttcagatatgtgtgtactgtgatttttttcttcctcaccaaaataaatctttataatagatctaataatttaaaattacgtgaaacttacatacaaattacactgtagttacatgcaagttacagtgtaagtacatacaagttacagtgtaattacactacgattgtattgtaattacatctgtcaaatttttaggagaaaatttatcgacaaatgtataggtggtcccttcgcttaaattaaaagctgcttctaaaccttacaggatgaacactcagaaacagagttagttttctctccgtctctaaaaagagtgaaaatgaagcaacacgaagtttttagacaagagaaatgaaaatggtacgaagtctcacattagctaagggaaaaggaaaacaaaaataggatgtagagtgagacctagcgccaagatctgaatccaagcctaagagtaagatgtagagagagatctagctccacatgcaaaataaagctactctctccgtttcttaataacgggtaattttgactttttcgtttaaattttgataattaattgcccttaaattgttagcccaaagcgaacaaatattttacttgtatttagggcataccctactttaataacatatggtatcatttttatcgtttgtaaatattaaaaataaattgagtgattaaggtttgaaaaaaaatagtgacttagtgtcacttattatgaaacggactaacggaggatactgcaatgtaagtccatctatacacctgagatggaaggaatctagggtggtgtttgaatctcccgaagatgaagatgaagatgaacattaagtgtttcacgtaaaacgaggtggtaataacgtgtgattaattaagttttaattattacaaacttgaaaaatggattaatctgattttttagaacaactttcatatagaaagtttttacacgaaactcactgtttagcggtttaaaaagtgtgccaccaaaatccaaaacttaatccatcctttttcagaggaaacttaatccaaaacttaaacgcacaaggctgactatcatacattaccagtttaaaaaggaatcaaatcctgactgttttagttgccggagggagtatctgacacaaaaaatcaaattgggtaaaaaatcccatgattgccgactccaaaatttcatatcctcatagaaatggagagaaattttatgttttgtcattgataactatctgatcctacaaattgctaaacttaagttatacaaaataccatcttacaaacaccccccctcctcattttgcaagactaataaaaaaatcatttggacaaatgtcatcatactaattgcccaaactatccttaggaatctcataaataattgaatagtagctggcaaaacaactttctatattctacagagtggtcttaacgaaaggtgggggatggtttttttttataaagggtatgtttagattgtagttaaaataaaccttatcaaattttgttggtattgccaaattttagcaagttgataatattgtaaaaattttagcaggattttttaatgtatttactaaagtttggccacaaactaaacgtagacatatttttgacaactatgccaacaaatggtatggttaaaaatggacctaacggctgtgataaaaaaaaggaaaagaacatttgttcaatcgcatttacatttatcgtttacaatttgcagagtcagtcacttgtcgataaaaaagggtaaaatttctcaatttgtagccctgaactttcatcaaacttctgaaaactaaatataaccgttcaccattcaaccatcaactagatttagggtccatttttataatgtgatacttgtgtggtaatgttagtcttaaatacatttcacaaaactacatatattttgataaaacaaatcacaaaactgatttaacaccacatttatcataaaactatatatttaagacattgtatcataaaattacaaatttagtgataaagttaagaagtacagagtttagagtttagaatccatagcactattatttttacaaagttacaaaatatgtagttttatgatacaataacttaaatccgtagtttcgtgaaaattttagtgttaaatctgtagttttgtgatactcatttttcaatctatagttttatgaaactataatagtttgatcaatgcgttgtcttgtttcaaagtttattatggtttgattttagacgaattccaaaggtactaaagtgaacgtcctttatttccaagtcccattatttcgcttattcgtatacttatacgaatctcttattagcaaataaaaaatatttatgagtaaaacctatatatttgtgtccttagcggcttaaaaaatgcaaaaaaaaatcaaattcaaaatcgagttatataacttaaattttgacttataaccataagaaaatgggttaattggattatgccattacaaatttgcctattcagaaaaatgtcattatcatagccgtgtcatttgtattttacaaaattagaaccgtaccacttccatcacattttccatctatccccttccttttccgtcttcttccttctttctcccatcttcttccctccgccgctagctgcgcctttcctcaccagtggctgtcgcctcccctattgcctaggcatagcgacagcgagagctgaacctggtcccggcccaacctcactggctactgccgcctcccctatttcctaggcacaccggcgctgcgttgctgcaagggggtggatgtagacagcgtgaagccggcggaatccactgagggagagcacaacagccccggagctgctgcttggaaaagccaaggtccgcccactcccgtacgcgcatggcctcctagagccgctcgtcctccacgagctaccgccaccaccagctcacacacaccatggccgctagcatccgcacctccgctcatcgtagcacctcaaacaccaggtcctccccaagatcccagaaccctcggttgctcaccctctcctgcatcctccggaggctactcttgctgctgttgttgttgcaatggcggctacaagtaatgggggtgaaaacagggtgggtatttcccgcccgcccgcccggccacattatttcgagacaaattcggatactcaagacttttctcggacatcgggtccgaatgcgggtcttttttggcggatacgagatcgggttcgggaacatcgtatccgacggatacaaattatccagtaaaaaatccgggtattacctggataattatacagatattacccatattatatttttgtgaggcactttttggtactatttattggttctactatgatgtattgtaccatatttattttctaaggtcataatagcctaatacaattgtattatggatatatggaattgttaaatggttattgtctatgtgatatataagattgttgctttgacttgatatccaaataaatattcgtaactgatagtgtacgtatctattttggtacgtattcgttccgtattttggcccgacattacctgagtttgtatctatattcgatactacccatgtccggctctattccgattataaaatatgggttagtatatgggaagggtgagatccgaccgaacctgacctgttttcacccttagcaaggaagaggaggcctcaccctggctcgaattagaggacggatcagtccactgcctcttggctggctcgtcggagccgccatcaccagcaatcggagcacggggctcatcaccgcctgacgaatcagagcaaaacttcatggtgcctgaggagggaagaagatgggagaaagaatgaagaagatggaaaagaaaggagatgtatggaaaacgtgatggcagtggcacagttctaattttgtaaaatttcagtggcacggctatgaataaataaattggaatggtatttttctgaataaaccaaatttgcacgaattcaaataaaccaaatttgtaatggcatggatccaattaaccctaagaaaattagcccttctgcaattaaggaacagcaacacgcaattgtaagatcgaatcaatggtgctcccgacggaatgtatcagaacaggtcttccagaaagatgcatcatccctccccctaagaagaagaagaagatgatgaagatgcatcagaagaagacaattgccagctgatccgcacaaaagcagcagaaaggaggaaggccgggccgccgtcacaagtcggcaaagctcagctcgtacggcaaacaacaaagagagaatacgtaccttcctatctggtacgagtatttcatgccaatcgttaattatctgctagctaaactaaacaatatattagccccttctgacctacctagtactactactacctcccttgcttttgatcatccgtttaggatctcaagttattcactgacaatataataatccattctctttctgttgttttttttaaaaaaatttacggagtaaagacagaagggaaaaagggaaggagcaggatttggcctacattttggtgtgataggtctttgggtgcatggtggcattggtccctcaagaacacagttgcagggcactatgtggactgtaccctaaggcacagccagcaaaatgcagatggtcactctgcactgtctgtctgatgaagggccaattgaaccttagtggcgaaggcttccaaaaagtgtacctgctgagattcccttaggtttggctatgatgagttaatggaataatcaggggtgcactggttctatcatgagaatttgttaatttgaattttgagggagggaactttgctttatttatttttgtgatagataaacttacccaaatcatatagttgtgttctttcagctggaaatggtgttatgttttcttctgtgagggaggtgctcaatgagtttttatccttaaatgacatttctttttggcaaatattgaataagaatacatatcctatataggtaacacctccttatattaaaattagctcaattcaatacattacatgtcactgagtttgtcacaggtttacaatttgcctctgactttatcacactctatgatatgccatcaacttttatttaacttctacatttaccatcgtcgtccggttagtctccgttaatacttacatacccaaatgaccaaaatacccctaggacgaaaactttcaaaatttggacaaaaattccaaaatatcatattataaacataagattgtaaatatccaaaatttggccaaaaattaaaagtatgatatttcagaatttttgtccaaattttggagttttttattcccaagggtattttaatcatttggataaaattataaaatactaatagaggctaaccgggcatcgatggtaatttgtaaaagttaagcaaaagtcgatggctcattgtataacatgacaaagtcgatggtaaattcagatctatgacaaactcaatggcatataatggattctgtcatcaatgtaacaccaattatatgctagggtaactcaatttttcaacatactccctccgtttcacaatgtaagtcattctatcatttctcacatttatattgatgttaagtattatatatggaaggagaatgtgtcacgacgagagagtatcacatgctagactagtgtggcgcgtgttattgggtgaacatgtcttatttggcatcccatttctatatctcttgtgcaattagtggtagatccaaaaattttctagagcctaggcatgggcgtcattaaactctgaatctctgatggcaaagagtgcctgcttgaatgtatcaggcctacgagctcagcctaatcttcaattccaggttgaaagactcaaattattcatgaaactcgatccgttggaacgtaagaacttacaagattttcataggatttagttcagttcttgtaaagatcatccgaaaatccatgttgatccaaaaagggccttgaagctcttagttaatttccacattattatctaaaaaaaagttaatttccacattagagcttcaaaaaaattactaaagattgatgctttaggcttggtttagttcccaactttttcttcaaacttcgaacttttccatcgcatcaaaactttcctacacatataaacttccaacttttttcttcaaactttcaattttagtcaaactttcaattttaacgtggaactaaacacaccctcagttgaaagtttgaaccagttgttttgagaacaccctaattaaactttctccatttaaaaccaagggtttcaacagaattgaaatttagtgggaaatcatttaaatcgatatatggaagtaacaatttcgggttggagagggtgtgcttccgccactatcatctggcacaaacagtgttgtaaataaaactagcacttgctaagattcaggggctattaattttatcacccagtcctccactgaagaacaatgcaattaagctgaatcatacatacatttcaatatggcgccaccggtgaacatggaaacaaatagtctttgaatagcacaaaagtatcgaacccaatgacaagaaacaaagcaatcactcaaggggagcaacctcaatctagtacagttgcaagttgcaaactctctacaagcacaagatatttttcccacaaaacatcaaaagaaacatgccaatccatgaatagctcagtacaaacttttgcacgagagctagccatgcatgcaatgagacatgcaacctataattgggaccatggcacaactcacagccatcataaacttttagagatgatgttgcattgatgttggtgccacactttagtcatttttgccaattaagcattagatagatcctcctttgctatagatcacttttgctttaatctttcaccagccttttgatgtagtaataagttactttttcctcttccctgtaatcctcctctcctctccttttctctcagtgcccataattctgctagccagctaccatatgcaactttttccatccatgtgatggtgaagcttcatggaagaagaagatagaagccatcacccctatatatacccatgcaaccctacaaaacaaactccatgccaaaacacatagatctccattgcatgcatgcagtacattgctagccacagctataacccactataggagattattagtgcacaatatcatcaacataattgtgtgattttgtgccaagtaaattgatctgagctgcattcaattggtggttcattgttcattttggtttagaagatgaagaaggcgtccaggttcttgaagggtctcttgtcggccatcgtggcggcggtgaaggcgaggtcgcggcggtgcgcgccaagacgagcgccgtgaggacgcgcctcatcgtcttgggcatcctccgcaacaagaagctcctcctcagcgccatcaacaggaagatccacgccatcgtcagcagcggcggcggcggcggcagcagccatggcgagtacggcggcggcggcgagagctatggcggcgagcagcagcagcacctgagtggcatccaccttgtcggcggcggcggttacaggaaggccgccgtgctgcatagcctgccgagcttcgtggtggagcaggagaggagcgccgtcgtgctgctcagcagcctgccgagcttcgccatggacagggacgtctacggcggcggcggcgaggcggaggcggaggaggagcaaggagtgggtgggaagcagcagcagcagtcggtgatcgagctggcgcgcggcgcggccgctgcggaggcaggcggcggcgcggagttcaggctggaggacgaaatcgaccacgtcgccgacgtattcatccggaggttccacgagcagatgaagctgcagaagctcgagtccttcaagaggctctgcgagatgctcgacaggagctaatttaatttaaactaagccatcgatttagtgagaatttgcatggtactaaggcagagtctgagggcgtaattagaataagtgacgatggaactatatgtatgtactcatgctctttcgttttagaggagaattgatgtaccaacacgagtcctaatgaaggaataagagatcagactacttttttttttgggaacgtcaaaatttcacacagaacacttgctcacattcttctaggaatttttctcgcgtgctaaatgggattttagaacatttttagcctgatgacaaaaatgatgtccgagctaatgagctagtattatacagtcgatcacatcaaaggattcttaaagattaggattaactattctgcagaatgatcatggttctaatgattcctttctggatgtgttggctgtgatttttgttctattcgatggtgtttgtaaaaagggatatgtaaaaaagacgccgtctgcttgaccactcagtttacactacagaaatctggacactttaactgttaaggaaaaagaactgaatttggtcggtaaaggggttactcaaacatgcatcccaccacaaaaaagtcttggcttggatagaaacgctttacacaagaaacatatccgcacaaaattttcggtgcctaagttttacaaaattacaaatctcatcaactctaaactgaaatatatcttgattattttgcactaacgcacactgaatcaagagagatggaggactgaaaatctggcatgcgtccgtttcagaatcgggcaaattccatatgccagcagaatcaatccactgattccaaatcccagtccaatcttaataaagttttgctatatttctgaggcagcattacatcagacttctgataatgtagtgaaatcagttacaaaattcaccaggaaacatcactctagtaatatcataagatatccaactgtacataacacagagcggcacaaatgcacaagtacttttttccgggaaaatgcacaagtactacaatgatatgtgcgggtgacgaaaaaaaagatgtcaactctactgtgtttaatagcacaatctgtacgtcctgcaagttagaaatagaagaacggaaatttcagatttcatatctgaaagtaaaatgacatgaactccgtagggatttaaacagaaataaatcagtaaagaggatccttctgaaatttggaaggaaatgtctatacatatgactagcgtgtaccatttgtgtctgactagtgcaaagctgctacatgcctaggcccacatgggaagatgttgagagtgttgattggtggtcggatgtgagtcctacagcttcagtcgtacgtatagcagaactcaatttggaattactgaaggatacagaacacaaaaccaagtattaccagttgtttttctttagtgtcagaaatatcaacgttgcgccatcttattactgtttaaatccacccctttgcttcacttttgaacggttctatcttgaaagagactgcaaatccttcatccattcccagattaacaagaaaaatagcagcagagaaccagaaacagtttagaattttatactgttatgcaaagggaacaaaagagaggttgagaaacacaaaattgcaaaagaataaagccaaaacttcagtttgaaagagaaaatgattgaactgcgtggtgatttctttagcataaaaggagctaaagagaccatttaccattcttctacagccttttatttcggttttgaattgcaatatttacttgcttgagacttacagagaaaatcttatatcaattcagcgatttgcttctccacaaaactacaaaattgaagcagccttcacttataaacatattcaacagaatatgaacatactcataagataaaaaaggccattgtgtttaggttaactgtaaaatagaggggaaatattttgagtaaatcagaactagattattggataaatatagctaaagatagttcacaggaggcataatacagcaagcgtacaaagaaaagtagaataacaatcgaagaagtccaatgataaacagttaagatttgatgaaatatgtaacaaaatagttcatattgattgattttaactaacaacaggagataagtcatctgacatgaaaaatatatatttcagatgaaaatggttttaaaatatacatttactggctggataactaaagcatgtttacttaaatacgaatggcatggaaataaattcagaaacctagcaagaagaaggaaacatgacgctaagaagacacaatcatatatttttcaacatcatatgatgtaagaaagcccaacgatagccaagctcagatgttgcacctttgctctctagttactagagttcaattcccataaatctgttttctttttttcttttgttgattttccactgttgtaagaccttacaagagtacactagccaattgttcccaattcccaccctcagaaaaaataactgtacatgtagaatttgcattggtaagccatggcatatgaaattatcaatcaatgtgtcaataattatagcacgtattcattgggacccccagtatcatttgcatagcagtcttcccttttttttaatctcattttgtcgatttcgataagtgctattcacatgattccaaaagatgtatgtctcggatcttagctaagtagctacttgaaatgtgcattcattcaatcacttttgtttacctggtactaataagtttctacatttatcctgcagacatgacatgtcatattatcgtatccaaatttcagattatgattgcttttggggtacctgctatcaaggttgggaaacatttcaggaacttcgaccattattcagatttttgtagaatttagctccaactgacacatattttctttctctcaccaaaggccattacaatatcaaagttgtaattttaggggacaaaaagggaataaaaaaccatttaactttaataagtaaggtttggccttcaaccaattaagagataatgatgcaagggaatcatacttgtcaatactgtttaaaaaaacattggtggaatttgctgttttaacaggaacaaaaatttcacctagtggtaatataaatacaaaacctcaaaaaattagcagaggcgcaaagcagagatagatgatccacacactagtagtacagtgtgtactaatgaaaaaacaacgtgtagtgcctgttctttatatgaatactagtttgtaagtatgaactatgaacagcataactacaatcagtatctcactatctcctggagcaggtatgaggacatgaacatgcactccaatttcattcaaatattttacttgagcaacatctacaagggaaatcagataccaaaggacgagtaatttacattgtttgtggaatgcactcatgaattcaggtgtgctatgctgagtacgatacttgaatgtcaaaagcctaatatacatgaattcaggtgtgcaaaccaagctttagagaacaagaggtttcagcattgagtgtactgttaacagggaccattgatatttcattgtttgccaagaaacgtgcttattcataagctattgctagagaagattctaagttctaaataaccataaggaagacggcaaactttaggagaacaaataagcaaaaaggtttattttcaagctcattacagtcaagtagttttaatgttcaaatcattaaaggacacttttaagcctgtggttgcagtatcagtgttatatatataatattaaataagtttacaggaacataaattttgtaacagtaaaattcgaccgacaaagtctcgggttgtggtgcatactttagcatggagtttcttccaatgctactgaacatcatatttcttcataacccttaataggttattcctaaatggctgcactagtaatggtaaacccaactctacccaattgaacaagttcttgggccttttgatgtgttaaatagtactgaaaatctagaagagctaacacccagaaaaaaacagcaagagatagaacagaaacaacacatgtacaatattccttagtacacaccttgcaacagtgtgcataacgaaaggtccttgtattgtattatggtgttgcaatgactactaaaggtagcaagaacacacatgaaagaagtgtaaagcaatttacaatccttggacaaaatcatacctttaacagggcttgccaaatatgaactatgttcttcttctagagtggttggctggccccggtgcaccctcaaacaaatcagaaagctgactttccaagtcctctggggtgtattttatatatttccctgaatttcttcccccatccacttggctaccatatcttcccaaaaaagcacgatatgccggaataacattttcagatatggatattttcagctcttctcggagctgaggatctggaactttccaggttgtttggttcctgtatatttcctcaaaggccaggttgaagttcttgaacttctccttgatggacatccgagaacttgaatgcccactgccactgccgctgctgctgccgctcccacttccatgtccatcatccttcagaaaagataaaaccttcatccaggaaatccttaggtagctctttgaatactgccggatcttgccattacgcctttttacccagtgatcacctaaaatcttgccgagctcagagtccctcaccttttgaacaatgtacagcaaattgttcatggaaaatatgcactccagggcgctatcttcatacagcttagatttttcctccaagttagcctccaaataagatatcagcttcaaaaggcgctttccaagaggggtcatgctctccaagtgttcctgatcctgatcctcagctcttgccaaatcaatttggtcatcggcattgtcatccaagagggcatcaagtgtgtcgctgtaaacaaccagaagcctcaaatagttcatgacgtagcgtgtcatggggtggatctcaccagctgtcattgccctccgtgatgactccagctgcaaaaccttcccaaactcgaaaagtgtacccctaatggcatccccaagcctatcaagattcgcctgaacatcgctgatcacaccatccccagaactgcccaagcacaaatccttcatctcagggatcacctctgcaagtgcctcatacatgtcaagaatccgcgagagcttctctggcgagcggggacacacagccacagcatccccaaagctgagaatctgcataatacaacctttggttgattcgatgaagcactcctccctgagctcatcggacacactgagcacctgatcgcagaggcgtcgctcaccagcgagcaggacacgcacgaccgtcttgaccgcctgcacccacttcttcatcttgtcattcaggtgcttccactcgatgcgctgcacctcgtcaatgctgaggcgctcgacgccgagcgcggagaggtactcgtcgagcaggtcacggcggatgccgcagtacgcgtcggcgagctcgcgcgagtacccggcgcgcgccatccggtcggcgatggcgcggaggtcgtcgacggcctcagggcgcacggggtcgaacacctggtcctcgaaggggttgaccaggggcccgccgcgcgcggtctccggcgcgacgtcgatgctgtgcggcgtggcggcgtcgaactcggaggaggtgtcgaggtcgtccatggagccgagcgagaggcggcgcagggagaagaagaggcccgtggggtcgagcggcacggcgtggcggaccatgaggtggcgcagctcctcctcgaggcgcgccatggcgagctgcacggcgaccccggcgcggcccgcggtggaggaggaggaggaccccgcgccgccggcgccgccgccgctgccgcgcgcgaggtgctcgatggccacgtcgaccgcggagaggtactcggcgacctcgtcctcggtggcctcgaagacgagcgcctccggggtgccgtcccagacctggatgagctgctcggcggcgtcgaaggccgcggccgagatctgcccccacagggggttcccccgttcgtcggagtcagcggcgaggtcgggggaggggaagaggtcggaggtgatctgggagaggcggttgtcgaagcccgagaggatgcggatcatgtcgtcggcggcgttcttggatgtcgccagcgacttgacgatgtgctgcgccgcggcgagcaccttgtcgcctccgccggcggcggcggcgaccggggactccggggggggaggcgggggcgccgccgacatcgccgaccaatcggggggattcggtggggaggggagcggaggtaacttgggtgttacgctgctttgcctagttgccttctctgctttgactgctagtgtgctagtgcttggtgttggctggcttggatcgccgaatcgtcgggtcgggtcgggtcgcgtgtccgaccggtcgcactggtggtggactgagaaggcgagctcaacgctcaacagtggcgatgattttttatcttttggggttggggttggagttggacggccgggggagccatgccccaaggtcgtgtacagtggaccgacgaccactgctccactaccaccagcagtggccggccggcgtgttgccccctacccatgttgcgtcttcttctattcttcttgggtctcagtcttaaatatatctctcaactagatataaaacatcctccaacttaataaaccgtgtaaaagaggtccttcaataatattgtacctggttttggctgacttgacgtctgcgtggctcctttgactttgactggttcttcatcgtacgtggtgttgacgtgtcacttagtgacaattgggtccggaaaaacaataaagcatatgggcccacatgtcagttttacatacacaataataataaaaggtttccccacgtggccccacctgtcatcctcactactcccctcttctctctatcctctctctccgggcattggagcggggcggacagtggccggagcgagcgacgggcgggcaggagcagggcgggcggaggccgcatgaacgcagcgtcattctccaccagcaagatggatagcgcgacgctcttgatgcccaacaccctgttgatgttgtgttggatggccttcccgcacacccatgcacgtgtagtcgatccggttgctatcgtcggcaaaggtgaggcgcgcgacaacgacgtccttctcgaacgcgatggcgtggaaggaggagcgggtacagacaagcatataggagatgtcgtcgaggacagcgtcggactacgcctggtcggcgtggactagggagaggacgtgcatggtgatggtggccctccgcgcgatggtgacgttggcaaagggcctcgtggactcacgcttggacgaacgcactgcaattgaggttcggaaaggtagacctagttggagggcaccgcgaaggagaaaccccggcggatggtgacaaccccgtgagcttggatttggagcaggcagaggccagggagcgaagggtggcgaggatggaggcgtcagggcagagctttgagcgaagtgactcggcgtaggacgcatccgtggaggcccgcggcttcttaaaggcggagcatgacgtggtcgcgcctgccccaccacaacgcttcttctccgacatgtcgagagatttggggtcgtagttgcaggggtgtggggatagaagtcgaaggacgatgacgacgacgactgagacccaagtgggcagagccgctctgctccacccatcgccgctccgcccgctccgtgccactgcctcgctccgcccctgtgctctgtcccgtcaccacctgtcgccccactcctcccctctgccccgccccgttgacatcccgctccgctttgccagcctactccgcccactgctgctctagccactgcccgtcctgcccgtcgcctgctccagccactacccaccctattccactgatcggggagagaaagagagagcggatagagagaaagggcggagagaggatagaaagacaagggtagtgaggatgacatgtgggcccactggttttattattttttgggattcaattgccacgtaagcgtcacgtcaatgccacgtgaaacgaagacctaatcaaaggagtcacgtaggtgccacatcagccaaaaccggagataatgttgccgatggacctcgttagcattggttttgtaagttgggggatgcattatatccagttttgtggtctaggcatgaattttgaactcggtgacaaatttgagggacccaaagtgaactttttccttttcttggttccattttttttaggtgcagaaaaggaataagtccatttttccttcctcaactcatgcccctgattgaatcacacccctcaaccgcaaaaccaggtataagacatcccctaactctcgaaaccgtttgcaaatcaactccccggacggttttggaggcggttttgtcctatgtgccgcttatatggcgggttgacttgtcttcatccaatgtggcatcaacgtggtgcttgtgtggcataaaaataaaacaaacataaataggacccacatgtcagtgagcaaaacaataaaaatacatattggcccagagaggtcctaccctgcgcgcagcgcggccagccggcgaggtcctcccccgcgcacggcgctctggccggcgagcgagcgcctcccccgcgcacggcgctccggccggcgagcacctccccccgcccgcagcacagttggcaaggtcctccccccgcacagccgttgttgccgccctgcctctgtgcttatggaagacgagagaagaggaagagatgagagagagagagagagagagatgaggtggaggctgccgacaaatgcgtcccacctatgactcagcgaatcaactatcacatctgatgaaaccgcctacgaaaccgctcagggagtgattcaactaggggcatgagtagagggaggcaaaacagacttattcctacatgaaaaggggcctttgaggctcgggccttgggcctggtatgtcacctacatgtcatctttttaggttaagttcacttttaggtccctccatttgtcgctgagtttaaatgtcgtctccgaaccgcaaaatcgaatacaactgttaacaccaaatttagtaatattctttagcggatttggatatgtaaagaatacaatcagccaatgaaaactttatctaaaagagatcaagttcaagaattaatcgtgaagacacacggcagcttgatttatctattaattaggcagggcttactaattttccttttaatatttaagaaagtgtgtttagtgtcgaatcaggactctaaacagcctatgggcataaatatgtacactggggttattgtaaactatctctcgatcaatacaacttttggcacatcaccaccctctgttccgaggtttttatcaccggctgcatcgtttcgatctccggcgaagggataagtcctaagttccactggctctgttatcggttatattggtgttgttcaagactgcatcgcttcaatatcttggattgctatagttcaattggtatatttgcttacccgatatttcaattctatctttagttgcatcgtgtcagggttatgggtaaggtataccctctacccttcgatatatgtcacatatcgatatggtatacttgcgcgtatacggacgttttcggcatacgttaaggaaattcatcacggagttcacagatggaaggagtcctactcgtacggaactgggtcgtcattgtatcgtgtcgggtccgatgtctccgagtcctacttgaagaccagttgacctgcgatataaaaggaacccccgggaggacctaaggcatcgaatctcatagccaacacatccaccacagcctacggagttgaagcctacaggagccaagtcgccgggagatctaatcgaacatgttcgattatgatctcgtcggtatcatcgagttccgctattccctttgtaatatgtggtttccatcatataatcccatatcaactgaattagggctattacctatcaaggggcctgaaccagtataatttttgttttctgtttgcctgatgtcgtattacgtagatcctcgtaccagcgtaccccagtaccctttatatccggtctacgggtatcccccgtcgacacatcgtgtttagttgggattatctcggttaggtctaatcttctgtcttagccgacatatctctatacaatatctatcactttatacatgatttattgactttattcgatttatttgttgctgtaaacttaatgctgtatcagtttgtggtccgagttcgacctatgactacacgcacctcggccgcccaccggcatactactgcacgcactgtgtgtgtcatgagcctagctagctacggactgggagaaacgtactaccatctcccaggcgcttgctcatcgcactagtcgattgcttacatgctgtgttgaaagatcggttggtgtggtacgcgtatgtgtcgcaggggaaaacattggatcaacgctcgctcgctcgcacgtttctcgtaagaaaaaggtgaggtgtggcactggcaggaaagcggcgtatatatatatgttaggtggagctagctataaggaaagaacagctccatcttttcgtttatacctatacttatcagctaaaatttaaatttttaatcttaaatttaaagttgattttgagatttttttcatcggagtttatttttcagtctttgtttttatatcgctaagaacacatatataaaagttttattcacaaattatgtttcgtttgtaaatatgtcgtttgacttaataagccaaacgatgagaaccaaaattgtcgggaattatttaggttattattttttcgtggccgttttctagttccactgtgtgtttggtgtgggtaccgcgtgcagtgcgtgatgagacactacttcgcaagagttccatctttctgcccttttattttacacgcatatattttctgaaatgctgttatacagtactgttttttaaaagaaatacataaataatcactttaaaaaatcatattaaaacatttaaaaaattttaaactgatatttaattaattatgtgcaaatgagttagttagttttccatcctctgaggaacatcgttccatggactgggcccgatggcgagattaatttttttttctaggctgggatcgagacaagcaggaaaggttatcagcgtgtactcactaaacgcgaggttgattgcgtgatccatctttgcttagggcacccgtaatagttatctataagctctttataaaagatccatgtcaacatatttttctatttggaagagattaaataaagaaagagagtaaagctatttactaacctgaagatagtatatagagaaaaacgagataatggattagagaattgtagaaacccatgtagacatactattgagatgttttactattaatctagtctattgctaagatcatgttttataaagagcaccttactttaacactgcgggtgctcttagggcacccgcaatggttatctatagactctttacaagagatccatgttagcatatcttcctacttggaagagattaaatgaagagagagagagcgcaaaactatctactaatctggagatagtctatagagaaaaacgaggcaatgcattagagagctatagatacccatgtagacatactattgaggtggtttactattaatctagtctattgctgagatatacatgttttatagagagcaccttactttatcattgtgggtgctcttagcagctggagtattcactatccgcagtttgccaattcatatcttccatatagcgtggctgtgttcggattccgtggatgggaaataatctctcccgcacggaaaacggagcgatccattagtgcgtaattaattaagtattagataaatttcttttcaaaaaggattaatttgatttttaagcaacttttgtatagaaacttaaaaaaaatacaccatttagcaatttgaaaaacgtgcgcgcgaaaaaagatggagagtggttgggaaacttgggtgccgaacacacccataacgctgatcaccctctctctctctctcgtctcatctcaaacgcgtatgcgccgtggaccacatttccccttcctcaacagtcaccacacagatacacaatgcctccccccaggttctcctcctccagcaagtacgggcttcaattcgccagttatttccaaccatccatgaaattctcatcaaacaaacagagagaaaaaaaaacagaggagtaaaatggatgaatctaccgaagccattatgtgaaaatgatgctactctattccactttgcttctttttttcccgtaacagttccatcttcatcttcttataatgcctcctcttaaaatagccatcacggctccgctcggctagcacgattaaccgtccagacttaccgtcaaatgtttcattaaaattttaacagttaaaaggattaacaatataatttctataagaaatggttgatatagttaagttatgttcagatttaaaaatctttatgtcttcgcaactatctacaactaaccacactactagaaaacacatttttcccaacgtaagggtctttttttcgcaggcggacatgattcttataaccaaataaccgcctacaaaaatataaatcggggtgaagttcgctgtccacttaaacggcacctacgaaaatcattttcgctggcggactacttaagcggcacatgcgaaaatagattttcgcaggcgaaccttatgtgctccgactgcaaaaatcgtacatacccaaaaaaaaaaaccacccttatcttctcctcccacccctcccaccactcaactctctctctctctccctctccctccactgactcagtctcctctcctctcctctcctctccctcactggctctcctctcctctcatctccggcggcggcggcggcaacaatgcgcgcggggcggcgcggggcgcgcggccggcggcgtctcccctcgccccctccctcccagatctggccggaggagggaggggggaggccggcggg

SEQ ID NO: 9653 - DNA, 15871 bp, Oryza sativa
caatatacaatcaatcaatcgaatcgtttttcatattgcttttagttttctcttagtttgtccatctttgtcggtttgcgctgtaaaccgtctgccgccgttgcaagagtgcgacatctttttgtaggtttgtcctgaaaaccttccgttttgcccacgagacgggtagttatctagaaatcggctccgctagccggtttagttatcaaaaccatctaggtttagctctttgctagatcgaggtggttggcgactctaggatcaccgcaaggcttaaggtgctgtgatcgtgcttgtcaacttgtcaaaaaagttgccaacacgatttttggcgactccactagggacgagatccgttcatcgtcaactcaacttcgacttcgccatgacgaagccgccatccaagacggaggtggagccatccaatatgataccggtcacattggatgatttcgaaggagaagaccgcaaagctatggaggaatacatcaacgaactcacacgggaggcgttgatgagggcaagcactaggactcgttaaggggtgatcatcaaggcagggccacgtcctaagctcgcccccgatttggtaagtaatggtgagataacacaatctatccagcgacaagtagcatctacaatagattcatctataattgcttttaaagataagttagatgcaacttttgagggtaaatttgatgaatttttaagggttaaattcggccctcttatggccgattacatgtcaaaagataaagcctctaccactgctaaccaacctcctatagatcaaacgggtagtagaaccgatggagcggcgcacacggtcggtccgaccgggcctgacgaccggtcagaccgtgacctagccgtcggtccgaccgaccaaacggccggtcagaccgggtattatccccgcggtcagaccaggactcaggcaggtctgaccgcgcctttggatgccagtcagaccgggccctgggccggtcagactgacgcgattataccgatacaggggatagatctgatgactaatgctagttatttgtatcatcttagaacatttgatccctctgtatctactgctgcaaataatccccaagttcccccacatgttcctaatgcttataatgatgttgctagggggtatcctcccgatactagacaaggccaatataatcatattgcgccacaaacacaacctattaggccaccaaatccaccgccaaatcaacatggacctaataacatggaggatataattagtgagattattaggaatagattcgggattgaaactaggaatcgtgctagagtttacaaaaagccgtatcctgattattatgataatgtgtcgtttccccgtaattatagagttcccgaatttaccaagtttagtggtgaggacggtaagaccacataggagcatgtaggtcaatttttggcgcaatgtggtgaggctaatagtgatacttttaaattgcgcttgttttctttatctttgtccggtaatgattttacatggtttacttctttaccggcaaattctatcatacttgggctcaattagaagaaaaatttcatgattatttctatactggagaaactgagcttaggttatgtgatttaatatcggttaagcaaaagtataatgagcctgtcattgattatattaagagatttagggatgttagaaaccgatgttatagcttgaatataactgatagagatttggctggtcttgcttttaatggtttaattgctcctcttagagaaagactagatggccaacaatttcttgatgttagtcaacttatgcaaagggctctggctcaagaaagccgggttaaggataataaaaaacttcttagatcatatgacaaaaagcctaatgttatgattgattaccctgaggctagtgatagtgaagaggagggtgatcatgatatatatgttgctgaatggtcatggactaacaaaaacaagccttttgtttgctctaacctaatgctgactcctcgcaaagatcggcaaagtgaggttaaatatagttttgatgtggctaagtgtgataagatttttgattatcttttacaagagaaacaaattagattacctaaaggccatgtcataccatctcaagaagagttgaaacgtcgagcatattgtaaatggcatgattctcattctcattctactaatgattgcaatgtgtttcgacgacaggttcaatcggccatagatgaaggacgattgaagttcaccgatggctctaagatgaagcttgatcatgatccttttccagtgaatacgattaatttcaatgataagaaggtgttgatccggccggagcaagccgaatctactaagggaaaaggagtggtcattggcgagccaagacctaagatgatagtgccaaagaagccggagattggcgtttggaaggagaataagagtgaagcttcaacttctaaagcccctaggaagaccaaagtgacttttgatatgcttttggagaagtatgagaagcaaggtggtgagaaggctcacaacaaaggaaaaagaccaagatcacctcctagggagtgatttggtcattcaccgagacgatcgcattcacctccatatcatcatctacaagacatgtcatggggttcttattcaatgccgccaccgggttatccttatccttattatataccatggggggcaacaccgccaatgttcaaccatatgcctccaatgcaattcaaccaagggtggggaggaccaagaaggccaattcatgagcgtttgtcttcaccacacaatggccggttttatggtaggaaccgggccaatgaagaaaagagggaaggaaagcgcatcaaggtggaggcaaggacttcggaagtaattaccatcaaagtggggtttcatgatgtgccaataccttctagagatgatgttggagagtcctcaagcaaaaggtccgaagccggtaccagctcatcgcagtcggccggtctgaccaggccttctggccggtctgaccgcagccatacggccggtctgaccgggccatcaggccggtctgaccaccgacccgatagcggtccaaccgacgcctcaggccggtctaaccgtgcgccaaatgtcggtctgaccggcgcatctggccagtttgaccggtggtatacgtccggcctgaccgggctccagcgccggtttgataggaggtttgcaaagggcgatattggattcatcgtcttcaagcaaggttaatagaggacattatttatctcctggaacagagccgaatcctaggtggatgcctaaggatttgacggctactcaaaagagaaggttgcaacgtcttcgggctcaagaaatgggggcttttaactatttgccacttttagatttggcaaataactatttgccacccctatctcaatgacatgtgggtccacatgtatctatgacatgtgggtccagtggcaaaaagttaattgccacatctaaatgtggcaaatggttaaatatctccaagaaatgagagagaaaaaggccgaagaacaaagagataagaggtttaatgagttgcgaccaccaccggtatggaggcgtaagtccgtagagaaggaaaaatcggttgttgtagaggagaaggaggaataatcggttaataaaggtgaatcatctccaaaagaagatatggatatcaacatggtatgtatgttgcctatggagttttgtgctatggatgaagccggggttgctcaattctcattaggtcctaaagacgcggtttttgagaagcccgatgagtcaaaccgtcacatgaagcctctttatctcaaaggccatgttgatgggaagccggtctctaggatgttagtggatggaggtgccgctgtgaacttgatgtcgtattcattactcaagaagttgaggcgtgaggatgatgagttgaagaagaccaacatgattctcaatggcttcaatggtaaaccaacggaggcaaagggtatcttttcggcggagctcaccgtgggaaataagatgctaccaaccgctttcttcatcgtcgatgtgcaaggtaactacaatgttattttgggtcgttgttgggttcatgccaattgttgtgtgccttctaccttgcatcaatgtttaattcaatgggacggcgatgatgttgaaattgttcaagcggatacatcggctgaggttgcaatggccgatgctacttttgagtggcgtcatgggaatatctaatgtttatcggggagggatctttctaactatgattttattagtatctccgatggcaaatttgtacctatctctataaagctggctagtgtagcacggctaagccatataaatttgtataatgagtaaggaggctaatttagagtggttacaaaagagggtgcaagaatatcggtctacaaagaacgatattggtgaaaccattgaagattttgatgaagtggagaagcttggacaagggtttacatcggccgatccattgaaggaagtagacataggtgatggaaccaaaccaaggccgacttttgtaaacaaaaatatgagagccgattataattaaggttaagataatcgagctacttaaagaatatgttgattgctttgcatgggaatatcatgagatgccgggtcttagccgtgagcttgttgagcatcggcttccaattaaaccgggttttaggccttataagcaaccacctcgtcgttttaatcctttgctatatgaccgagtcaaagaggagattgatcggttgttgaaggcggggtttattaggccatgtcgttatacggagtgggtttctagcatagtcccggtggagaagaaggggagtggtaagattagagtttgcatagattttagagatttaaataaagccactcccaaagatgagtatcttatgcctatagccgacatgatgattaatgatgcctcgggtcataaggtgattagctttctagatggtaatgccggctacaatcaaatctttatgacggaagaggatatgtacaaaacggcttctaggtgcccgggatttgttggtttatttgagtgggttgtcatgacttttggattgaagaacgccggtgcaacatattaaagggcaatgaatttgatctttcatgatttgctaggtattatcttagagatctacattgatgatattgttgtcaaatcggatagaatggaaggacacatagccgatttgaggttagcttttgagaggatgcgccggtatggtttaaagatgaacccacttaagtgtgcttttggtgtgtcggcagggaagttcttaggattcatggtgcatgagagaggggttgagattgatcctaagaagatagaaaagattcgtgatttcaaagcgccgacatgcaagaaggaggttcagaagttgctagggaaggtgaattatttgaggaggtttatttctaatctagcgagtaaaatcgatgcttttgttcctatacttcgcttgaaaaaggaagccgattttacccggggggcaaaacaaaaagaggcgtttgaggagttgaagagatatttgtctactccacccgttgtgtgagcgcctaaagccggaaagccttttcggttatatattacctccgaagacaaagtcattggtgccgttttgacgcaagaggaagatggcaaggaatatatcattacatatttgagccgctgtcttttggatgccgaaacgaggtatgtctttatagagagactttgtctatgcttattctatgcttgtaccaaatggaggcattacttgttatctagtacatgcatagttgcttgtcaagccgatgttattagacacatgttgcaaaggccaattctaagtgggagaattggcaagtgggcatatgctttgatagaatatgatttggcttatgaaccattgaaatctatgaaaggccaaattgtatgtgattttatagtggaccatcatgtagatattgcttatgaggaaagggtttgcttagttgaagttataccttgaaagatttattttgatggttcttcttgcaaagaaggtcaaggcataggggtagttttgttttcacttaatggcatgtgttatgaagcatcggttcgtttggagtattattgtacaaataatcaagccgaatacaatgctctattattcggcttacaagttatggagatggttggagctaagtacgtggatgcttttggtgattcggaattggtggtgcaacaagtcgccggagtctacaaatgcttggacggatcactaaataggtacctcgattcatgtttggatattattgccaattttgataattttgctattagacatattgctaggtgtgataattctagagcaaatgacttggcacaacaagcatctagctataatgtgaagaagggattatttctgatattagaggagccggtgcttgcttttaaatctttgtgcgaaattggcgaaactggggaccaggggcggtctgaccggcattgcgtggccggtctgaccggtgaccaggggcggtctgaccggccacatgccgccggtctgaccggcgaccccgagcggtctgaccggccctgtatggtcggtctgaccagttctgggcagagcgctggggggcacgtttcaatcaatttagaggccgaattaattgtgaattcggacatttgtgcctaggaagcagaagaagattggagaattcctttgattcgatatttgaaagatcccacgcttaaggttgatcggaaaattcggcgacaagcgttcaaatacacattgcttgatgaggatttatatcgccgaaatatagatggtgtcttgttgaagtgcttagatgaagatcaatctaaagtgactatgggagaggtacatgaagggatttgtggaactcatcaatcagcccacaagatgaattggttgcttaggagagcggggttctatggccgaagatgattgatgattgcttcaaatattatagaggatgcgaggcttgtcaacggttcggtaatgttcaattggcgcccgccaccgtgttgaaccctataatcaaaccatggccgttccgaggatgggctttggatttcattggtcaaatttatccttcgtcatcaaaggggcataggttcgtgctagttgctacggattacttcaccaagtgggccgaagccgtgccgttgaagaatatgactcatacggaggtaattgactttattttgaagcatattatccatagattcggtattccacaaacattaactacggatcaaggtgcttcttttatatctaaagaagtgaagagttttgccgaatcttatggtattaaattgttgagttcttctccttactacgctcaggctaatggacaagccgagtcgagtaataaaacgttgttgaagttagtgaaaaagaagattgaggaatacccaaagaagtggcatgagatgctttctgaagcattgtgggcacataggatatttaaacatggtgccactaaagtcactccttttgagttggtttatggtcaagaagccgttttaccagtggaggtaaatcttggttctcttcgttatatcaagcaagatgatttgtcaagtgaagattacaagacattgatgggagacaaccttgatgaagtcatcgacaagtgattgaaggcattggaagaaatagagatagagaagaagaaggtggccaaggcgtacaacaaaagggtgaaagcaaagttgtttcaagttggagatttggtttggaagacaattttgcctttgggtactcgatccaaggagttcggtaagtggtcttctagttggagggtccttatcgagtatgcggtattgttcgaggaaacgcatattttttggacacacttcaagaggagcgttttcagtgagtaatcaacgggaaatacttaaagaaatacttcccgagcgtttggcaagacgcttaggaggtactatggtcggtaattggattatcgtcctaagaccaaaacatgttctatgcttttagattcacgttgttcatcaaaaaggcaggggggcatgtgtttactcccaaatttggcacctagaattaaaataggaaagattgccgaaatttggaagtttgccggtttcctccgagtgggccggtctgaccgccgtgtgttgggtggtcagaccgccggttcagggccggtcagatcggcggtgtgtggccgatctgactggcaggtccgagtccgactgtgtttcgtcgggtctcgaggtttccttgctcgagaaggcatgtttcgggtttcctttagtttctaccccgagttggacgtggagaagggcctgtagagggcaagaccaacccctatataagggacatggccggttcattgtaaaaatcaatctacaatcaatcaatcaaatcgtttttcatattgcttttagttttctcttagtttgtccatctttgtcggtttgcaccgtaaaccatccgccgccgctgcgagagtgcgacatctctttgtaggtttgtcctgaaaaccttccgttttgcccacgaggcgggtagttatctagaaatcggctccgctagccggtttagttatcaaaacccatctaggtttagctctttgctagatcgaggtggttggcgactctaggatcaccgtaaggcttaaggtgctgcgatcgtgcttgtcaacttgtcaaaaaagttgccaacacagggtttacaaaaccgcgcggttaccacagtaaccttttcagtttttgaaatcacggtatgtcttgcggttaccacgtgattttcgtggtaactgcgcagttaccgcggtaaccaccttaccgcgggggtgcggtaaccgcgctaaaaacggtaagggaaaccctggtagtaagaaggctattccattggacaagttggtcatacttgccgggtatttgattgagggaatggaattgatctctcttttttttttttgagaaccgaattgatctctctagcgtttggttaggacttaggagacagttttgtcagtgaaaaatcggtatagcttcataccgcatcttgaagagattccgtacatcctccataaaaaagactcttagaatatctagaattatccatagaaattaatatttttgatggaggaagaggttggaaccagactatgttccatacctctatttcttctctatctctatctctactattataaaaattaaagatgtttttgtcaagattttggtaattgtcatccgaatccttttacgatttctagatctttacctatactttttttaaaataataataataataatgattatctactcattattctttcgtttgttatccgactctatctatatgggttcgcaatgcacacgtggtagatgtccgactcagtccgcgagaacatgatgggcgcgtgattgattcagaacgttgtagatgtaacgcgagattggcagctccctattttgtgatcgattttgctacatctcaatcgaaatattttttttcttatctctcacttgattttcccacttaaatatacagtgtattttcttgtaatttacagtgtaatttataaaacttacattgtaacttttgtaagttacagtgtaatttttgaatcttcgtatgtaagttttgaaatttatattgggtttggtctttttcttgaagatatggcaattagtatccattatggtgtttcttagttgctttttgtctttttgctgtgtctattggattttaatctaaagattaaaaatctgtgtgatatgatgtcatgggctttgggccgggaatcctagacccattggatagagttagggtttgttaggattagattaaggagtcctccatctatataagtagggatcctattccagattggcattagatcaaaatttatcttagtgcccatcggcctgccttctcagtgcgacaaagagcgtctcgccgtttacgttcaggaccgttccttgttatttcatttactataatccaatctatttcccttcgtcccttttcatcccaaataatcctaacacgtgataacttggtatcagagcttcggttccgtgcccatgggtgccgagatcgctgtggttctcaacattagcgaaggccttgccgagatctcgaagaagatgatggacttggtggcgcaactctaggccttggcagcccagtcagccgagccggcggccttccttgaggatgccgaatcatcatactggcatgtagcgtccttgcgaccacgagggcgcgtcttcaagcggcacggatggtggcagtaatcggcggtgacgccactccatggcaggccatcgccgacaacctcctttacgtcatttcgtcgaccatagggcgggatcggctgcaggttccatcggcgaccaactatggcgcaactgggtggtgcgctgctaggattagcatcggtgatgcctcttgcctccgccactcacgcatgcgcagcccagcccaccgtccggggtcgtcggcaatggcgttctgcaaccatgcgggggtggcgtgactcacggcgaggcgctcacgcttcctcgagcggcggcgcaagttccgagagtggcaggtacaatttggcgcgggaagatagcgacatacatgcggcgtgaattgcgggaacggcaggtgggcgagcaacctcggcctcgccgctgggcctagcgatggtgccgtcgctgttggcgccctcaacggagtcagagaagacgacggtgagttccacttcgatggcgacacaacacggcgacggttggagcagagccagccggcgtatggcggcgcgattcactagcgcgacgggtgggcgcggcattcgcttgtcgtgatggcgcagatcgcgccgggtccgcgagctggttcacgaagtttgcggctcgaccacggctgagtcgttcctggcggcatgtgcgcgttgagaactgtggacgcggcagttgtgcaaggacttcaagtcgaagttgggggcgatttcttttggcgtggcccaacttctcttctcgcggacggcgctcctcacgcgcatgttgttggaggcagcgctatctacgggaggagcaagggtttctcctcttttctcctcatctgggcaatttaaatgggctagactggtgggctgggcttcgatctgcagctgatccatgttggcctagatatgtttggattctggcatgggcctcactttcctttcaaggcttctgggtggggtccacctgtccatatctatgatgacaacataaaagtaaaagtagggttgttcacaacagtagtattaattatataggagtatatatttcagccgagatgtaaaaggcttgtgaatctttgtttaggctatggtactttgtttgagtctagcggggtgtgcctcgagctgcttaaaaagaggggagtaatgtcatgggctttgggccgggaatcctaggcctattggatagagttagggtttgttaggattagatagggtttgttaggattagattaaggagtcctccatctatataaggagggaccctattccagatcagttaggcattagatcaagatttatcttagtgcccatcggcctgccttctcagtgagacagagagcgtcgcgctgtttaggttcagaaccgtttcttgttatttcatctactataatccaatctatcctcattcatctcgattcatctccacataatcttagaccgtgacatatgatcataaaaatcttttgaaagatgcatggatactctcgatgaatacaaagcccatcttctcctcctacgtaacactgctccctacgttcagatttgtttgagtttaataaaaaaaatatgacttagataaaaaaattaaaccataatttaatatttagcgtaattttattttttttcccgttgcaacacacatgcatttagctagtctctactattataaaaattgaagatgtttttaccggtattttggtacgttatccgtgtatgagtcgctttttaagttcattatttgcatttggaaatacaaatccgtgtttgagtcggtatttgaattcgttcgcttttacaaataaagaaggagaaggagacgtataagaaatctcttttataaacttgcatactaacttgacatgatcaaacttataattgcagttcccaccgtgaattttaccttagttaaaccgttcaacaataatatgattaaattagccttcactcgttgctacatacgtgtattttttttcaagtcatctaataaaccaaacaagctgataatccatttttgcttttcagaaatatgctaattcaatttcttcttgtgccccaaccaagcactagctctgaggcgaggcaaagcttttgcctttcttttaaaaaaaacacccaagcactagctaaaaggtgttcacacgaagcaaaacatatcaaatactcctatctctcacaacgtagaataaggaaaaaaacactgtaaaaggtatggaatattcttaacttgttgcaaggaactgatcaaaagcataacctttttagccaaatgcatgatcatattgttgtccatttatactagtacaatcttaacaaacctgtaataaattttggacaaggaaaaaaatattatccatgaaatttgggtgttcattaccatgattgtgactttatgtcaacactgaaatcaaacttactaaattcaacattttctagatatatcgatctctttttagtataaaaaaatatagttacgtgcgtttataaggttgagtgtacgtatattgtgagcgcatacatgatttatatcatgtttcttattaaaaacagtaatcccaaccgttgatcaataaaccagatccttcaatccgaggagaagatgagcccttcccgttcggaatacagtacgtacatacgtatactccgtaacaaatcaggttaattaatttcctctctataagaaatataaaaaattccgcttaataattacctgatctggactacctgagcgacttggtctcgtctcctcgtcttctcgccgccgccgcgagcggaatccccctctctccgtctaaacctcgccgccgcggcgaagcaaaagcacctccctcttcgccgccgcccgccggcaatggcggggctgtcgctgcggtgcggcgactgcggcgtgctgctgcggagcgtggaggaggcgcaggcgcacgccgaggccaccaaccacgccaacttctccgagtccaccgaggccgtcctcaacctcgtctgcgccgcctgcggcaagccctgccgctcccagaccgtgagatccccccatccccctccccaccttccctttggttttcactttctcgatcgaattccgccggattcggtggttctcgatccgattttagtctcacctggttggttgtgtggatctctgatcttgcgcggcgcaggaggtggacctgcacaccaagcgcacgggccacacggagttcactgacaagaccatggaggcggccaagccaattgatctcgaggcggcgccgccgaagccggccggcgaggccatggatgtcgatgcctcggcaagcgccgagccacaaggtgaggtggttgttgttgagatgatcgaaagggttatgatctgtggccgcctttgggtggcaaagagtgttgaatcttggtggctttttgcttccggcagagatggtggcgccggaggttaacaaggagatgctggcggacctcgaggcgatggggttcacgacggcgcgtgccactagggcacttcatttttctggtatggtgtagcaagatagtatgtcttagttcaacatttgtaccatgctgtcaagttctttctccaacttagattttatttattagcaaattattactagagtactccctccttcccataaaaaaccgaatcttagtgtccagattcatccctaagattcggttttttatgggacagaggagtagactgcagatgcagtagaaaagtattaactgttcaagtgtatatatgttcgctcgtgcgactgagctatttgagactttgatctaagaaagtctcggctagaaggctttttatcacagtaaattctggaccaaggatttcagcatatggtgaataaaggaacgacctcgattggaaagtatatgctttgctattgagtcttgcagatcaaataatgctagtgcttgtgcattgcaacaagatacattatgagtgcaaaattagacatacattctgcattgtagtgcctgtggaccgaaatttacaatatgacagaaaaaacaaggcattatatatgcattgaaagctgaactatttgctgtgcttttggacaaaactgtctcagtggaccagaagtcaataagactacgttttgcagtcttacttatatattatgattgtctcatctatattagttaaataaacataacaccttcagtaagcaaaccatgattaattcataactttgtttgcacccatttaattttcctctaggtaatagcactattgaaggtgccattaactggctttccgagcaccaagaagatccagatattgacgaaccgcttctggtatgatgaatttatattttttgttgctgattaattgattatacctttatttgttttggtatgctggtgtgctaaattgccccttgctgaaaaaataatatgttttggatattaagtggttattttggtattattttcatcgtgcttgtgtagtgctacactgaattgcactgtctgacctctgacattctatccatggagtttcagtaatacccaaaacttttactatatttatttattatttgtgcagctcaatgtatttactgtaacaatgaaaacgcatttcaaacatttgaaaaattggcataggttgtccattttggttttttttcccctgcgtatgcccatgtatctaggaccaaacttgcacatttgaatatatctaacctcccacttcagaggttcaattaattgtgtccaatgggagtaatagatgaattctttctgtgttatacctatacttgtccagaaaatttttgctctccagtacataactttacacttaccttctttcatctctcaggtaccggctaatacaataactgaggctaataaaccctctttgtctcctgaggaaatgaagattaaagctcaggaattaaggtgtgttcatgaacttattgctttcttattatctttaatgagttgatggttttatatatatcttcagaaaattgcattgacttgtgtctgtctgtagcactaccttttcctcgttgaaatcagttcaattgacatttaagtacttgtatgctttgtcgtatgtggttgggctttgtaatcgcatgcattggtacgacaatttttttcactgctttaaaaatgataatttttattggacttgaaactcaatataaatgacaatagaattctcatatttaatccctgaagttctatacttttattacattccctacgtattttctttgcacatgataacccccaatatgcagattgtgcacttttttatcgtaccgccttaaacaggaactttgttcaatatttgctctccgtttgtcatattaacactggaacaaccacagatctggcgttatgattctgattttaactttttgttactaaactattgagtttactcactcgatttgtagggaacgtgctcgtaaaaagaaagaagaagaaagagaaggatggaaagagaaagggagaaggtttgttctcaacttctttttaccttatttaatgtatttagaaatgtatgaatcaagattacctgcagcacatttatatatctggtttcttctgtgcagt

SEQ ID NO: 9654 - DNA, 18160 bp, Oryza sativa
cttacattatgaaacggagggagtaacaacttttagcattcaacatttgtctcaaaatataacaacttcttcaacaacattttcttcctaaccaatcacaaccctccacaattcacttttcttaactacctccacttctcaaccaatcataacatcttcgtatttaattctccctactttcttaataaccgtacccaactctaaaactttttatattctaggacggaggtaatacttctcaatactcatttcttaccttaaaaattcttatatttttagataaatgtagtaaaatttagtcacatgaaacgttctcgctgttaagtttgtcacgaatcaatttgtggaggagctctgcctgttataagagcaagtttaataatagagacaactgctctcgttataagagctatctataagcttatattagaactaatatataattgatactccatccgtcctaaaatatagcaaccttgtactggatgggtcactattttaggacggagagagtaaattataaggttatctctgattgttttctcttatccctttctcatattatataatatacgtagtatatctttattggaacatgttaagagttaatttttgcatggaagctgactcttctcttttccttttttttacatacttcctccgtcccaaaagataataacctataattggatggataaaacgtttcttagtataatgtatcttgatagacttcttatctaaatatgttgtactggaaaatggcttatccaatcctagatttttatattttaggataaaagtaataagtttttatggcttactccctctgttctaaaacacttatttttatattcaaatatggatatacactatatctatatttggcaaaattggttatgtttagatttaaacctaggccgtgtttagctccttcaaaagttgaaagtttgggttgaaattggtacgatatgactaaaaggtgtgtgtatgacaggttgatgttatgaaaaaagttggaagtttgaatctaaacacagccctataaatgttttttttttccggagggagtatagctttgctactgtactcgctctgaccggacggcacgctggctgacgctaccaccacaaggatattctcgcgatcacatcacatcgtcgcgttggtggggaccggccggcggacaacggcagaaacgccatccccaatatccccccatatcccttctggtgggcaagtacggtggatgtggatgctctccgcttccgctcgcccggtcaacgatcccacgcatcctacggtgcgcgcccgcgtcggcgtgacggtctctgccgcgtctcgtcgtcgcccacccaaagccgcccgcccgtgcgccgcgcgcgtctcgcgcgtttccgtcgcacggcgcgcctgggcgtggggcggcagcctcacgctgatccccgacggcgaccggagcggccgctgcgattctcaaaagtccaatctcatatcgtctcatcttgtgtgtgtgcgcgcgcgcgcgcatgctgcgtatcatcgccatcaccgtccactcaagttcgtggacgccagaggcgaaaaaaaaaaaagagcacagaagaccagtctctctggtctctctctcgatcgatgagcagttgcccccacaacattgggaggtagagattccaagtaggtgcaccccgtgctgttggtccgaaatgccgcgtgcatgatcctacaaaagcgcgtgcgtcgcatcctcgcaggggcggggcggagcgtgtggcgatgagcgacgcagcctgtcgattagtggctttctcggtggcatgtgggcaaatgggcgatggtctacccgtatctgcaagttgtgcgtctccatataaagttgggctcacctataattcattgagtcttgtaccttgggcatacccttagagaattatactgatggagatgattaaaagcaagactaataatacagccagctgcttactgtatagatccctatagtttatctctcagctcactcatacagtggctaactctttactatgaatatatggttcacctatctgtctcatagatttttttgattcctgtgcctaagccaactataaacttatatcctgcttcttatctctctcctttcctctcttatccacctcagcatttagcttttttatagccctctattatacttgctctaatatttgttcgcacctataattcatatatcttttcaaaattgtaattaacaaactgaatttgaaatacaaatactatagttgactaccaaaagaccactatcacccgttgcctcaaaaggctcaaagcctcaaaccggtcatggggttgaaaaaaaaaaagaaagaaacatgagaagtaatctcttatttttcttcttttctggagaggaacatgaggcgcaatatatttatctctctagcgttgaaacctagcccttggaacaatttgtttatgttgtcaggctagctgtttttgcatctccacggaagtgattatacgatgatttcctgtattttgcagtttggatcacgtcatgcttctgtcgacggggatacccgtagaccggatatagagggtattggggtacgctggtacgaggatctacataatacgacatcaagcagacagaaaacaaaaattatactggttaaaaccccttgataggtaatagcactaatccagttgatatgggattatatgatggaaaccacatattataaagggaaagcggaacttgatgataccgccgagatcgtaatcgagcaggtccgattagatctcccggcgacttggctcctgcaggcttcaactccgtagatggtggtggatgtattggctatgagattcgatgccttaggtcctcccgggggtcccttttatatcgcaggccaactggtctccaagtaggacacggaggcatcggacccggcacgatacaatgacgacccagttccgtccgagtaggactcctttcatctgtgaactccatgataaatttccttaacgtatgcaaaaaacgtccgtatacgtgcaaaggtaccatatcgatatgtgacgtatatcgaagggtagagggtatcccttacccgtaaccctgacagcttcggcaaggcatgatgcccttttctaaccttttgacaactcgaggtattagactagttagagcatcccatcctagcagctcatctaaatttaatcctccatattctcatatggatggccatccaaaaaagattccttcttcatataccttcctactccaatagatcattcatattacatcctccatatcacaacctcctatattttactaatatcttccaactaaccatatatttgtgttattttttaagggctatatcttgaacaactaaattttaacggtgttatttatcacgataatgtaaataagtgtattttaacctatatatttttaatggataatttaatgcattaaattgtgactttctcccagactatatttctctttttctctccttttctattcctccttctctctgcttctttctacactcttctccattctttccccttctctcttctgccgactgccgcaactctcctctcctctcctctcggcgtgggagacggcggcagcggggcaaccgagctggcagaaagcggcggcaggcgtgtagcctagggacggcggcggccgggcgggcgagtgacgggggcggcggcggaggcgagtggccgggcgagcgaggggcgggggcggccacggaggcaagcgaccgggcaggtgagggccgtggatggtcggggaggaggcagccggcggcaggcgagcgaggggcggaggaggccgcgcatcttgacggcggcaggcgacgcgagcaaggagcagcagcgcgggcgcaatcccgataggggcggcacggatggcggggcctccactccgacgaactccaacgacagacccggtatgtccatcctctctattccccatggtacaatccagatggtggcacgagttcatctgagctgagtagttgggggatagcgtgaggagagagaaacaccaaatttggcatagggagggctcggtttgaaggacctctaaaaatgacgtgtgtgatggaggctttggtggagcgtgttttttcatctccatacgctaaaaatgggatggatggctagatggaagagctgctcttaggctgtgttcttgcgttatgattggaacttcttccctagaaacgtaaaacgaaacaaacttattattgcatattagcttaaaaaactttgaagtggattaatataaatttttaaagtaacttttctatagaaaaattttataaaaaaacatatcgtccaaaaacatgtgcgcggaaaacgagccagtcgaaaaacacagcctgatgcttcggcccggtttagttccccacttttttttctcaaaataccacatcgaatctttaaacacatgcatggagtattaaatatagataaaaacaaaaactaattgcatagttagggagaaaatcgcgagacgaatcttttgagcctaattagtccatgattagtcataagtgctacagtaacttacatgtgctaatgatatattaattaggctcaaaagattcgtctcacggtttccaggcgatttataaaattagttttttcattcacgtccgaaatctcctttcgacatccgattaaatatccgatgtgacacctaaaaattttcttttagcgaaataaacatgcccttctacctttctcccttgctacgagtactagctagtactcgtactttatttgccggttccgtgatgcttcattggtcacaaaaaatactcgacatattgcataagcatgtgatgaaattctttaaaactttgtaatcatatttagatagttgtacgcgtgaggctacctaggcctccaatatctctctagacgagtgttagccacgcacgtggatgtgtgcgtccttgagtttgcctaacttgtactcgaaaagaatatttatatatttttttctcagaacatatttttcatgatagtatagtgtaatattagtttttaatttctcatttattttttgtatgagagagtagattgttcaagaggtcgtcttgatctctggacttaattgtggagctaacctttacccagatatacacctggctcaaccaggtattaatgccaaaaaaaaaagttattttctgctaaatggatgaatgtgcgtgtaacctgaactcctaaaccatgcgattgttgcaaactttttccatatatgatttgttgtaatattgtttcaaatccatttttaaactttaaaatgattgatttattcatttgtgctattgaataacttttgtacaaatcttccatcgaattaatcattcagcccaaaagaacaccggaatgggtagtacgaaaaatattaatggaaaactatatatgcttcacaagttggaaaagtcatattcatcattatatagttagaatctttcccccaaaaaaacggaggcagacaaactgtagttgaatattgcaaaaatagagggagcgttattgttgctagttgtgtatgcctgtgcgtcaataaacaaaatcaatacgtttcgtgagcttgtaaaataagattcattgattctcggtagcgtgacactgcagataggctgtggagtattatgcatttattatgttccgttcatctcaaaattagcacagcacgaaaattaattaattaacgaacccgatttaatccatggcacttgacaccattcgatccctatctggagggattcactgatactgaacgctgaccattcgatccctatctggatggattcactcatacagcacgaaaattaagtagtaagaatgattaattataatacttctaaagataagtatgagatttgatttccccgggtgtaattatcaaataattttgtccagttttggaacagatgtgagtgtagtaggtaaggtgtgtgcggtgtatgaattgggacgacggagcgatgtaaagaattagataagttagaaagggaaatgctgtattacaaatttacgagccctctcatccacgtaaaaaaaaattatactactagctctgtcacctggcacgtaaatgatagtgacgtgcaattagttgatactgtgatttttctcattggttagatcgcacgtgcacggtaagaaaaacgtaaagaaaatgtggttgtgcattcgttgacacttgggtgtgttcttctgggctgaaggaaataaaatgcaatgctgaataaaatgattcaagggcacgacaaaatgaagtatttagtataaagttaaagaaaggatatagaataatattttgagaaaactatatgtagaaagttttctgaaagctcaagaagcatgtgtacttattattatatccaattccattaggtggaaaagaagttcaaaattctaggtttaacacctgtggccgattatattttataactttatatgcatgtatatacatgtatgtaatgatacgtgtatcaatgctcttaaagcatgatgagcttgtttagttcagtaccataccaatattggtagtgctaagatttagcattactacttttttaaagtagggtgcaattgtatttggtttgatgtcaatttagagtcaaactttgagtagaatcaaaaatttttggggagtagctatatttatgacgccatattttttattaaaaaatagtcggcatgtgtttacattgtaagtccctaaattacatatgtaattttagtgtatttacaatgtaagtctcaaaattacatatgtaagtcctaaaattatatatgtaaatttcaaaattacatatgtaagtggtgtgtaagtgggatgtaattactatgtaaatttgtataaatatatgagaagtgtcttttttttttaagaaaagatgtttgctaagctggtatgagcgtgctatgctgtactcccggccttagcatactgctgttttagcaccaatcttgacatcaattcaatgcaccacaaatcgacatatttttaagggaaaaactgtcaccactttttatagcgtttctgaatttaaattagacattaacaacaccaatgattcgacttgaaacaaaaaccattatccagactacccaaatattaatagggcatgttttgacattacggatgtctcaaacaatatttaaagcacgtgtgcacggtacacgtgtcccagatggagtagtttacccaggggaaagggacgccgccgcaccggacgaagctgctgccataccactgccagatggaggtggcggagcaccgaactaacgacgaggccgtccccgttcctgttggattggactggaccttcgcgtaggagcgcgccgatacagacaacgagacaagccgccgtcgcgtatctcatctcgtgtcatcgagtggtgtgtgacgctcgccgaacggcgtctcccccaccccaaatctcacttggttttggacctcccgactttggtacacatcacacaacacaacacaacacccggaaccaacagagaacaaggcgccaaaccaaaccgccgcgcatcctcctctcgccgagcagcagccagccgcggcgcacggccgcacgcacgcgcgcgcggcctcacccgtaaaaacgacgcgggagcacggcggaaatcgctgtcgacgacgatgggcggagagcccccccgaaccgaaccccaccgatcagtttcttccatccaccacgtcgcggccgcccgcccaaccgcctcccgccacacacacacgacacaacccgcgcgcggtcggagaggccattctcgccgtatgccagttggggccgatctcccgggggaaaaaaagaaaaaaaaattaaaggacacgaaacgtttcccagtcgacggacggagcaaagcgagtcgtccggatccgctttaaaaccgcgaccacctctgcttctccccttctctctcctccctcctcccatgtcaacggcggccacccccctcctcctccacctccacctctagagagagaaagccctcggccgccgccgccgtgttcttcgtcgtcgtcgtcttcttcttctgcggattgtggtgctcggtttggtcggtgagtttgggtggctggcgatggcattcgcgggggacgcgcggatcgtcgtcgtggcggtggcggcgttcgtcctcgttggcgtggcggtggaggggaagggggaggggggaggaggaggaggggtgggggtgtgcttcgagaggatattcagcttcggggactcgctgacggacaccggcaacttcctgctctccgtgccggaggacttcccggaccccgcccgcagcctcccctacggccagaccttcttcggccgcccctccggccgctactccgacggccgcaacctcctcgacttcttcggtatcacccccctcctcctcctcctcttcatttcatttttcttcagatttttttttctctcatcctgccatccgggaccgggacccccttcggcttccctgtttgttttgtttattctgttggtgtcgggtccccctctggtaaaatctcctacgttttggtggtatgaatggatcaatcgatgcagcaatctacttgaagattagtagtagccgggtaattggattgattagttactactttttggttcttggtttctctccttgatgaatactccacgcgtttgatttttcttcaagtaataaattcatcatcgtttcttcttgtgagccggcataagcggtgtggcgatgatatagtatgataatttccactgtttttgtatgcctgcaatgcatcgaacaagaataagccacaaatttacttgtgtctgcaaatttatcaattggcctcactgatcataacaatttgaaatgcgcgtgtggttcagagatgtgaactagttatagcaaatttcactgcaaaatacccaacttatacagggcgtatccgcaaaatctgcttaccttccccagtttcccccaaccaacagaccatgatggcatcgtcttcttgaacaagcacacaaatcggtagctccaaccaccactgaatcagcattcacatcactcacgtggtcaacacttttattgcagtcttcccaaattttgtgtcctttgctaatagtatctgttccatggggttggcttcctcatgttcttgtatcttagcagctgctgtcgctagcttcattgtccttagagatgacgtgcactaacattcttttttttttctttgcgtgaccagcggaagcatttggtctgccgttcgtgccgccgtacctggctggcggcgacttccggcaaggcgcaaatttcgcggtcggcggcgccaccgccctcaacggatcattcttccgggaccgcggcgtggagccgacatggacgccgcactccctcgatgagcagatgcagtggttcaagaagctactcactactgtctcctcgtcagagtccggtacgtcaccctcctgagacctggagttctttgctgttgctactagtatgtcggataagctgatcgatgcatgagccgttattaaccgtgttagtagacgccaaggaaacatgtgagcgtggcatcacagcatgccagtggatacagtaaatagtgtccaaacatgctgaaaaccgtgcagatgagctggccacctactggccagaatggttgttcagtacgagcaaattgctgcatttagtagagtggctcctttccctgtttgcaacttgcaagcaagcactttgtttttagttggcttgtaagctaaagttcactagttaaatggcaccgcaaaactgctacttggagccttctgattaggtgaaaacattctgtgtccttatatgtgatgagatagccggctgtgcaaatattgtaggatatttgtggaaccatgtttaaccagcaggctggtttgacaggttttaaccagcagcaacatgttagaaaatctttactgggttgtcaaagcaaaatcatctcgtctaactgttctagagtggcactgaattacatgcatggttgagacataaaagccaagtccataattccaaaatcgatgaagtacacatagtggaactcaaaagccaattataatactttctcagcatcttgatactatgcatacaaaatattatgaacgaaccaccttacaacaacatacggggggtttcatttttggtttctcctcacaagtcacaagttgattccaaaatacctgtgcgtttcatttttctgatgtcacaagtttaaaaacctaaatctcgagctacatgtccgctaaattattgtctatctctgtgcagaactcaatgatatcatgaccaagtcacttttccttgtgggagaggtaggcggaaatgattacaaccatctaattgtcagggggaaatctctagatgagctacacgagcttgttcctaaggttgtcggtaccataacctcagctatcacggtatgcatatcacctgcctttacatttatgtgcgatggtgaatttttatgaagccgtgttcatagtttacagttttgcaggagctcataaaccttggagcaaagaaactagttgttccaggaaactttccaataggctgtgtaccattgtatctctcaatctttccaagccaaaaggaagactactatgatgagaaaacagggtgcattaaatggttaaatgaattcaccgagtaccataatcgattgcttcaggaggagctggagaagctcaggaatctttaccccgatgtatccatcatttatgctgattattatggtgctgcattgaatatattccttgccccactccagtttggtgagttccaccttccaactaaaaaattattaacacagagagcacattttataagtggtaagaatatttgagatttagttataggtcaagcataccttagtcaatttacatgagccttcaaaacttccaagcgtacctggcctgcattacattcatttcgtgaataaacttcaattaggaagaagctgatggttatagtcaacatggatctgatagtatatgctaaaacctgtcagtatttactggatatagcctgtattggccctccatgatatacaaagctctctgacttcgatgagcttctatagacttgatgagtccatgagccaattaaaatttattctattaaattttgctaaaactgttaacatggctagcatatatcatatgaactttatgtatccatattgattctcaatgttctaaaagttacctcatgtccacaaagacatgttttggtgacagatggagtaacttgttgactttaggtataagtaactaatggtctgtaaagttggtatattcttgtgctatattttttattagtaacactatatgatcttagataattcagataggcgaaaataggtattcttttacctatgctactgaataagttgcagaaacctatttcgtgctccactgttcttgatcttattgtgaccttgatgatgcagcacagtctgcaccccaccagcagggatctaaactagccttgcacttatcttcatatgcataggcattcttaaacatggtcgaggtagtttttaatcatctgaagtgttaaataactactggcgattaatcgaaatcagagcttgaagatgcttaacctatccacgtaacacatacagaagccaatgtttacaacataaggttcactagtcgcattcatagcataaggcccagcatttgatacaaagtcaacaaactcgtcggcccccccccccccttttctctattttcaaactgaccacttttaccagatggaagagaagtataagcagaaatagaaacacaggaaactatgtattccgcataaaacttttggttattgacaaaaatggggctaagaaaggttttgtgctattgcaggtttcactgtcccgctgaactcgtgttgtggaagtgatgctccatacaattgttctccgtcaatattgtgcgggcaccctgggtctgtggtctgctctgacccatcaaagtacacttcatgggatggtctccacttcacggaggcaacctacaagattatcattcaaggggtgctagggtcatatgccaaccctcctctttcagaaacttgtcggggtggagcatacaaagtctcacaacttcatcaatgtacagataacccaacaaacactgtaacgtatgattctatgagctcttttatttgatcctctgagctctagggcatgtagagtattaaggagcaatatagatataacaggccccatccccttggacacttctcaaaggtgagaagagcattggttggggatctttgtacttctcaaatccatttttctgctacaggtagaaaagagattttgtagagcagaaatttgcaattgccatgtccatggctttgcccaacccatttagtttctcagaaatttactgcaacgggaaacagaaagtacaccgtatagtttttcttttagtatggtcaggttgccatgctatatagtatactctatataggaaacaaggttcatgattcatctccaaaaggacaatgtattcagtactgtaggcctaatttccttacaacaaaagcgtatacttgatgcttgcttgttcagcagtctgctgtatatgatcaccctgcaatgttcagttccatatctgaaattggtcctcctgtcttctaagagattgggcctgttcggaggaattttagattatggtaaaatgataagcagctagtgaatctgtagaaattgggaaaattggattctgtcttctaattcattttctagattctataagcttagcttctcagaatctgaatgagaagtagactgtttgaagaagttctgattccgagagaagctaaagctgtcagacgagcacatgaatcaactctgaatgtttggcaactaacaatgtccaaagtcaggctccatggagcaattctggcacggttaatttcatcattttgaccaattagttgccaaatattccgagtaggttcatctgttggtgtcatgttgatcaggaacaggaaactgtctcatactcgtactacctagcaacagaatgaaccattcaagaggatccatgtcggccaaaccaatgaacatgcagttccaaacttcacacaaccaggtcaggtggcacctggtattgttcagatacttcgttcctgacatgtcattacatgattcaccctgacacccgacttcttttatttatagtaatcaataatccttcaattaaatgaatagtaattagaggcaacaaattaggaaaatgggcaggacgataccactttctggtattgtcgacggcgtccaaggtctggtcagtgtccactttctggtttcacaaacggaattggaagccttgtctctggtccaccgcgccaatctcctcatggctgcggcccacgggccgccgctctcagctgctcctcacgacagctcccgtggatgatttcttttttttttcagaaataaatacaacttcaatgaaaaattggcaaaatagatgttagttgactgaaattacctatcgaacaacggttgtttgatagggttagcacagtaaaaaaaaaaggagaaattgggatgcgtgcgtatacatatgagtagaccgaaaaggctaacagacgatcgattgcccctagcgatcacgtccccttctccacgtggtttctttttttttttggcaccgattacttttctatttttgtaaatttatgcacctaaagtttgtacacctcaagtttaaacatctaaagtttagagacccaaagtttataagtcaaaagtttatatatctgattcaaatttgaatttgaattcaaatattttttatatatagtacttttatacacctaaaatttatagatctaaaatttgtaagtcaaaagtttacatacctaattcaaatttaaatttgaattcaaatattagtttatagacccaaagtttataagtcaagaatttacatacccgttttaaatttgaatttaaattcaaatattttttatatatagtatttctatacataaattttttcagctttgtttttttattttttttaaaatttatggtgtagcagaaagagaaggagaggagcgtattggggggggggggggggggtgggggtgatcactgtgggcaatcatccgcccattagccacgccctgagtagactgctacatgtgagcaacacctatcgaattttgggagttcgatttatggaactttggggtttcgatagtccacctgcatgcttgctcttttcgtttttttttaatcaagtcaattcccatgcatgctctttttgataggatatgtcaagctacggctgtttggcagggtgctaaatttgtgatttcagtcgaccaacatttattttgcaattttctattaaagttgtattatttctaattttttcccctcatctatcctccgccgccgcgaggcgcgtccacgcgtgtccacctctcgtcatcaccagaccagctttactatggaaacatgtataatgccacatatgtaatggaaatgtacgtttgctgcatatcaatgtcaccgtaaataaaacttttacaatagtaataaagtttcattataagttttcctcatacatgaagtaaaagtttactcatactgacgtgaataaatctcatctaattttacatcctatggtccactatatatttttcctactgactgacagatctgtcgtcttcattcagattggcagatccctcgtctgcaatttagattcagctacttttgtgcttcattgggatttctagaatccttatatgtccgtcttcatatacaatgtctttgtcgtagatcgtaatgtctcgcaactatggtttttaggtagaaaattcgttctgttataaaacttgttcggattgttgatctgagccggtttagtctttaccgtttactatgatacatttatgtttcggaattgctaaccatcatttggtagaattttagggtgaattttctgtctaattctccatcattggatccacaccatgattcgtgttccaatccttcttctctagctctagcacaactccgacgagatggccacaacctgactagttagagtttcgggattgaggtttgggttggaaggggggagggagagggggagagttccccggtcttagagggatgaccgtggcccgtggaggcaacatcccaacagtgggcggtggaatgggtgagcggggaaggtggcgtcaccgttgccgctgaagccacgggggcaggagagggcggttgactggtgttggtagcgggagcaaagctaggagggggcagaggtggcgtctttggtgggggactatcggagatggaaaagatgacgggtaggtactctctgccgatggcttaactgggggggaggggaaggggaaggtatggtggacctcgttggcacgattgactcgtttccgatgctagcaaggctgggtagtgacgtggtgggcagtggcggatcgggaggaggatgaggctgactgatcgattaaagagaagtggtggtgcatgaagggaaataggaggaataggagagagttatggtcaaagaattacacgaatattaaagcagatgtaacgataaaaaaacgaaaattgtggggtggattttctcacatgttgtatagtcaatccatttaggttttcatatagaatgacaaactttgtcgaatgattacgttgacatttagttccttgaattttttagagacatagcacaaacgcatatactctcaatacgcgcacactcgtccctattagcacctccgaaaaactggccaacgtcactgtaattgtctcgcaatcgacgagtatgttgtctatcaatgaaaaaataattagtcataaatgtgaacatccatgttaagttcatgagctgattccaccacaagaaacctaacaagttaagctacgctcacattgtatttagttcatcgatattgatgcaaagcgtaagttaatttttgcactggcttgtttcttgacacgtggactttttgtgaagacaaccgaaatttacgagaatgattcacgtcggtcgcccggcgcggggggagccggattgggcgctcccctcgcgcgcccctccccccacgtgtgggcccacccacttctctctccttttttccacaaaagatgtttcatctagtataattacaatgtttcactatttataaatataatgttgcagtgaattaaaatactctttttcaacaaaaaacccacatattttggaaactctctattaaggaaatttggtttattttttattctaccaaaaatatttcacctagtgtactcacaatgtttcactatttatagatctaatacagtgaacgaaacattccattgcaacaaaaaaaacccacatattttggaaaccccctattaagggaatttggtttattttttgtttcaccaaaaaatgtttcacctagtgtactcacaatgtttcactatgtatagatttaatgttgtagtgaactgaaacattctttcgctatttgctgaaatattgtttttatataaggtgaaacaacacccaatttaaacgagtgaaacattttcgatctacttagtggaacaattctgatatacttggtggaacatcgtgcaacatttaaaaataattcaataataagctaattttttttgtcggaatatattcatgtgtggtcttgttttgaagatttaattacaacaaatttaatggtgcaatcggatcatgatttagataaataatttaagagaaaaatcagtgcgcctgattttttttccaaatcgattgggcgaccgatccataggcgcgtcccgaaatttattcttgatcctgaaattctatcttagaaagaaggtaaacatccaatatttctcctgtgaaatgttctgccgtactgctgctcttctgaatcatgattgtggcaacgagtgtgtatccatactcattagttgagaaaatattcccatgtttttttgcttaacccaaacgtattgtggtcgtttacatttcattgtttttctgtcttgctacagcgcaatttattataacttatatgtttatgcctacagaacatcaaatatctcatccatttatgtgctaacatgtgaggcaaatatccaactgtctctgaagctctacaaataaagacctaccggattccatgatcattatgacaaggttgtgtttgacacaacatggtactcgctctatagattaataatactggtccttttgaaaagaacacggtcttaaaaaacaattttaaccactattcttttattaaaatatatatagaaatatcaataaatctatgattattttgaaatgcattttaagacaaatgatttagatgttatttataattaaagtttttaaaatttgacaataatcttatccaaaacaatgagtattattagcttggggagagtacttcctatagcataagatttgactaactttgaatgttttatcattacagatgtatagtcatgtcgataaatgggagtacgtagtatttttttatgaaaaaaattcaaatgtaactatattttaattaaagtgtaattacatcgtaactctgttataattatactataactacattataactacattgtacattgtagagctacataaattttgataataaccttttagatagaaaacttttaaatgtaactatagtgtaattaaagtataattacattttaaatctactgtaattatactataattgtaacttatatatgtaagtaataagaaatcgtcaatagaaaacttgttcagatagctagttccatgcgcttgtaacgtcgcaccatttttttcccgctttcttgcgcgaatctcaatgcaatatggttcatgaaattatatgttttggaagaatgtcaatagttttttttagcaattccttttttttttctttctagttgtttagtccatcaagccaatttaaatactactccctctgtttcaggttataagacgttttgactgtttcaggttataagacgttttgactttggtcaaagtcaaactacttcaaatttgactaagtttatagataaaaatagtaatat

SEQ ID NO: 9655 - DNA, 18091 bp, Oryza sativa
cccccccccccccccccgcgtcgggcaccggccaggagcattttcaaaaaaaaaagcacggcaaataaagtttctatatatctctttatctcaatctaatctacatctctatctctatctttctctactactttcataaaaaaacatccgacttccgtaaaaaaaggaaaaaaaagaatcaccaataaaagaaaacgaaaaaaagtccgactccgtaaaaaggaaaaaaaattctcacgctcgactccgtaaataaagggaaaaaatgtctcatacgtaaaaaagaaaatttctgactcccgtacaaaaggggaaaaacacttgtctgtacaaaaaaaataacatccgatttctatggaaagtttttttaaaaaaagtatcatcagtaaagaaaaaaaaagtccgactcccgcggaaaagaaaaaaaatacttctcacgtccgactcccgtaaataaaggaaaaaagtctcatccgtaaaaaaaacaagtctgactcccaaaaaaaaaaggaagaaaaacgtcttgtcaaaaaaaagaaaaattgtccgacccaaaatcaagaaaaacgcagtttataaaaaaaaatcccgtttataaaagaaaccgttcgaaaaaaaccactcgactcaacaagagaaaaaacatagtttacaaaaaatgttttaaaagaatattcgactcaatgcgagataaaaaaaaccgctccaaaataaaccgtcagaaaaaaaaacattgtttttttaaaaaaaagatccaagaaaccatccgaattcatgcgagaaaaaaagatataaaaaattgtctgactccacgcgagaaaaagccgccatatatataaaaacccgcgtttataaaaaattctggttcagtactgtgttatgcgaaaaaactatatgatttcagaaaaaaaaaacatccgatttcatgaaaaatgattcgtattgtttgtatcatccatcgtctaccatgtcattttggtttttccaaagtgtcatcgaaagttcaggtatgcggatctaaaacaagtcttggtttttggtttttccaaagggtcatcgaaagttcaggtatgcggatctaaaacaagtcttggttatgcttggttttctcggaacgagatcaaattggtcgaggttttgggtcagatacgatcctcgatttttccatctcctacatggtttgtgttccgcgattatattctcatatattagagaccctgcatatttatatttatgtatgtaattatcatactactggacagtatagctaattcttgatagcttatcatataaaaacaacaataataaataaacaattgttactaagaaatagtgcagtgaggctctatttgtctagacttaccatatgagacaatgtaggatcttattgatccaattattaattgtaagaatgagattaaaagagtaatttagattatatgtgtacagcatacataaataatccacttcatttaggcaaaacatgcgttagaaaggttgtcatcgtcgagatcgggtcattatattgaagatgtttcaatttttcttataatatgtcttagctacaacgatcgatacgattattatcattgacacaattatgcgtggaaagcgtatattgtcatcgaaatgttttcacccgttgcaatgcacggcatttattttctagtatataccaaattagaaaataaggcttctggtagttttcttttttggtccatcttttttttcgcacgcgcgattttttcgtacgttttttgggcccggtttttcccgtccgattgttttttttcgcacgcgcttctaatagtttttttcgaccgtcgtcatttttttccacacgtggttttatttgtggggctggtttttcccatcgccacctgtccctttttttgtcagtccaattattttcctagtgggtggcaatttttttttgttgcggttttttttgggtgggcccaggtttttttccaccactgtttccgatcagttcttttgcgagcgcacgtggaaggactgaaagcccaaatagtcagatacaattacaattacatggctcaggaattacatacagagtccaagaataggaattacatggccaaggcccaagtaggataaaaaatcttctcaacctatatcgtactttggtacgtcatgagtcgatttttttaattttatgttatctttactacttaaatttctgttgtctgttaaaaaaaaaagtccgacccaaaaaggtaaaaaaataataaaaaaaaaggtccaactcaaaagcgataaaaaaaatctgtcgtcagtaaaaatctttatctatagtaaaaatctttatctttatctttatttttatctattataaaagtttaagatgtttttgtcaaataattttgtacgccgcccgctgttggcttgggtctcgagtttgtatcgcgttactccgtaactcatctgatcggttgatccacagcgcaatcggatttcgatttttttttcttccatcgtccgaacagctagcaagcccgcacaaacaatttcgttcacgtttcacccaagctttctttctttctttttttttttcgaggtcacccaagctttctgtctctattccaacctcccacatgcgccagcacgattgattaattaagcatgcaaccaaagaacgtgggagacaaaggcaaggtccagtattgttgtagccgaagtcctcgaggtagccaacgatgcatgcagccttggtatatatggcgctcacctgttgtcccttttcaccatgtccactctaacacacaatatggaacatatatatacaaggttggaaaacgtatgaattattacgacagtatgaattagtccactgaaccataaaaccagacatattaaacctcgaattattgataccggatgaattaccccccctgcccccccccgactcaattcaaagtggttttgatcctacgtggcattttggtacatcatctgtgtatgagtcgatttttaagttcgtttgtttttaaaatacatatccgtatttgagtcggttttaaatttgtttgttcgcttttggtaatacagaaggaatcatataagaaatttgttttaaaaaaaactcgcatgataacttgagacgaccagactcctaactgtagctcatgattttctaaaaatatatatatccaaatgatttttcacagtgagtttcatcttaactaaaccatataacaataataagtttaaaatagacttcactcgttgtaacgcacggatattttatctagtagaaaaaaaacatctcgtccgtcttaaaaaagaagaaaaaaagtctcgccagtaaaaaaccaaaaagaaagtccgtttggtttttaatttggcacgggtatttttttctgatctttttgcacacgaaagagtttttttttcgcacgcgcttaggctcttggttccgtccattttttaatctgatcgcgcctcctgtcaattcgttctgttcgccgcacgtcgcgccgctgccatatcgattgtgtgttttctactccaatttgattgcaaaaatcgattccccactcctccctcatcagttgctaatgatgacggcgatcttcccggttggttgtttttatctcgagctgattttggaaaaaaaaacagaaagaggagatcgagtggataaaaaccatcaaccaattttggtgatcgagaaagattcggatttaattgggaacaaagagttttacactctgattttggagaaaacgggaagagaagatcgactggataaaaaccatcgaccaattttaggtgatcgagaaagattcgaccatatttgatagggagatttgctccggcagctgtacgtccacgtggccacgggacagacaaccgtacggccacgggactatcttcgggaggttgaagatgatagtagactgtgcgagctacgcttatggctgtaggatcgagatgtcgactagaggggggtgaataggcgatttaaaattaaataacacctaatcaaaactaacctaagttgttaggcttggcgagggacaagtctaactaagcaactaagttatgttttgtaatcctagggtgaaagggtctcaagtatgtctctaggaatataaattgcacaaatgtaaatgcgacaaataaatgagacaagttgacaagagatttttcaccgaggttcggaaactcgccggtttcctactccccgttgaggcgagcccaactccaccgctcaaccatgaagacaccgcacgcccccttcgtcaaggggtgtatgcaattgaaatgagtgccaagagagaccccttgctgctggtgggggagtatttatactcccaccaaccaaaactatccgttgggggcgaaatcccccaattttgtgtactgctggtctgaccggaagtatgtggccggtcagaccgtgctactctgcaacggctagttttctagccattgtagccttgtcaaagggcccatcggcctggccggtcagaccgacgttgagtggccggtcagaccggcctcggctcggtcagaccgccctcagctcggtctgaccgtatacggctccgtcagctctgtatcggccaaccccgagcactccatcccggcctctagggggccggtcagaccgcccctggtcaagccgaacacagtgaatgcaagtgtgtgtgaaaagtattaaaacaaatgtgagcacaagtgaatatgaaaatgacctaatgtggcaatcaagatcatctctatgctaggtcattacccctcttaatagtacggagaagctaaaattaaactagcaaatttgatcgccctacacctcgatcaatttaaatataaagccctagtttaccatcttcttttccttcactttgcgccgtcaaattttaatccatcgataataatccatgcgcacatatgacgtggtactaacacaaaataattaactcaaagagaaacggttagtccacaattagcgcttgtcattaattatcaaaatcaatctccccctttttggtaattgatgacaaatacttcaactatataacatcaaacatgaaacacatggacattttgcaatgaaatgaaaatgatcccccgaaacatgtgcatatcaatcacaaatagcaaatatgaaacaaatgcactttcattcacatttcaacatagtacaaccacatatggaacatacaatgtgaacttcacatagggatcaaccaattgcataagatggtcataaatatatcaatgtcagatcaaccagccatcatagcacaagttcatccatagatcataaacatccaacttacaagagtttatccatatagggctcacaaataaacataggctattacaagaccacgaagggtccaaatgacatagagtttaacaaaacaaaaaaataacacacaagataaggtaatagcccatacccatacataattatagcccatccgccttaacctattagataggaggtagctaacctcactactcttagtcccatcccgcaaaataaaatgcaagcctagagttcttctcccccttttggcatcaaggacaaaaaaggcttcactcttgtggaggacaaggaggacgggtcgaagatgaagggcggggagcatcacagctgaagcatcttggcccccggtattaattttagtaattaatgataagcactaattgtggactaaccgttcctttgagctatatattttaagttaggttcacattatgtatgcgcatggatgtctatcgatggattaaaattgacggtgcaaagcaaaaggaagaggagtcggtaaactagtgttttcatttaaaattgatcgaggcgttgggcgatcaaaattgtgctagtttatttatagctttgtcgtactattaagaggggtaatgacctagcaaagagataattttaattgtcacattaggtcattatgcatctaggcttgtgctcacatttcacaacacacaccttttcactgagttcggcctgaccagggccggtctgaccgcttgctccaagccggtctgaccacaggtcagaggccagtctgaccagccacctagtggcggtctgaccggcgtaactggtcggtctgactggcggcacttgtgcggtcagaccgccccctggtggccgggatggtgttgctctggtttgggcgatacagagccgacggagccgtattcgatcagactgagctgagggtggtctgaccgagccgaggccggtctaaccggccactcaacgtcggtttgaccggccagggcaatggggcccaatgtcaggcctacaacggctagaaaactagccatagagtagcactgtctgaccggccatacacctcaggtcagaccggcagtgcactgagttgggggatgtcgcccccaacagctagttttggtgggtgggagtataaatactcttggcacccaattcaattgtatacaccccttgcacctctctcacacacatttgagcttagtgttcatccattgtagtggttgaggttgttatagccaagagtcaagtgcattgctttccacatttctcatgagaagcttaagaaagctcatgacaaccttctttccactactcaacatggagctcacattgatgttggcatatcttgtgatttgcttgatgatagtgcttcttgtcatattcctcatgttgcatcatctagcatttctacctcttgtgatgatcttatagatatgcctagctctaggtcttgtgtttctatttgtgatgtctcacttgttgttgagaacaatgagcttaaggagcaagtggccaagctcaacaagagtttggagagatgcttcaaggataagaacactcttgacaagattttgagtgaacaatggtgcatccttaacaaggagggacttggattcatttcaaagaagggtaagaaaccttctcaccatgccactcgttttgtcaagagcaatggtaagtattgctccaagtgtcgtgaggttgggcatttgatgaatgatggccccggtggtaagccttctaagacatgcatgtttgattctcattatatgtttaggaagactcatgatggtagtattgttgctagatatgtgggttcccctatacttggtggtaaaaagaatgccatttgggtgcccaaagctttggtctctaacctccaaggacccaaacaagtttgggtacctaaaagagtttgatcttcttttgtaggtgaactaccacaccggtgggagctattgggtgcttaatagtggatgcactcaacacatgactggtgatagggctatgttcaccacattggaagtaagagggaaagaacaagagaaagtgacatttggagacaatagcaacggaaaggtaattgggttaggtaaaattgctatttccaatgatttgtgaattgaaaatgtctctcttgttgaatatctaaatttcaatttgctttcggttgctcaaatttgtgatcttggctagtcatgtgctttcttcccccaagaggttattatttctagtcttcatgacaagtcttgtgtgttcaaaggtttttgatatggaaatctttatttggttgatttcaattctagtgaagcaaatttgaaaacttgtttagttgcaaaaacatcattgggttggctttggcataggaggctagcccatgttggcatgaatcaattgagcaaactttcaaaacgtgatctagttgtgggcttgaaagatgtgaagtttgagaaggataagctttgtagtgctagtcaagccggcaagcaagttgcatgctcttatcctactaagagtatcatgtccatatctagaccattggagctcttgcatatggatttgtttggcctaacaacctataagagcattggtggtaatagtcattgtcttgtgattgttgatgattattctcgttatatttgtgtgttctttttgcatgataagtctattgttgccgagcttttcaaaaagtttgcaaaaagggcccaaaatgaatttagttgcactcttgtgaaaattagaagtgacaatggttccgagtttaagaatgccaatatcgaggactattgtgatgatcatgtattaagcacgagctttccgctacctacttacctcgacaaaatggtgtagtggagaggaaaaatcgtacattgattgagatggcaaggactatgcttgttgaatatgatgtttctgattctttttggacggaagccataaacatcgcttgccatgcaaccaataggctttatttgcatcgtctcttgaaaaagacttcctatgagctaattgttgggaggaagtcaaatgttgcctattttcgagtttttggttgcaagtgttatatttaccgaaagggtgttagactaaccaaatttgaaagtcaatgtgatgaagggtttcttctaggttatggctcaaatagcaaggcataccgggtctacaacaagaacaaaggtattgtgtaagaaactaccgatgttcaatttgatgagactaatggctcccaagagggacacgagaatttggatgatgtaggtgatgaaggcttgatgagagctatgaagaacatgtctattggaaatgtcaagcctattgaagtggaagacaagccatccacctccactcaagatgagccatctacttccgctacgccaagtcaagctcaagttgaagtggaggaggagaaggcacaagatccacctatgccactaaggatacacaccgctctttccaaggatcatccaattgaccaagttttggatgacattagtaagggtgttcaaactcaatctcgtgtcgcttcaatttgtgaacattactcgtttgtttcttgtcttgagccaaaacaatgatagtgccataaagatagccaataacccggtccaacattctagaaccaagcatattgacattcaccatcacttcctaagagaccatgttgccaagtgtgacatagtcattagccacataagaaccgaggatcaactagccgacatctttaccaagcctcttgatgaaacctgcttttgcaaattgaggaatgagttaaatgtcatagatttctctaatgtcgcttgacattgtgcaccatggttgcctcttgttcatcttgtagatttgctcttatttgctcttatgctttggatttattgccatttggttcctctttgcgaaaatggagcatgtcacattaagagagagttttgcactcttgcatgtgctctacttccttttatgtgtgggcaaatcaactagaagtgctagtagtgctttcaaaatgcctaagtcaacataagtcaaaacttttgcaaaataaatataatttgaaaactatctcttggaaaatgtttcaaaaggttccctatatgttttccaagcctcacattgcaagaaaaatggtgtttgaatgaaaatgtcgttttggccctcttttgaataatttagattcttatttttggccaaaatgggatttatctccaaaatgagattgagagagaattttaaaaaagtttgaaaacaaagtttgtagagaagaagatttgaaatgtttttggtattcaaacctatttcaaaaacaaatatttcaaaagttgtttgaaaatcaaattggcccaaaaacccctatagaccataaaaggtcacctcctagcacttaagtgagtttagtcatcataattttcaaatattatagatggttagcaatatttaaactcacacatttcaaaaattgctctaaaaatcaaatttttattggattttattgtgtgggggttgccggcttgtgcaagggctgtacacagccggcagggacccgacggtctgaccggcgctatatgtgcggtctgaccgaccgggtggggcggtctgaccggccgcatagggctggtctgactggccaaggtgggcccagggatttattccccccttcttctccaacccgacccctactctctccttctcatctccattcttccccaactcgaaatttccttctctctcacctcccctcaaaccctaactcatccctccatcaaatcccctccgcttacaccgtaagtgattctcctccgcttcctctctctattccatgaattactttgcgtttttattgattttttttatccatggcatggaaccctaggtgaagcacgaggtgttcttctatttgcaccaatagagggtagtttcttggtgtgattcaactccttcaaccggtaaatcacactccctcttgtgcattacttcaaatcgatctatttcaatcttagggttaatggtagtttccccattgttccaatcttgatgaaacagttcctaccctttgttgctcttgttccaaccttgtgctgtattgttctagaaaattttagactcaaatttgtagttgtgaaaatttttggatgcttgaacttgtgggaggtggtctgcccggagccacaggccgtctgaccgtgggtcagccgccggtctgaccgacttgtgctctcggtctgaccggccgacacccgtcggtctgaccggccacctgtgggcggtctgaccggcctgatgccgtcggtctgaccgccctacaagctgcagtctgaccacccctccgcaggatataggcaaaattttcaccgcttccaaaattgcttctaaaattcttgctaatatcctatcctctttgctctttgtcatctatgcctccccacactcgccatggtcgtcatacgcccactctgaatcctgtgagtgagcatgaggagtcgagcggagaggaatatgcttaaagtgatgaagaagtcgaggaacatgttgagggggccagtgaggaggaaagtggagatgatgacagtggtagtggggaggatgaggaggaagaagatgatgagttgcaagttgatccctctattcagtttgtagtcaacatgagaaatcctgctcagtataccatattacggcataatgatcagttcttgagacctagagacaccacggatccccggttccacaccgcttttcagaagacagtgtatgagtagatttatgtggggaaagcttttgcggatcacaagtggatctcttggagggatatcaatgagaccccagaatttcaaagtttgcatgatctcttcaagatagttggcattgaccggattatgaccctcaagcaagattacaatgaagacttgatccgccaattctacgatacagtgtgggtggctggagatttcagtgagatgaagtggatgtctgacaccctccagtgctctatctctcggaggcagttccggaggcagctcaacattcactttgattttgaagatgatttgcatgaggagcacactcacaacccgctctccattgactatctctctcagttctctgaggatggagtgcggtacacccatgggaaggttgccggcttgaggactatccctggtgtggtaaacagaattgtgagagccaccatcctccctcgccttggcaacaatgatgacaatagggggtggcttggcacgtcattgatgctatcattcaaggtcgtcagtttgatgtggtgaatctcatgatgcaagaaattgctatctccaatggcacattcactcagggcatctactatgcgccatatatcatgagattgatactagacaagcttgggggtgccgggaacaatttgaagaagcacaagcagtacaagccctgccttcagcttggaactccccgtgctcctaggacgatgccctcttctcaccctggagctagctcaagcacggcacctcctcgtcctcatgggtttgtttatcctaatgctttctttaatcctcaatatgcttacttcgggttgcaaccaaatgagtgattcaacctggtacttggggctatcaatacccttagtgagagcattcaacgcttaaccatcgggcatgaagcgatgcatgaggatgttcgcggtttgcgaacggatgttggaaatttgaatgcatctgtgggaagattgcacactagggtgggtgtattggatttacgggtccaagtgttggatgcacactacggcgatggtacacaaaagcttgggtgctctccaacacttggatgtgaaaagtgcttttctaaatggtgaaattgtcgaactcgtctttgttgaacaacctcccggttttgaagatcctaaaaatcctaaccatgtttataaactttcaaaagctctttatggtttaaaacaagctcctaaggcttggtatgaaagattgagagattttcttttatcaaaggatttcaaaattggaaaagttgacaccacccttttcacaaaaatcattggtgatgatttctttattgaaaaggattctaatatatttaaagcattcctctactattggcttgtggtacccaaaaggtgttaagtttaagtttgttggctattccaattcggattatactggttgcaaagtggatagaaagagcacatccggtagttgccaaatgcttggtagatcccttgtgtcatggtcatccaagaaacaaaactccgtagccctctctaccgctgaggcggaatatgtttcggcgggtagttgttgtgcccaattgctttggatgaaacaaaccttgttagactatgacatatcctttaccaaaacctcactcctatgtgacaatgatagtgccataaagatagccaataacctggtccaacattctagaaccaagcatattgacattcgccatcacttcctaagagaccatgttgccaagtgtgacatagtcattagccacataagaaccgaggatcaactagccaacatctttaccaagcctcttgataaaacccgcttttgcaagttgaggaatgagttaaatgtcatagatttctctaatgtggcttgagatggtgcaccatggttgcttcttttgcattgtgtatatttgctcctatttgctcttatgctttagatttattgtcatttggttcttcattgcgaaaatagagcatatcacattacggggaggtttgcactcttgcatgtgcactacttccttttatatatgagcaaatcaactaaaagtgctagtagtgtttttaaaatgcccaagtcaacataagtcaaaacatttgcaagttaaatgtaatttgaaaactatctctgggaaaatgtttcaaaaggttccctatatgttttccaagcctcacattgcaagcaaaatgatttttgaatgaaaatgcctttttggccctcttttgaagaaactagattcttagttttggccaaaaagaaatttatccccaaattgagattgagaaggaatttgagaaaagtttcaaaacaaaattggtagagaggaggatttgaaatgtttttggtattcaaacctatttcaaaaaccaaatatttcaaaagttatttgaaaatcaaattcgcccaaaaacccctatagaccataaaaggtcacctcctagcagttatgtgagttttgttgcaaatcatcatagtcttcaaatattatggatggttagcaatatttaaactcatatattttaaaattgctccaaaaatcaaatttttattgaattttattgtgggggggttaccggcttatgcaagggctgtgcacagccggcagggggcctggcggtctgaccggtgctataagcgcggtttgaccggccaggtgcggcggtctgaccggccacatagggccggtctgaccggccggtaggtggtcccaggacttttgtcctttttcttctcccttcttcccctacccgactccatctcctcccattcagttttttccttccccaactcgaaaactctctctctctcacctcccctcaaaccctaactccttcctccaccaaatcccctcggtttgatcgcggatttctctccggttacaccgtaagtgattctcctctgcttcctctctctattccatggattgatttgtgtttttgttgagtttttgatccatggcatggaaccctaggtgaagcagttctttgatttacaccaaaagagggtagtttcttggtgtgattcatctcctccaaccggtaaatcactctccctcttatgcattctctcaaatcgatctatttcaacctctagggttaagggtagtttcctcttttgttccaatcttgatgaaataggtccaaccctttgatattcatgttccaatcttgtgcaatattgctctagcaattttttagactcatttgtgtaattgtgaaattgttgtggatgcttaggccaatgtcagtagtggtctaactggagccaaccgacggtctgatcgcggccttgccgtcggtctaatcggccgatgcgcgcggtccgaccgccgcatgcacgtggtctgaccggacgttggccgttagtctgaccggcaggtgtaggcggtctgacgggactgatgccgtcagtctgaccggcctgcagtctacggtattggatgtgagcacaatttcacttcaatcaagtggcttctaaaattcttgtaatatcctttcatcctttgctctttgacagtgatgcctccccgcactcgccatggtcgtcgtgcgcccactccggatcccgtgagtgagcctgaggagtaaagcggagaggattatgctcaaagtgatgaagaggttgaggcaaatgttgaggggactagtgaggaggcaagtggagatgatgtcagtggtagtggggaggatgaggatgaagaaagtgatgatatgcacattaatccctccagtttgtggtgaacatgaggaatccagcgcagtataccatcttgaggcatcatgatcagttcttaaggcctcgggacatcccggatccccagtttcacaccgctttccagaagactgtttatgagcaggtttatgcagggaaagcatttgcagagcataagtggatttcttggagagacatcaatgagactccagagtttgagagcttgtatgatctcttcaagactgttggcattgaccggattgtgaccctcaagcaacactacaatgaagatttgatccggcagttctatgctacagtgtgggtggctggagactatagtgagatgaagtggatgtctgacaccctctagtgttctatctctcggaggcagtttcgacggctcctcaatattcgcttagattttggagatgatttgcatgaggagcacacttacaatccgctctccatagactatctctctcagttctatgaagatggagtgcggtacacacatgggaaggttgccggcttgaggactatccccagtgtggttaatagtattgtgagagctactatcctccctcgccttggcaacaatgatgacattaggggggtggcttggcacgtcatcgatgcaatcattcagggacgtcagttcgacattgtgtctctcatgatgcaagatattgctatcaccaaggggacattcactcagggaatctattatgccccttacatcatgaggttgattcaagacaagcttggggctgctgggtaaaatttgaagaagcaagcagtaaaagccccaccttcagcatggagctccccgtgctcctaggacggtgccttcttctcaccctggagctagctaaagctcagcacctcctcctcctcatgggtatgatccaaatgctttcttccatccacaatatgcttactttgaaatgcaacccaatgaatacttctacccggtacttggggctattaataccctaagtgaaagcattcaacgcttgtctaccgggcataaagcattgcatgaggatgttcgtggcttgtgcaccgatgttggagacttgaatgcttccgtgggaagattgcacactagagtgggtgcattggattctcgagtccaaatgttggagagcacccaagcttttgtatatcatcgccgccgtgatgctcctcatccttcatcttcggcacgtccttcttctcctccacaagaatgaagacatttttggtacttgatgctaaaagggggagaaaactgtccttaggtgtgctttatgtcttgtgggttgggactagtggtagtgaggttagtcacctcaaatctaataggttaagttgctttgggctatattttgtatgggtctgggctattactctatattgtgtgttctttatcgttttgttgaactctatgtcatttggtctattcgtggtcttgttagcctatgtttgtttgtgagcccttttaggatgatttgtgacttatgtgatttggatggttaagtgatgtgaacttgtgcgatgatggatggtgtatgtgatattgatatatgtgaccatcttatgcttatggatgaatatttcttgaagttcacattgaaatattggttatgtgtttgtgcttgttgaaatgtgaaattaaaatgtgcattggctccatttttgttgtctatgattgatatgcacatgtttagggggagcttttgatttcctttgcaatatatgtccatatgttccatgtttgtttatatatgtttgagtgtttgtcatcaattaccaaaaagggggagattgaagcatcaaggcccccttgttaattttgttaatgacaagcgctaattgtggactaaccgttgctattgagatatattttaagttaggtccacgtcttgtgtgcgcatggatgactatcgatggattaaaatttgatggcgcgaagcgaagaaaagaaaacgttaaaactagtgctttagttttaaaattgatcgaggtgacgggcgatcaaatttgctagttttttttagtttcgccgtactatcaagggggtaatgacctagcaatggagattaattgccacattagatcattatgcatttagacttgtgctcacatttcatctcacacacacaatcaccttgtatttcacttgttcggcctgaccaggggcggtcagaccgaccacatagtggcggtctgactggcgtgccctggccggtctggccggccacaagacggcggtctgaacggcgcataaggccggtctgaccggccctctagtggccgagatggtgctgctcggggtggccgatacagagccgacggagctgtattcggtcagaccgagctgatggcggtctgaccgagccgaggccggtctgaccggccactcaacgtcggtctgaccggccaagctgatggggccctctgacagggctacaacggctagttttctagccgttgcagagtagcacggtctgaccgtccacatacctccggtcggaccggcagagcacagagttgggggatttcgcccccaacggctagttttggttggtaggagtataaatactccccctccagcagcaaggggtctctcttggctcctaattcaattgcatacaccccttgctctcacacacctttgagcttagtgttcatccattgtactggttgaggttgttctagccaagagtcaagtgcatttgcttccattgtagagctagtgtagcacttgattgatcatctctacgccgcgtcattgctttttactcttagagggtgccgcctcctagaaggcttgtggaggagttgcccggtgacctctccgagaagattgtggaggaggcccggtgccggtttgtgagtggtttggagttcaccaccttcggagtgaaggaaaaactaccccgagtgatcgaggtttgggtagtcctctccgggggccggttccgccttgcccaccccttaacgaagggggcgtgcggtggcttcgtggttgagcggtggagttgggctcgcctcaacagggagtaggaaaccgccgagtttccaaacctcggtgaaaaatctcttgtcttcttgtttcatttgattgtcacatttacatttatgcaatttacattcctagagacatacttgagatcatatcaccctaggattactaaacattgacataggagtatgatttaatttcctagagatataattgagccactcaccctaggtttgcaaaacataacttagttgcttagttagactccctcaccaagcctagcaacttaggttagttttgattaggtgtcatttattttttaaatcgcctattcacctccccctctagtcgacatct

SEQ ID NO: 9656 - DNA, 40844 bp, Oryza sativa
  unsure (1)..(40844): unsure at all n locations
gattgtagaggatcccctatcgatgccgcctcaagaactcgctttcctcgaccctgtccgcagatccgagggctgaaaacgcataaaatacatcccaatacaagaaacaaccggcaagaggcaacgagctcgtcccggcgtgtgtcggatgcggcgcgctagagggagggtggatggaggaacaaggaaaaggttgggaagggagggagggcgcgcaccgagcttggagaactccttggaggcgatggtgtcgtggtagtacttctcgttgtagcggacggggaagagcgccgtgttgagcttcttgagctgcatcacgttcttgtcccgcacgccgtccagcgacgtccggtccacgccgccgccgccgcccttctccttgttgcccgcggcggcatccccttccccggcgcccatctccctcgcctacccctcctcctcctcctcttaccctccctctctctctctctctctctctctctcttcttgcgcttctccggtgagcttgcgatgcgagggagatgtgcggcggcagcggcggcgggtgcgtctcgctctcgcaaccaaaaaccctttttcggttcgtttgccgcttcgcctctaccgcgtagcgtcactgacttgtggggcccgtcgtgcagtgaatcggaagggttggttgaatggttgcgttgcgtgccattgcagtttgatcaagcgggtgctctgctttctttattaagggcacctaaaatcgtgcttaataagggcatctctttactaccatgtaaataataaagtgagtaaatttcataaaactacatacacatactttgtataatatatcacaaaactacagatttaagaacttttttcacaaaactacagattcagtgtcttcgtttatcacaaaattatatatactttgcacaatatatcacaaaactacaggttttagcattgttaaaacatgtcagctaaacttcgtgggacccacatgtcagtctcacacataaatcaataaaagaatggtggggcccacatgtcagctaaagaaaataaagatggtgggggcccacgtgggcccacatgtccctctcggctctcctttctcttcctctcggctttcctcgtcctcgcggggagcggcggcaggccgggggtggcagaggttgctagaggagaaggaggctgaggaggaggtcgtcggcgagcgcgatagctacactccgtcggctgctccgcccgcgatgcccagccgaacggcgtcgcctctcctcgcccggccgctgtgcgccgcctccctcctcgccgagccgccgcacgccgcctccctcctctcccggccgccgcaagctaccctccctcgcccggccaccgcccgacgccttggggatgggagaagggagagagaggacgaagaagaggggctctagttaaagagagggagatgctgagaatgacatgtggggcccatgtgggccccaccattttttttattaatttatgtgtgatactaacaaggtcccatgaagtttattatttttccggatctaattgccacgtatgcgccacgtcaatgccacatcagataaagaccaagtcaaatttgccacgtagttgccatgtccgccaaaaccaccgtcaaaaccgccgagggacctcatgtgcactggttgtcaaaaccgtcgagggacctcatgtgcactggttttgatagttgagggacttgttgaatctggttttctggttgaagaacgaaaatcggattcgttgataagttaagggacctcagatgaacttattcctttcactttgggagaaaaggaaagcagggcatctcctgttagactttagcaggtaacacatgttggtccaagacaactcaaaagtgtacattgatttacttcaagaatgagtatgcatgtctcatgaagctagatctcaagaaccagcatatggttcaccaagagcatccaaaacgaagacatgatcatctttagctataccaacaatacctaccaggcgatcaccagaatttgcggtgtcaatttttaacctaccgaggccggtggctgcattcaggagctgttgttcatcatcacaaatggaacggagtcaagttgtaacttgtaactcaagacacataagcagtcacatgaatgaactaatagccaggtcatgaatttaaaaatatatacatacacatttcatgacggcacgcgttgatttgctatctaacatggagcaacagatctaactgatgtgtccatgtgagatcaaattgatgtgcggggtaacctaaaacagcctctggctttcctaacttgctgcaagggctacttctaccaatgttactttggtttcttaagctatggcacaattctttcctttctaaaaataatgctctacggaacatgagcagagtcagtgtggtgcagttagttgtccccctcaaatggtcgttgcatttcattcttgcgcagcagaaaaactcgcagataagtgttgcttcaggcaaaaagtgcataaagctccgaggaatgatagtcagtactcagtagaggactccaagataagcacggaacaggacagttcccatcgcttaaccaaatccatggaagccacttactttcccatcttactcgcaaaggtcttcctctcatctttatgcttctatagatataaattgagcattcaaaatttaaggtctgtatggataaaactgaaagctggtatacacagagatctccagtggaagtgcacataccttgtgaagtgtcctaaatttcgtttcttgctttgctcggacaagcatccaatccaaggccaaatcatactccattgtattgggttgagaacaatgcgaggttgaaactgccttcttctggagaaagaataatggttgtgcaaaaatattaagacagagaaaagaaatagagcaaacttcataggacaacatcagcacctgttcttctcgttgtcttatacccattctaatattgttgattgttaagtgcccgagaagagtttctgaaggttttggaaccttaagcaatcctttgctgcaataaaggggtctgcaaataattcaataagagaatataaagggtcaaccaaaaatattgaacaacatattgttatttaatccacggtagaaatttgaaaaataataacagtaagtaactagtgcaaatggcatcacatgcaattttgttgacaaattgcctaataagcaattgcagtgtggtaatgtgtccctgaggtggtatcaagatagaaccaaccaattgctaatagaagtttcccttaactttcctaaagaaaagatctcttaattctgcagttggggttgtaatgagatgacaatatgccatcatgtgaactataacagacagtgaccccacttaaaacagagcacaataaatgcaacatgaacacatatatagtagtaaatttcgtccagcaaatctgcaagcaacagagtgagataccttccaccgaccaccaagcctgaattaatttttgaaatagcagagtctgcggcactttttgttttgaatatagcatatgcttttcctacaaacaaggaagcagattgttttaaatcgcattcgagaacattgcctgaatgtggcaaacttgcaaggtattacaaacaaaactcactcaccattgtttggatcatcataagttgggtggttaataggcttagcgatacaatttagttgtaaagcatcacgtataagctcctgtaaacatggtaatcaagataaatattcattaagtatgttgatgatactggaaaaaagagcagataaggcacagaaagtagcaaacatggacacctaagagagtgggacatgcacgtatccattttagaagttattgtccaagtatggcagaacaaggaagcatcaaatagtatggtacacctactcaacctctcttaggtactgaaattaggggtagaaagtgatgttgtagaaccaatatttttaatctctttatagcaaaagtgttaactacaccagcccaagaaaattggcaaaaattaggaaacagaaagcacaaaaaagattaaaacagattctaaaatcaaatatgttcctgtaaacaaaacatttctcttttttactgctccctacattctttccaatttatacatctttcaaaattagtgggtagcggaaacgcgtacgtaaaggcgcactcaatagagaaacatgtaccattgtctcatcgagagaaaaatagtaaaagtggatctttttttttactttatagagcagagaaaacaaaaaaacaaataggttacataaaaatgacactttagactcgggataatccccactttgttgcatcttttgctcatccattcgcccacccgttcagaagtggtgcccaatatatatatatatatatatatatatatatatatatatatatatatatattagtattattagttagcgtcatgtttatcgcatgaagagggaaatctacagcactggggaaactcggacgggagttctttccgagccaatgaaatccttccctgtacaaattctcatatacaaggccttgtggaaattaagaggtgtaagacattgaaaacaaatcgcaaagtttgtgcaacagagaacatagcaaagctagtaaagaagtgataaattataagccaagaatataataaaaaaagcagtttgggctttatgtcaaccagatagacaagacaatacctctatgtcagcagctgcaaactgtatgtcaagattttgaatgtacacaagtgtcccttgctcatcagcatttcgtagtctggtatcccatggctgaaatttccatttaaaaggtaaacccacccacaaataaggtcaactgaaatatttttgtttttctaatagttttgaagcattgactcatgaagcatagatgtaaatcttctgtacaatcatagtatatacgcaagagagaagagacaatgtaggaaaaatgattactcacaatcttgaaccatttgcttctgtcctgttaaatagcagaaaagggtgtaagcacacaaaagtaaacacggctatcagtaggaaaattgtagaaccagaacattttgattatggcttgtttcttagaaattggttgaaccttaatagtaaaagcagatgatgttcagccgaataaaattcttgaacagaaataattgaaggaacatgtggcccttttactcattgctcttagacccagatcgtaaatcaacccattcaatgcattgggtaactgggcagtcggcaaaactgctcaattgacaatcagaatgcatgaggcacatatagtactttataccttagttaagaatgcatacaagtaggtttcacatgagagctttaagtaccacatcctggcctcctgggttcccaggccagcctttcatgtaatttttgctaactccaaatgccacataggggcaccgttggtcgatagaggatagaatgacttgcccaggtggggaaaaaaaactagcagttgcactgagattttcccaggtcaactgctcatatagtcccttgtgctggacaggtccaggggatcagcccaggagctcggtctggccttttttatgggaagattgcagggccagtccaggttaactgttttattttacttatatacaaacaacagattagatgcagatgagttgtggagataatattaactgagttacctgggggaatgtttaaagtttaacatgatatcataacatcaatggcataaagctattcattgataaggtggaaatgtatcctcagtgttggttcagatacttacagcttgtctacctgctagttccaaaggtccagtgcgacttggtctttcaggaacatctaatggcacattttgcactgtaacattttcagaaaatttgaccctctttggtggcctctccccagggagaactttctgtgcaggtttggtaatgttctctgtagatttggacacactctcctttttcagtgctacatggggagggggaatggcagcagccgcactttcctccttgaccactggctggggaaagggaatggctgaagccacattttcctccttgaatactgacgggggaagggaaactgcagcaactggactttcatcctccataaccgttgactggggaaggggaactgggacattaagcatcttctgatcaacaccatgcacttcctggtctgaacaggatgtcacttgctcaacttttggaataagcaaaaagattcctgtgccagaagaaaaataattaaataccaattttgatactganggtggagaaaatttttgccatattaaaaatgcaatttaatgcactgatgaaatctgatatattgctgaccttccacccctgcaattttctcaggtaattgttcagaaagtgtgcaactgttaacatcaaaaaacctgtagaagatataatcagccattgctagttccctgggggaaggttgacgattcctctcatcctttgaaatgcaaagcacagtgcatttcccaccaatagcttcctgggtgaccaataaacaaaagggtattataatattttagttctcagaaaaagtaaaaggatggaaaaggcaaatgacttaacattcacaggtaatacacaatagcaggaaagtttcaatcttgtatcatgactgttaatacctaaccatgctctactaaaatggtatgccaattagctcaaaaggatgtttaactgtaccagctagaaatgatctcaattttcaagttgattgtcgcaaccaagctggctcttctcaggtcatgcaaatgggtaacacgctaatgcctactctgtctaactcagttggactgcattttcacttccaaaaatgtgaatttaaatattgctctttgaaaattgtgatgcactttttatacatgagaattaaaactctaacttcgaattattcatgtcatgcgtgaataactaaatataccacaaatacaaggtggacgattcccaacaaaaaaaagtgggaaatgatctcctcacatcaactagtactagatacaacttgataaggtaacttgtagctctaggattctagctaccgatatggcttctcaacaacagatatttggaattaacaaaatgtcgacactattgcccatccaatgacttttcacaattagaaacaaatttgatatagtgttcacataatagtgattatctgtccattgagtgatcaaaatgaaaatatttaaatatattgcaagaaagcataaggtaaaatgatattcaagaaaaccaattcaaaaacgaaggggaaaatatatgaacttaccagtgggttgatatcagcaaggccaacgccttcaccacaagcaagaaatatctccttttccattacagggccacttaaatgttttcgaatctcatccgggagaaaaaaccaaagaatctttactttcttagcctgattttgctgccatatctttattatctttccaatgtaaggttcagactcaccactcttaaaaagatatacattgtcatacagtgagtacttcacattgtcaaatgtgaaggagtcataaaactgtgtatccatcttaataccaccttttgctctcttcttcccccatgagaattggatattctcattactaccatccattctgataatggtaacttgtagctcactgtgcactcaccataagcctagagtgataaaatcagcaggtcaaactttagatcaaattaggcaatatcaacacatcagacttgactattgataatgttagcacagaacatacgtagtttctgaagctcgaaagggtggtgtctgttaattgtgctgtttatgctaggtggtcaacaaacatacaaaccatgcttacaaactaatagtactattaccgtatcaagtgtgaatttagacattcgcttcataacgaaaatcgtaaatctagtttcttcacacatgttgaatttgagttgttaacattttagttaacctagcaaatctatgtcatttgcaagattagttaacctagctaatacgctgtatatacattagttagtttaatgaattgagaaagatgaaatattaactgcagcagatgttattttctcaacaaagaaagggacagcttctctcagacttcttgaaaagtcctatttcacagctgaaccctattttgcaactgaatgtagcaatgttttatctacagctgaatgcatgcgggaacatcaaagataacacataaaaaaatataaagatatgaaattgcaaccgattgctgcatggtgatgcattttaaaccaacctaattaattcttatttttctggataggctgtggttattctaaagttccaaaatattcgcggtaaataagcaaacataatggaagtacagatccatctgcttgataaataaatctgtcatgctgattagttacattttaggttatgctggaataaaatcccacaggaagtcgttcgattttttatcttttggacaaatcaatctgctacattttccggttggcatgaattctacatgctcactaaacaggagtaaagaaaatgtaataagtttcatgaatgctcatggtgaataagaaggccattagaggagtaactacatagtacatgcataaaacttgaggctcaacaatggcttggagtaccctgttttcaacctaaaaggcaacagttagcgcctttgatcaaacgtgtgttcttaaatagggtaggaaataaaaacatgaatgctttttcaactgacatgttcgtatccgctgtttcaccttactaataggctcaccattaaccataagcatatataaaacagtaccaccgcaacaaggatcgtcatgcatgccttagtttttagaacaagagcaaaggagggtgtccagcacgacgaagaacaaacccatgaggtgagctaacgggttccagggaactcatctagggttttgacatgaccaatccataatatgagaactaaaattaccaccaacagcagctagagccactaaatgcgatcacaccgacgacgaatccaccaaaccccaaaccctagacgggggaaacgcaaaccgaacgtgcgacgcccccacacgaaatcccccaaaacctcgcaaggacacctccattcgagcaccaaaatttagcgccctagccgttcgaccggggtcgttcggcccgcccgcccgcacgcgcgccggcattcctcgcccgcgccgcgcaaccggaggccgcgcgcgcgggggaccacgaccagcggccccggagcccgacggggcgacgcggagcgctctccagcgaccggagccccgcggtccccggtggggggttgggggcggaaccacgcgcggccgcgcagcgaaatccagcgcggaacagtgacgggggacggcggggaggaagaggggagaggactcacgcgtggcggccgccggcgaggagggcggcgaggtggaggccgggggcgcgtggctcccaggtagcaggaggaggccgcggtgggagagggaggaggaggaggaggtgagatttttgtggttgggtctcagtacggacgcggatggtgggcgtggcgcgtgcgttatttctgcctccgggacggagccacagcggcgtacgccgattctgcgagtgaataggaaaagtttggcatacatgacatgacaaatagtaatggtttttaagagagaaatttctagtgaggtggataaatcattttgacaactgcatcaagctcgagtatccatttcattcgccgccgaaaattgtacctcctcgccagcacgtcgagtattgccatgcagtcttgatcaatcaattttgatgtctcaccgcccacatcaactccaccagcaccaaccgcatcagtggcaacttcctcatcccggccatccttcatgtcgacactatcaacagcgtgatattgtctcctccgccgaagaggacgagcatcatcaccctacatctccagatcgttgcggatgagctccacggctctctgcacaccagcagtagcacgtcccatcggtgacgcctaaccccaccatgtttagcacgtcgcctagcactaaccgcaccaagccttcataagcgagcagctcaggaagcctcctccattggtgttcagcgaggggtagccagaataagaagagaagatggggaagaatgagctcaaaggcatttttgtcctagattatattatagtatatagccatatgttgagagtaatattttatcgaatccctttagtaaaatggcatttgggcaatacacacttttgacaaaatggcatgatctcaattttttcaatgggagagagacgatgaagagttgccgtatggggtttggattcaggctcgatgtagatggctcggccggggcaagcttggtggccccatatttaggtctacacacttttatttttcatagcatctaaaaaaccaagagcgttgttaaatttagttctcgacatggagaatattttcttttcaaaagattatctcttcatatccttgtgcactccaatagcatgggcaatacacaaaagtatcaactctcgactagtggtttcaacctctacttaggcaaaagcaattgaaaccactattaaagcaaccgtgtatttacaatgtacgtaggcatagcctaggcaagcctatgtaactttttttttaattttggcctcttttaattgtgcttcactcctataatttagaaaaacataaattatttacacatgtatcccaaattatacgaattgtacttcaatgggaagaaataaattataaataactccaagagtaattaccatgttcatttcctttccgtcttctccccaactccatccatacccaacatcactgaccatctgtggacccccgtttttataacaggaatcaatcgtgtaaacagtaccatttccctggatcaagtagtctggtacacacaaactcatagctgaaatatcaagtgcacatacacgagagtctagtacgaattattacatcataagcccgcaggcacagtcttaaatcatcggaccgagcggtccggaatacattccaaaaacagaagtaggtaaggcagcggcacgccattgccataggcaacgaccgtaactaagacctactgagcgccatcgttctcatcaccctcctggtaataggcatagggatcctccgaagcttcatctccggccactaattaagtttgaatattgcaagggtgagtaccaaccgtactcagcaagccaccacagcaataatgcacatgacagaggaattcaaaggatggctatggttcttttgcacaaagcaagttttgtaattcttttcacaagcctaagacctagcatagactgatcaagttttaatatcagtgttcccattaaacaatgacggttctgtccaccatccattgtgatcccaaggatagcttcccgccattgagtcgtcatggttttctgaggacgtccacattcccgcctctcaggaagtggctccatcagcataaaaatcatcatgtaatatcccatcccacacaagttaaagaatttagagtctagccaagtgtaatacatgtcccggtgctcaataaccgcgagcacggctattcgaatagatttggtttactcacactgcaatggatgtacactttacccgtactccgcgactgcccaacacatgagcctcgtcccaacacatgagacgcgtcatggcaaagcttttcgataacctcgcattgacagtacccgctccatgaacttaaatcctcatgcactctaggcgtctatgtttctagcagtgagaggagttctggcgctcccggaaaagagaagtctcacacacatattaaattatggttcaagttaagttctctctctcacacactcatggcagtcctaccaatggtgacaccgatgtagggcacgcctctcggtcctacctcaacggctgtcccaccgtagcgcacctgcctcactcaggggtgaaccatctatgcagggatactgcctccgctcggctatctactccgctaggtctatacccatacgagaagtgcggttgtacgggggtcgtttcatgcttaacttcatggctcggtccttaattgaccggggacggtactagccttttctagataccacccaaatcctccgtccgccccagtcgaaaacaattgttttcactttattttcctttcacaaatcatgtcatcaatttcatggcaatgtggcgctcatgtctccacatgccacatctcaattaccttcccaaaggtaattgcccaagcatttagtatttgataaatatgagtatgcatgattctagaatagcatttctaagcaattgtcataattgactagggactcatacgtaaacatggttacgaaggaataaggggtaaacaataatcaaggcatggtataaacacaagtaggatgttcatcattgcatgtaattttatttataaacgaaataatttcacaattaggatcaacatgttcaagggatagtgatgacttgccttgctcaaagtcttgcggttcttggtcctcgcttggatctgcaactccctcgggctctaaaattacgtgcgaagaaacgatttgaattcggttaaaattcaaataaagatccaaataaatccaaatggaagtcgaatgcgaaagttgattcttttatattaactttactattcgcgaactagggcaaatccaatttcgatttatacatcctaaactattttgcgggtataaatattttgttagcataagtttttaatttaatctacccgagcattatatccatataataggttagaaattttctatcgtgagctaaatatcggacgaaatccaaaaattatcttataatattatacgatttaatttagcctatgactaaccgattaaatataatatacgtctaaaattcctagtgattaaatccgaacttctaccgtgaatcgattacttatagagattatccaaaactaatctgtaatagtctataaaaattcatctaattgtttagtcgttatttacatctaaactactaccgcgaattgatttcttttagaaattaccaagaataatctataatttatattaaattttgcaattctatgaccataattaatctataattaaattctaattattttagattttcttaaactattaacctccttaatttcttcctaattttctatttatttttccttttatttttctccattctctcttctctttttctttctttttcttacttttctctctctctctctctttctttcttttctctctttctctctttttctctctgtcggcctctcttttcctctccctctctctctcggctctctcccacccgagcggcggcggcggtggacgcgaggggaaaggagggcggctcaccggcggcggcagcggcgacaacggcggcggcgacggtggcgcacggcggcacgggaacggcggcgcggcggcacgggagcggcggcgcggcggcacgggaacggcggcgtggtggcacgagagcggcggcgcagtggagagggaagaggggaggaagggtgagatggggtggggggaaaatggagagaggggggtatttgtagagaggggaaaaggagagggggaggggcggcggcgtaatggcgacgcgacggcggcgctcagggcgggacgacggcgacgcgcgggcggcgacgcgatggcggcgcggggctcggagcggcgatgcgacgggcggcggtgcggggctcgagacgggcgacgcgacgggtggagtggggctcgacgcggcgatggtgacggcgcgcggcgatgggacggcgacgcggcgggtggcgagcgagcggcgtgacaggcggggcgacgcgacgcgcgcggcggcacggggctcggcgcgatggaacgggcggcgcggcagcggcgcagggcgacggcgaggggacggccgtgcggcggggcgcaggcgcgaggggacgagcgcgaggccgacggcgacgcgacggtgatggcgcggcagcggcggcggcgcgcgcgatgggcaggcgacgcggcgcacgcggcaggggagggggcggggctaggaggaccacgatcgaacacctatgccgcaatgaacagtaacttttcctatttatcccgattttagcccattttctatttaaatatagccctataaattctaatttttgcataaatgaagtttactccatatttgtgttatcctaactaaaaattcaccctaatttaatatcactcatattttgtttatataatttatttgaatttttaattagggttaattctcattccatcgtactaaaatttaattattgctaatatggtcgcgataatattttatttatttccaatcccacctaatctttattttaatttatattttaattatttatttagccaacttgatttttagggtttattcctagttagttattcattattcgcgattaataaattctgagatcaaaatccaatgaaataggcgaataaaatcggcatgatgcaatttattacttaaaaagtttttgaaaatccgtatttttggtgctttgatttcgttggtcgaattttcagggtgttacaccatcctagccctttaccgccaagccaccgtgtcagccatacctctgggggtcccgttctatcctactccgccacactttggtgaacgctttcacctccctctttccccatcgttctggacttgaccttgctcaatgtactaggcatgtggtgggtggggacggtggcaggtgctggtgaggcggcttggttgcgagctccgtgcaatgtagagagggtaggctcagacaccgcctccttcccttccccatctccgatcgctgttagccgctagatttgggcacaaggttgccgacctcttcttccctagttgttggtttgctcgatggtagtgatggtggtggccggggtcctctcgacggtgagagaaaggtgcactcttcgtccctcctctatcgctttggatggtcgccgaccagatcagaccattttcaccttttccccctaagccactcgtaaattcattgggctactctgacacccatgaagccctctcgcacctccaccgtggcatctgagcctagctagaggttgagaccgtgggctgaggcacgacattaggcatgctctaacagactttccatatcctgtcgtttagttccatctctatatacatactccaacatattcccatacactccaatagactctccgtataaatcacaatagaaattaggaaaattggtacggagagctaggccccatcgattccatgatttggcatgccatatgggattgccatttatttagaaactctattggaaggccgtggcacggacgcagaagatggtgaggtccggccggaagtcggcggtgaccatctccaggaactgcgcttcagcaacttcatcttgaagttgatggcgaaagagaggaggtagaggttctagagcaggttgtcgccggtgttgcggtgacagaggcactgagaccgccggcttcttcttcttctgcggtggtggaggaggacccacctgcactcaccggcaaggaggtggcgggagcagcatgcaaggacgatggcactggtggatcgcgagggcgacggagaccttggcgaggagtgcgagggaggaggggagaggcctcggcgccggcagcaacagggagcgctggtagaagaagcggcgtcgcagcgagcggatgacggcgtcgaggaggcacgacgagatcaccctcgacaccgccccgacctcgccgacgccgtgccgtcgttgtccacctcggccgccgaagacgacgacccctttcttctagctggcttcatctccatgcctttggacttctcctgactcccgagagagagagagagagagagattgtggaggggaagggatcgaaggagataaggtagatgagaccttatcccgttgtgacgggatactgttgtgtagattttctctataaaaattaaagatgtttttgccggtatttgggtatgtcatccgtatttgagtcggtttttaagttcgttcgcttttggaaacacatatccgtgtttgagtcggatattaagtttgtttgcttttgaaaatacaaaaggagtcgtataagaaatctctttaaaataactcacatgctactttgagatgaaagtcggactcctaattgcagcttatgatttttcttaaaaaaatatttaagcgaatttccacagtaaatttcattctaactaaaccgtataactatcaaaataacattcacccgttgcaacacacgggttttttttctagtaaaataaaattttaaccatcaatgagttcttaatgcttacttaaaaataagttgtatacatatatttgcccccaaaagtaatactataatatgacattaacttattatagtattcaattaatgatcgtaaattatcttgtcctatatattgagtttttatgatcgaagagagtatatcatttcgcaacattttaatataaagattttgtatcccttcacatgttggcgatcatttggttccgtaagtcatatccattggtgaattcagatttagaactgcggggtctggaatgtaacgacaatctgcagacatctcttaataacttttcgtgaatatttgcaacataattgagcacaacgcacgcatctcgcattctgagttcaacaataccatcacctaaaataggctagcctgttcatctttctcgttcaataatgcaacagcacttggcactgagcaaaatgttgtttgaagtattttattcctgagttcaatggttttattcaatacgcagaccacactctgcaaaagcaatagcacctacaagatacgcagcagttatgtagtctttacagtaggaacagtatctctaccgtcagatgcatcaagcatcaatatacgtgatttgccaaaaatgcacaaacaaaaaaaaagaaataaaaacaactggaccagatattcttctgataggtctccccgaaataatttacagattgccatatgaatagaactaggcttttgcaggccatgttgcttgagatgacatgattatgcccacaatcactccaaacagacccaaggcgctgccgaagatctcaatcaccaagatctttacaaagagtgatgaattctgagcatcagacaatgcacagctgcttccaattattcccacacaaaccctgccgatcacaaatttaaccatctgagaacgtgaaccatgatacacaagaaataaggcacaaggattggtgcttacccgcaaacaagattagcaaagccaacaataagaccagacgcaaagattgcatagccagcccggagagactctggatgatgcactagagcagttggtacactttcaagcttagtttggaggatgattgccacgataacaccataaattgcaacagcctcacagaagatgacactgtaaagcacaattagatgcatagatgtcagtatcgcaagttaaaagtgaacacggctgtgattcaaaagggtctttcaagacatgttccagaatatgaactagcaaattaacaaaatagtatattttaatattaatggtggaaataaaggctatgcagatgaaatcctagaggccatgtatgtaactgttttgtacaactgatgcaaaaaactaaacttaatgcagttaacataactatacatcttataaaacattcagtggccacttctatgaattgtagcatccgatttattcacaataaaatgcaccatgtatccaccgaagcacgatggattgctttgagcagacaaacaaatgttaagtcccttagtcatgctgcattgtcatttactgtagagtgcacacactgtttgtagagtagataagcacacaatgtgtgcctcttttcttcagccattcagggtacttgaaatgactgaaaagattgtagttaagcaccatatctagttttcagaatgtgcaaaataaagcatgacagtcacactgctatcagtaaccatctgtcgggaacataatcagattcttgctagtactatcgctctcttgctgctggtttataaaatgagaaatgcggtggaccaaataaaattggagaactttaggtttgacttgtcaacagaaagcaccaaacacttcctcagtatctccatatttttcaagcgtgctataatgatcaggcaatgttacctaagttgtgaagtgaccattagacagaccaaaagttcagctcctaattgcacaccagactggtgttcatcgcataaatcgcacgtatgtgcatagttgtcctacatgatactatggatgtagaacctaatgttccactgcacatgttacattgcatgacgcagttgtcctagagcactacaatagcttaagtacatatgacagcattatcattagtacagtagcccacattctagttacaccagtacaccactacgattgcttataatcgagcaaacatgccccaaataacgtaaaggaaaatacaagtaaaacacagatgctaagcaatgggttaaaagatacaggctggctaaggaactggactgatcccacaagagcagttaaaagaacttgactaccctaaccagagcaaacgtggaaacagcagaggcaacatttgcctccagctttaattttgtagcaaaggtgaagcaaacgagatggcataatgctaaaaattggatattgctaacagataaattatgccatgtaacttaaatatacaaggcgtaataattgaaagccatgatgaaagggcactctacaaaaccaactgcctagaggaacagtgtggtaatcaatctccctagatacaaaatgcatggaattctatgtccagcagttttcgcgtattgttggcatttttacggatctcattactgtcaaaatcaatgggacacttgcaagatggcatccgattagtcctagaaagaaacctatctgataatctaagtcaattcatgttattaactagtactggcactcaagtaatccgcccgaggaagtacttatgatgtacatatcagcagctctgaacaatttcatgtgctcatatcaaaatatcccctatccgcactaacagaaaaaaacatcactcgagctattcagccaaaccctaaatcgcatcagcaagccgcccaatcacgaaatcgacagccaggcggtcgagaacgaaatcagatgagaaagaagcaagaatcgggcacctgatgaggttcttggaggtgatcctgggggccttgatggcggccccgatgaggctgctccccgtgatgaagatccccctgcaagcaaaaagagcaccaacgcgcgatgaggacggcgcgcgaaccgggggctttcgcagatccggcgacgcagatcgatcgagcgagcgaggggttgggggggaactcaccaggcggcgccgaggacggagacgccgatggagacggctatgccgatggcggagaaggtgtagggcgagatctgcacgagcgcgcgcgcccacgacgacgaatcagacgacatcctcgctacaccacctccggatcccacgccgcggcggcgaggcgatctccctccctctctccctctctctctctctctccttcgcgcgcgcggcgaggggcggggaggggcgggggctggatcgatcggaggaggaggaagggcgagattggggaagggaagaagactcgggtgtcgggtcgggagagggagacgagacgagacgtcgtcacacgatggcacgacgaggagatgtgtgtgtgtgtccgtttcttgttcgcacgagaccgggacggggcgtggggggtctgggggcaacgagaggctgtggttgtggtccgtccgatttattgatggacggttcagggcttcaggtggattgggcacacgggatcgggaacgagttggactcaaaacataggctcggtttttttaaaaaaaaacttttatacaatacaaaatagaaaagcatacgtcaatagcatgtactgaaaccatagtttggtagtataagattcgataaaaccatggtttcggatagggatagttggcacagccaatttgtttttctattaacaaccatggctgtgttcatttgcttgtgttgagaactaatttccttcacacagaaaatgagatacctaattaatatatgattaattaagtattagtttaaaaaaacttgaaaattgattaatatgattttttaaaaaaactttcatgtataaactttttgtaaaaaagtaccatttaatagtttaaaaagtgttagcgcgagagagtaaagttggaaaagttgtccaaagaacatagcctatgttaacgaggcttcccctcctcttccaccggcataaggggaaagccaatggaatgctgctcgctccggtcatggcgatgaacacgcgaacgatacatcgtcatccacctcccctccttttcttgagtggcaaagcatatttgagtggaggaggaactggtggttttgtcgacacgttgcaaggagaaagacatcgttgaataagcatgcaaggagttcgcctttagtgggcccgacgggtataggtcgttggccagttgggaatgcacgtatatagtgttgtagttcacctgacggttagcgtgacaagaagaaggcgtttagcaacaagtagggagaggagatttatttacaaaatagaccatgcccgtactccctccgtcccagaaagaggcgatttctggaggggaggatttgtcccacaaagaagcgattcctccacagaaaacaagaaaacttcaagtctatcatatcatttgtgggcctaggtggacagcgacttctcctcctctcgttcacacctcacattgcaaaaatcttatctcctgcccgtctctcactctttctctcgtgtttctctcccattcccaaatcgattgcatcgatgcagcggcggtaagatgcgagacctcaccaagcttccgaccccctccccacctccctcccactcctcccagcacatcccggcggtggaggtgatggggagacgcggctttgtcggcggcggtggaggcgatggggagacgcagcttcatcggcggtgggggcttgtatgcctaattgcttatcattcccggaagatttgatgcggttgcttgatgcacgagccgcgttggtgaaggcaaacaacactgcatttcttttttttctctaggttcttgctatgttcatgcactgcttttcttttttctctgggttcttgccatgtttatgctgttgccagtagtactagtattttctcaattggagagattttctttttaagtatttgctttcggcaatggaaacttttggcattttttattctgcgtcatatgcttctggcatgtgtaatcaatagatgcagagaaatgacatatgtaatcaacagatgcagagaaatgacagtaatatatggatgttgtcacggagggtattttcatcattttacattagtactaaatttgcatcagggatccaggaattgcttctttctagaacggagggagtactatctacatgaaacatcgatgatacaagatatcatcataatacttcgacgattccacctccagaaaccaatgtcacattcaaatattatgatactacgacttatcatgatgtcttgtcatggatatatcataatcagaccaccatgatacggcgaaagtatcacacctaaccatgcaggcggggcgagttgcagcagcccgcaacccattagagcaagtataatagtgagctataagcctactgtaagctcaggtatagaagagagatattgaaaaattaaggatactggctctcatgcaagagctagcttatcataaggtccaagacaaatgcattaaatatataagtgagagatagagagataaaaagaaaattgtagccaattttatagctaatctattatatatattggctttgagatgggctaatattaggaagtgggctctattattacccttgctgttagcagtgtttgttgcagcctgcaaacccacaaactatctgctgggctattcgcggccagtccgccaacccataaacaaacccaccaggccaccacacacacatcgctactttactgcctcactttcactgccacgcatcaatctacctgtgtaggtggaggagcagcggatggttcggcttcgggcactgtatgacgagcgaacgccgtgcacaacaatggaggaagatgggatcgacgaggagaggtttcggcggcggcggaggacgataggcatgcgacggccatcggcgaggatcagtaggggagccgcgtgcgggttcgtagacgtggttaatgggccgatgtatgtgacggcccacgttttttccgttgacagaaatacatggcggtgttttatcaccgccagcgtcacagacggaaacggagtacacgactccgaatccgatgcgaggagaagccttcgcctcttcatatggcaggcgaaggccgcggccgcgtcgtctctcgtctctcgtgcggcgcgcgcatggcttctcctcctcccggcgacgacgaggcggcgagggctctcgcgctggagcaatgcgagagggacttcaacgcggtgatcgaccgcatgctcaacctcaacctcgacggcgatgacgccgccgcctcctccgccgcttctcccgagcctccggcaccgcaagccgcgcccgcacccgaggtcgccgccgccgccgcagtcgacggtgcagcacggggcgaccgcgggtactgggtcgagaccatgatgcgcgagctgtgggccgccgcctccatggacgacgccagggagcgcggcgccagggtgctcgacgcgttcggggccgctgtcggcgctggcaccgccgcgaggctggacgccgcgtcgaggcagatcgggttcctcaagagggcggtgctgttccaccaccggctgcggaccgcgcaggagaaggcgcagcgggagctccggtggcagctcgacgactacagggagcaggtgcggcggctggaggcgtccaactacgcgctgtccctgcacctccggcaggccgacctgcgccgcggcggcggtggcggcggcgccatgccccacggccccggcaacccggagatcttctgacctaacctgaccggatcactgaccaatctgacataatcgacatggcgccatggccagcatttcaggaaccaattgaggataggtttcactgatctcttggcaatggttgctggctaactcgaccggctgaccaaacaatgaaacaaagattcaaacaagatatgcataatgaagtgagccaacgactaacaattcgcaaatgttcttgaaaaacggcttggtacaaggtgagcactgagcagtgatatacaagaggcaaatggttttgtaggaggttagagaggggagattagacatttagaagctgttgtctatttgttattaatccttaattaaggtcttcgttttcttaacaatatctaaatgtttctaccattatatttatatttttggtagtggtatactccatcccacccgagaagaaattgaatggactaggctaatgcgacgatcaatactgaatgtttttcgttttgaaatatgacgatcaaaagtaaatggaggaagtaccttttagagagtagtagtaaggctatgtttagttcacatcaaaattggaagtttggttgaaatttaaacgatttgacggaaaagttgaaagtctatgtgtgtaggaaagtttggatgtggtggaaaagttgaaagtttgaataaatattttggaactaaacaccgcgtaaagcattcaatacctgagcataaaaaagagaattgatctatcatttactcccttagtctcaaaataaatttattttccacttatcagcacatatcaataaaagaattagaataacctcactttatcaaatgctagtgcaaattatttctctctttatttttagataaataaaagagaaaaatgatcttattatgagacggaaagacggagggagtacttcgctgtcgctgatcgagtagtcggatgatgataacaaggtggagaaaccttggaaatgcagtacggagtacttccatgacgacctggttgtttgtgtatacacatcttctagttctacctttcttccttgtgtgcttgtattatctctctgttctttgccagttgaattctagtcaaaccatgagaaattccgagtctcaaaactttaatctgtttaggtggatccagataacagtctcgttcaaataacagaatccgtagtgagaacgcgcgccaaactgtccgaaaacaagaagatgcgaggtaggagtagctagcacataatgttaactactgtattttagaccagaaataattagctctcctcctcatcttctcctcactcttcttctacctaccggcctgaccactcctaattggtcaagtgtcaacactggagaggctaatttgcagcctgcgttgatctattcatgtcgatcgaacaaattaacaggagattttgaccatattagtcgcacctttatattgaaatccactgcaactatatgattggcgtccagatcaactgttgtggaaagaacatgaggtgttcagagttaatacagtcatcatatggatacaagatacattacattatacatattgtttgcttgctctgtgacagttgaatggtatatatgttctgtatgttcgcgtataaatcacaatcgaatttgtgaacagtgtcatgcatgggcttgcaaatagtaacaataataatataataataacaataacaacaacctgcctttttttatgttgctgatctcctctgagtgctgttctgaccgagatatcattggagaaactagaaggaattagctaggccgatgcaacatgcaagtgatgtgtcacttccggtcgagtctgtctgtgccgacaccccttttttttttatcctgttaatgaattcctgctcaagaaccataaccatatagcgacgccatggtgatcgagaaaatttgcgttgatttacttttgggacgaaaataaacttgcgttcgttgaaaaatttgctcaaaggaacgcaaattttcaaccatggacatacatacactcggttgttcactgtgtccagatcttgcaatatcaccaacctacctactgcaatctgcatgccatcacccacgcacgcgagactactcaggccttgtctacaccatgctgctactgaatgtttgatgcacgaatagagtattaaatatagacgaaaaaaataactaattatataaattacgtgtaaattacgagacaaatcttttaagcctaattataccatgatttgataatgttgtgctacagtaaacttgttaatgatagattaattatgtttaataaattcgtctcgtggtttacatgtggattttaatttattttgttattagactacgtttaatacttcaaatgtgtgtcggtatattctgtataacacgccaaaaatttatacccttagatctaaacacagcctactttacaatgagactttgcattgcggctgctactacttgcctagcgttgaccaggtcacgagctggctgcatcaccaaaccctcctcgtgtgaatcccaagaaaccttgaccaactctcttggcaatggtcaatgtatcatttttccttttcttttttggatgttaggtcaacatattctacttttgttggggtcaacagttgcagctttacgcgacactagcacgggtggaaaggccatcggatcagaaatcgacggcccggattaatcgacctcggtggagagacgggtgatgaggccagggtcgttttggtgacgttctctgcgtcgatctgagccgtcggtccggtgatcgatggggcagctgaaccaggtttttacgattccgatgaaatccggtcggatttcacgaaatttcgacgtttcgacaaggctcgaacgtagaaaccgtttaaaattttgaggagtttcatctaaattcaaatttgaattgataaaaaagaaaaaaaatcatgtaaatactatgatattcacagaatctattgggatataaattttcgaaaaaaatgatacattgtgtatttactgaaaattacatcatgaaagaaaagaatttcagcaaattacctctattacaaattactgatcgaaaattcaatgatttcgatcagaatttcgccaaaatcgaccagttttcgagaacttgtcggcaaactcagtaaatttgatttataaaatttgttcggaatttaccggttttctaccggatttcacgaaattccaaattccgcctgaccgaaacggaaggtaatgtcggaatcgtaaacgctgagctgaacacacgatatggagagtacctgcgggtgcatgtcattattagctaattaagtggattcttaagcgtaattaaccaggtcaacggaagccttgacctgtttgtccatacagggtgtatttgtatatacgtgagtttttggtttgggcatgcaggagcatttctggtaacacgtagtacgccgtgtgtacgtgtactcgcattatataaccagatcaaattagcgacaaatatgatgtgattatatgcaacatgatcaagtacgtgagatcacatgagaaatttgccgcgtttgcctgcatgcgtacgataacttcctcctttttttctcctcggacttgtttgcggctgcgcctttctgtttctggcgttgacgattaattcctctcttttattactgaaaaaaagtacaaccttcatttttaatggatgacgccgttaacttttaaatacacttttaatcattcgtcttatttaaaagatttatataattatcatttattttgctatgaattattttaccactacaaatattttaagcgtgatttatatctcattcatttgcacaaaaaatttttaaaaaatgagtggtcaaacatgtatctaaaaatcaatggtgttatctattaaaaaacagagtgagtacctgttttagtaaaaaaataaatctcggtgtctttcctaaaaaataaacctgtacgtagttcaattatttgtgtgtttcttacacctgtgtacacttcttttttcaacacagattttacaagaaaaaccaaatcaattaagaagaacgcaacgaacaatcgtgtgatgatctatggttgcgtgcattttcgttcacctctcactctctcttctcattcagcttgatccgtccctgcgttggaaaatatgtgtacacttgcaaagttcactgatgattccgtgtacatgtcaaagtgtactgcaattccggtcttcacccaaacaccgttacatatatatctgtccaaatttgatgatctgccgtggtggaaatgtattgtggccaacggaagaagttaattcgaggtcgtcgtcttgttctgaaaatgacacgtatatattacggatatttgtgctgaataattcaaagctcgcgatttcgagttgagagttgttcttttttttttctacggagctattactgttggcataagtaggttaaaacagaggatgagacagagatctatggaaacatccattctctaagaagaacaaaaaaaagtagaaaccgacaagtttaaattgaactttcaatagattatatcttcatcacatgcatggtatttactcatggttttctctctcatctgtgtcgttccatcttatctattccctctatcataaaatataaataataaaatataaataatagatcaacataatcttcaagacactactttaaccaacgatatatatatatatatatatatataaagtaagatgttttaaataaaaagagctgcataatattagtttgtttaacattaaatatagtaattcatcttttttatttttttctattaatagtcaaaatttaaaatgtttggcttaacattattaaaaaaatctatattttgagacggagagagtaactgttgactttcgcttactacactccggaggtgagactgcgactacctaattatccgattcatgaaaaagaaaaagatagctaaaataatagtccaattatacaccagctaagacttaaaaatacttataaattagctcctgcttcattgtaatattcatccgtttttaaatatataacgctcttgatttcaaacgtcttattgaaaaaaaatactatgtaaataaatttaaagttacttaagtatgactcttgctttggatagttacactaaatattttaatagataaatgattgatctttacatataaaagtcagcaactttgtatattaaaaacgaagaaaatattacctataataagttgttcctgcaaggaaaaacaacactatcactgtccaaaagaggacgatagaaactggctaacccaacagcgataataaataccctctctttgcatttataaatgtactaatcaacatataagtggaatgagggaatatatcactgcggttaatgttgatttttccaccatatgtcttcaagtctgaatattaaataaaatattaacatcagaacatagtgagttcctgccatgatcactaatgtttcctcccgtacatggagtaggtgcaccacatgccgccatgatctcaaactggactcaactataagtgcgttacagtgcataaaactaaaataactaaaccgagtcaacaaactaactgaattgaatcgatcaaatttaacaaattaaatgaatctcagaaagtaagcactttcgagtcattatgagtggcaaatatcaagcctcattgtttcgcttattcatatccttatccgaatcacttattagcatatacaaaattatttgtgagaaaaatttttataaatgtatccttagtgactcaaaagctaatactgaaaaaaaaaactacaatgagaaaaaaatcaaattcaaaattgagttctagaattcaaattttggcttataggtacaagcataagcgatacaattaggccggatacaacgaacataagagttagttaccggtggaaaatcatataactagaatgaatggatcaaactgataactaaatttgaaggaatcagagcagcttacattgaaacaggaggcacagaagataaaatctcttgtctctgtcattgatcagcctagcttgaaaaacaaacatttgactcatttttttttacacagggagagactttttaaactctatctaggcaattagaccaaactaaaaagcccctctcatcacaggggtacgacagtgtcaatacctactccattggaacaatcttaaactaagagaaaaaaggataaaacatctagctactacagttaaaacaatgtggaacccactcttgctaaccgaaaacccaccaaccgattaatcaaatcagacactaattgaggcttgagaaacatgcattattcgctggcaaaacatgtatagtacgtcttagtttatagaagtggcatagttaatttaattaagtgcaaatgtcccatatatggacactgtctgttagttgcaactttcaagaggctgaattgtctttttccctgacgaaggtgacacccagatctatgggtttagcaatcaataatgaataaaccttctaggcaagaacgaatcacaaattgccttgtaaaaacacatcttgaccgtaaccacacactgatactgcagctggtagcagaacacagtcaagatcagcttggatcggtagtgtgtgtgtatcatctcaaaagctacggattggaaaataacagaaaaatactgtccatggatactgcaagcgcaggcaaggttaatgaacaagaccgcaaccggcaaattaagacagattgtagcacagaatgatcaaatactgaaatgattgaacaaccaaatcacaaaaaaattcaatttgatgctcttgtcgtcgtcgcacgagctcttagcttgactaaatcacactgtgatctgtgggccgttcaatcggtgtcccgacggtcaagatgtgatcgcctgcatcatcgtcgtcgagtatatatcagcaacaacctcaaccaaacatccacatggccactctaacccagctggaaaacagtcgacaagtaaaaataaactttatttaaaaaagatcagataaaagccactggataaactaataaataattcatacatgcatgtactatatatatatatatattactgttcatttgttgattataaatttaaaaataactttatttcaaaaagatcagacaaaaggcacgggataaactaataaagaactcacacctgcatgtcctatatgctatactactccatctcttgattataaaataacctgggtttgtcccccaaacgtactcgatcctaataaattaggacaatgtcattctaattttgtaaagtttgagatatgtcatcggtatctcaatgacatgtaggacccacataagtcaatgacatgtgggtcaggatggcatatctcaaattttacaaaattataatggtatggttctaatttttccaataatcaaaggttaacataaaccaaatggccactatacacacgaatcgattcagtcacctaccgcagcaaacaacaagccgagcagcctccaataattcatcccatacgtacctctcccctaaaaaaaccccaaatattacttcgattctagcccatgaggtcgacgacaacttaaaaagaaaaaaaaatgctcctgtatttttgttccagcttcatgcatgcacacacacagtagctcgtgctgactaagcggctgaccggtctgccccctgctgatgctaggaagctcccaaactcctaatctttcggtataaacacgcgcgtgaaaaaacacaacggatcagcgagcggctctgcaacgaagctccctaccatcccatggctgcgacagattgttttattacgcaaatggctttattattattattacacggattaattacccccctcgtgcccagtccaagctcaccctctcagtcaagccgaagcttaatcctcaccaacttccccgggttggtatatataccccgtctcctctcctaatcactagtaaacttgtagcttagccttgcaaggccaagcaggcagaggcagaagagcacaactccccccaaaggaggagtttgctcgatcgatcaccaagaacatcgagaggaagaggaagaggaagcaggatggatcgggaggtgcacaggatggcgagcctgaggagggaagggtcgatgtggaggagcggcggcgacgtgttctcgcggtcgtcgtcgcggttccaggacgaggacgacgacgaggaggcgctgcggtgggcggcgctggagcggctgccgacgtacgaccgcgtgcggcgggggatcctggcggtgtcgtcggaggacggcggcgccggcggggagaaggtggaggtggacgtggggaggctgggggcgagggagagcagggcgctgatcgagcggctggtccgcgccgccgacgacgaccacgagcggttcctcctcaagctccgggagcggatggaccgcgtggggatcgactaccccaccatcgaggtgcggttcgagaacctcgaggtggaggccgacgtccacgtcggcaaccgcggcctccccaccctcctcaactccgtcaccaacaccgtcgaggtacgtgcgtacgtaactactaccgcgtgaattttcctcgtggtggtttgatggcgcggcgcgatgccgcgatgtaacgtgaggagaaggcaaacgctttttgtttttgagatgatgaaacgattcgagagagaggccgagtttagtttcaaattttttcttcaaatttttaatttttttcattatattaaaattttcttacatacaaacttttaactttttcgttatatcattccaattttaatcaaattttcaattttagcgtgggctaaacacaccagaggtaggtgagcgtggccacggtctccgcggcgtcgcgcgcggacgccgctagctttggctacatccggtcaaacggtgggacggacagagcgtgcactcggtggcgccggcgccggcgccacggcgccaccgaacgcagcacgcacgtgttgggttgggttactgttgctacgctcagctttagttttgtgccctgggctacccgacgagttggcccaattgccggggagacttggcacttgtgcaagtgcaggttaattacaagcaagcaacgtgtactcttgtcgtgtgaggtgtgtttgcgtacggcaccgttcgattctgggtgatgaagattaactagaggcacataaaataagaaaattattaacatatgatcaactaagttttaattattttaaaccgataaaatagatttatttgttattttaaaatattttttatataaaatgtttttatacgagacgtacccgttttgaaaatctatatcttaaattaataaaaaaaccattattgattatttttaaaggaatagttaaatcctgaaaaaaaagttgtggatgaacagatcaaatagtaaaattaagattttttttgggataggaaaaggtgaaggaaaaaaaaaacgttttcttgaaaagaagggaaacaaggagcagatatagtggagcccactaagctaaaagcccccatggcgggcccggcctgcagggagactctttctggttcgggttcaaccaaactagttgaccgtttccactatccaccaacctcccaccctctccccgccacctcccaccttaccgccgccgccgccgtcgctggcggcgccgcggcggcgagacggcgaccgcttttcctacctcgaatgagttctcacggggtttccaccgacgcggcggcgcagaacaacatgacgcgtggtcgtcgcggtcgcggcgcgggggcggggctcagcggcattccgtcgagcacgtggcgcgcgcgcgcgagtcgcggtacttgtggccgtcccctctctcgccgacgcgacggcgcgctgcctcgccgagagaagtaagttttctgcgtatcgctgtgtgctgacatggttggtggtgccgtgctgtgctctccaggcaatcgggaacgcgctccacatcctccccaacaagaagcagccgatgaccgtcctccatgacgtcagcgggatcatcaagccccggaggtaaaaacccataacacagccagccatgcatcatcttcttctgcgtgtaccagtgcatcatgattcatggcgctcgcgctaacgcatccatccatggtggtgctctctgtgtaggatgaccttgctgctgggacctcctggctcgggcaagaccacgttgctcctggcgttggcagggaagctcgacaaggacctcaaggtctcggggaaggtgacctacaatggacacgggatgcacgagttcgtcccggaaaggaccgcggcgtacatcagccagcatgatctccacatcggggagatgaccgtgagggagacattggccttctcggcgcggtgccaaggcgttggcactagatatggtatgaacctgaatgccaagattacatgatactcctaccatctaatgcttattgacgcctttgacatgagtactgaggtttgctgtttttgctttgtttagaaatgctgactgagttggcaagaagggaaaaggcagcaaacatcaagccagatcatgatattgatatctacatgaaggtgatgatgctatcacataagagtgttctagtttttttttctctctcttggaattgtatatgtaaccaggattgcattggcgaatcatttcaacaggacatgtgatatatactatacatgtctactagcaatgtaagtaacaccttttatatttcatacatgtaggcctcagctatgggaggacaagaatctagtgttgttacggactacatattgaaggtacagtctgctagctgtggattaaaccgtagtactacaaatatgatttcttgtggcatttgtgtatggataatatctcattcctgcttctctgctacataaatgcagatattaggattggatatttgtgctgatacggtagtaggaaatgagatgttaaggggtatatctggtggacaacggaagcgtgtcacaacaggtatgactaacagtctttagcaagatgggggttgttctttaaagaaaaactctaactgtcctatatgttcacaggtgaaatgcttgttggtccagcaagagctttgttcatggatgagatatccactggactggacagctcaaccacgtaccagatcgtgaattcccttaggcagactatccacatccttggcggaactgctgtcatctcattgctccagccagcacctgaaacatacaacttgtttgatgacattatactcctctctgacgggcaggttgtgtaccagggtccccgtgaacatgtgcttgagttctttgagttcatgggcttcagatgccctgccagaaagggtgttgctgatttcttgcaggaggtatgtgctgtttatcatctgtaaaaattcatgccatttactgcacaaggttttcaaaatagacagtactgatatctctgaatttgttgaaaaaggtgacatcaaggaaagatcaggggcagtactggtgtaggcgtgacagaccataccgttttgtgccagtgaagcaattcgcagatgcgttccgttccttccatgtgggccgatccatacagaatgagctttctgagccatttgataggaccaggagccaccctgctgctctggctacttcaaagtatggtgtcagcaggaaggagttgctcaaagccactatcgatagagagcttcttctcatgaagaggaatgcatttatgtacatttttaaagctgttaatgtaagttcatatctctggtgcactaattttgattcaagatatcgatcgatcgatctgatcatctgaaactttctttcattgcagctaactctaatggcattgatcgtgatgaccacatttttccgtaccagcatgcgacatgatagagattatggaatgatctatctgggggcattgtactttgctcttgacacagtcatgtttaatggtttcgcagagcttgccatgactgtcatgaaactacctgttttcttcaagcaaagggatcttctcttctttcctgcatgggcctacaccataccatcatggattcttcagattcctatcacatttctcgaagttggtgtttatgttttcataacatactatgtcattggatttgatcccagtgtaagcaggtaagatgcattgatgcagatatctacatgcctaaaagaatccaagaaataagcttattttgtatgcagatatctattattttgcaaggtgttgcctagtatattgatagaaatgttccacaataaatgagtctattctgtgaagtctgaaactctgaataactttttgtgcataggttcttcaagcagtatctgctgctacttgcactcaaccagatgtcatctgcactattccgcttcattgctggaatcggaagagacatggttgtgtctcacacatttggacccttatcactgttggcttttgcagcattgggtggctttatccttgcaagacgtaagttactggattccctttcaataattgcatgttcttatatgtacttgaaattgatggttttaaatgctaattgttcctgacatgtttctcttttatagctgacgtgaagaaatggtggatttggggttactggatatccccgctatcgtatgcacaaaatgctatttcgacaaatgaatttttgggtcacagttggagccaagttagtgccacatttcttcaccagcaattgaacttgcaatgttataaactgtaaaactgaacatgtattttgcatgtcacagatacttcctggagaaaatgtgaccttgggagttagtgtactaaaatctcgtggtatctttactgaagctaagtggtactggattggacttggtgctttgcttggatacactctcctctttaacctgctctacactgtagctctttcagttttgagtcgtaagtatatttgaaagacattttttagaactccaaaatatctaatcaacatttgcgagctaaaagataataactgtggctacttgaatttttttcgcagcattcactgactctcatgcatcaatgtctgaggacgcattgaaagagaagcatgccaacttaaccggtgaagttgtagagggacagaaggacactaaatctaggaagcaggaattggaattgtcccatattgctgaccaaaactctggaattaacagcgctgattctagcgcaagcaggaagggaatggtgctcccatttgcaccactatctattagttttaacgacgtaagatactcagtggacatgccagaggtaattttgctcagaacgactacaagtgcgtaaaaatcattatgttaacacaggtttttaacccaattatgttgttttatattaacaggcaatgaaagcacaaggcataacagaagaccgtttgttgcttctaaagggtgttagtggttctttcaggccaggtgtacttactgcattgatgggtgtaagtggtgccgggaagacaacactgatggatgttttagcagggagaaaaactggaggatacatagagggagatattagaatatctggctatccaaagaagcaagagacctttgcacgtatatcaggatattgtgagcaaaatgacatccattctccccatgtgacagtatatgaatcacttgtgttctctgcatggctgcggctaccctcggaggttgattcagaagcaagaaaggttagttagctagattatgggctaacatttgtttcttgtgtatgtttttcggttgttaactgactgtacatcttacgcgctgaaccatgattacagatgtttattgaggaggtcatggatcttgtagagctcacatctctgaggggagcacttgttgggcttcctggagtgagcggcctgtcaactgagcaacgcaagagacttactattgctgtggagcttgttgcaaacccttcaattatttttatggatgagccaacatctggtcttgatgctcgggcagctgcgattgtgatgaggaccgtaaggaacaccgttaacactggcaggactgttgtttgtaccattcaccagccaagtattgacatctttgaagcatttgatgaggtgactagttgtttctttgggaagttatcctttgattcattagatgaactctgtatattaactacgttgctgttcaccttatctacagcttttcctaatgaagagaggaggtgaagagatatatgttggtccagtgggccagaattcctcaaaactgattgagtactttgaggtaagaacggaaaatcaacataaataacaatcatctcttcatgcttcagcacgtaggctgactaagtcacatcaaacggaaattccgttgttcatttgttcagggaattgatggcgttagtaggataaaagatggatataatccagcaacatggatgttggaagtgacctcttcagcccaggaggagatgctcggtgttgattttagtgaaatctacaggcagtcagagctatatcagtaagcttcggcacatgccattctgattaatagaatgaatagtgtatttgaactgcaattctaattattattattattattttgcatatttgcaatttcagaaggaacaaggaacttattgaggagctaagcacaccacctcctggctctactgatctcaacttccctacgcagtactctagatcgttcattacacagtgcctagcttgcttgtggaagcagaattggtcatattggaggaatccatcctacactgcagtgagattactcttcactatcgtcattgccctaatgtttggaacaatgttctggaaccttggaacgagaacgtacgtctctaacatatgttcttattattttaatctgtttgacaaataacttctaaacctttactcatcatatcttgttgcagtaaaaaacaacaggatctattcaatgccatgggatcaatgtatgctgcagttctctacattggagtgcaaaactctggttctgttcaaccagtggtggtggtggagcgaacagtcttttaccgagaaagagcagctggcatgtattcagctttcccgtatgcatttggacaggtaatttgtcttttagactctcggttggcctagttctaatctcatgtatataatgtatgacttcaaagactctgatgcctgaattctgacttgcatttgggattgaactgaaatggctgtgcaataagctattcgttagcactgtcaagctcttttggtcccataacctaacaatgccacttttccctttttaggttgcaattgagttaccatacatcatggttcagactctgatatatggcgtgctggtatactcaatgattggatttgagtggactgttgccaagttcttgtggtacttgttcttcatgtacttcacactgctatatttcacattttacggaatgatggcggtagggttgacaccaaatgagagcatagcagcaatcatctcgtccgctttctacaatgtgtggaacctcttctcaggatatctgatccctcgaccggtaggttattctcccatctcaatttcgccccctttcttttctcatgaaatgtcgcttttattagtcctttagaaccgttttaaatttctctacagaaaatccctgtttggtggaggtggtactgttggatttgcccggttgcatggactttgtatggattagttgcttcccagtttggtgatatccaacatgtgctcgaaggcgacaccagaactgttgcacagtttgtcactgattactttggcttccatcataacttcctgtgggtggtggccgtggtgcacgtcgtcttcgccgtgaccttcgccttcctcttcagttttgcgatcatgaagttcaacttccagaggagatgagaaagtgatcattcttttttgcattcgttctattgtactactgaatagctattagctatcctgtaaatggtatagagatcatcttctagtatttcattatttcaagcatgtaaaaattcggacatctagtaggattctctaggaaaaagaacccttgttgagcttcctgcctcttgaccagctctagctgataaatgtcggatgcagatgaatgtaaagtatggccttcaatgttttcatttttgtcgaattaatgaaagcagaaaatttgttgattcaatccctttgcagcaactcttcagaataacttttgttccattgttctatagatttgactaatagcggagtaaatttttcacaatgcggttactgatcttgtagtaatttactaacaaaataacctctatttttaaatatatgatattgttttcttttgaacataatgtttcactatttttaagaattatttattttcttgcattttattatgaaaggtatttaaagcattaattttttttactaaatttttaaataaatcgaaatggttagaagtcaatagctgcgaaagtaaggcctggtgccctggtttagttcctaaattatttttcccaaaaacgttacatcgaatatttggacatatgcgtggagcattaaatatagataaaaacaaaaactaattgcacagtttgcatagaaatcgcgagaagaatcttttgagcctaattagtccatgattagccataagtgctacaataacccacatgtgctaatgacggcttaattaggctcaaaagattcgtctgtggtttccaggcgagttatgaaattagttttttcattcatgtccgaaagccccttccgacatctgatcaaacattcgatgtgacaccttttcgcgaactaaatagggcctaatacttctgtcatgatgtgcaccttctgtttgatggctggaagcatgcaactggcccccacataactttccttttgaatttggggatgctagttggcgcagctctgcgtcaactttcccaagtcacacccgctgcgaggctgcgaccctctgtccccatctctcccgatgctaatgttaatagtatttttcctaattaatttagagttgaaagcttttcaaatttggaattaaaagtttcagattctggagtaagttttgaattttgatttgaaagttttggattttgagttgaccggcgaccgcacgatatacggagaccatgagctctttcccttccttatctggaggtgttcgctggaatcggaagtagcgcgcgtgcgctaatatggcaatttcgttcgaattttgaccggcgttaggtttcgctttacccgccactcccattttttttcccgcgctttctcgttcccgccaatccgactccgagtctctttacaactgcgtacgggccaagcaaagcgtaagcctcccgagctccatctcgacttggtcggtgcgcccataaattgcaagctccgcttcttcatctcgtcgcttccatcgatccatccacccctcatggcgacggtggcggcggcagcatcccccttcgccgcgccgcacgagatgatggcgcgcccggccgccgccgcgccggaggcgacgatgatggatttggggcagctgctgcggctgacggacttcgacaagatcgccaacctcggcgacggcgcctcgggcgtggtcgccaaggtgctgctccgcggctgtggctccagcgccgtgttcgcgctcaagaccgcgcactactgcg

SEQ ID NO: 9657 - DNA, 45894 bp, Oryza sativa
  unsure (1)..(45894): unsure at all n locations
ccgcgacgacctcctccgcctcgtcgagccgctctcccgggaccagctcgccgacatcgccgccaccgccgcgctcgcctcgggggtggccctcgacgccgtgcgcgccgccgccgaccgggacccggccctccgcaagctcttcgtgcgggggctcggctgggagaccaactccgactcgctccgggccatcttctccgccttcggcgacctcgaggaggccgtcgtcatcaccgacaagtccaccggccgctccaagggctacgggttcgtcacgttccgccacgccgactccgccgtcctcgccctcaaggagccctcgaagaagatcgacggccgcatgaccgtcacgcagctcgccgccgccggcgcggccgggggggcgtcgggcggggccgccggcgccggtggcgcccccgcggccgacgtctccctccgcaagatcttcgtcgggaacgtccccgccgacatgccgtcggagcgcctccttgcgcatttcgcagcctatggtgagattgaggaggggcctctagggttcgacaagcagacgggcaagttccggggctttgccctctttgtgtacaagacacccgagggtgcgcaggcctcgttagtggactcggtgaaggtgattgacgggcaccagcttgtctgcaagctagcgatcgaagggaaaaaggggaagcaatcgcagcagcagcagcagcaatctggacctggtggggctcagccgccccaaatgctccaaggcgggccgccggacatgccgggttcagggcttgggcttggtggaccacaaatgggtgcgcagtatggtggccctgggagtctgtcttcgtatggtgcatttgggggtgtaggcgctgggctaggtggtcccaatccgtatgcgaatttgccatcttccatgggcggcggcggagctgggttgggttcattgggcaatcagatgccttctgggatgggtggtgctggggctggtgcgtacgggcctgggggattgggtggtggttcatttgggggctcatcccagtttggtgctggtgggatgggggcttatgggggtctaggcatgggtggagcctcatcactgtaccgcatgcaacagggttcgggtgggcttccttctggcgggtatggtgagggtaactaccctcttccagggcctggtttccggggtcaggagggtggaatgtcacctggaccaggtggtagagctcctatgtaccccaatgtgcctccttatttctgaggtaattttttgcaacccttccgtgtcttgaattttgtacctgattcccttaggctttttacacccaaatgcttgataattgtcttgttatgtggttatgcctgaacattaacttaatttgtgtttgaattgtgattgctgcatgctgtgtttgcatttatgtgaatgtgtatgtgactgaaatagtgatatgtaagaaactctcactggttacacactgacagtctgtagagatatggggcaatagagtagtgcagaatttataggatgctacttctgacaatataggtttagtatgttaatgtgctctagttgctgattacttcgttctgtatatttttatgctgagaaatctctttgggtgttccttgttttggtagcatcaaggttcagtataatacattcatagtaatattacacactcttgattggtaaaatgttgctcttgtttgttgttgcaatagttgatttcagtgcctgtgttgcttttatttgttcatgtgttttttgtagtgttggactctaatttgcatccaaagtggactgtcttgtaatattcaaggtatttgatttcttataatgctatatcatgcgtacctgtgtggtaatttgcttggtcggacaatgttgcattatatacttgaccacatttctttgaaaggttaaagtgaaggcaactgtctgaaatttgaggttgatctgctatttgagtatatataataaagtatgatccttttggcttaaaactgttaatcctgcctgtttgcagtacatcatatgattgttcgttcttgggtactctggcctgtggatattttttgtaggttactcctgaatatgttttcgcaatacaagcacatttaaaaatccatttgcctggtttgctgtttgacgatattctacctgtttcattttttgccttttttgcttcataattggcatgcagcttattgttttactcaaaacatttgcaattttgaagttgccatatttttatacaagataataagactaatcaatattctctatcatgaatcctttttttttgttatttctttgttatttctttttttttttgttatcaatatttatgcatctttacttcacttgatatttcttctcaagtttcaaagttgtgcttgatggcattcccctttaggattaggcttgtgatatttgagcttgatgtattaagcaatactatatcttttattttactttaaagttatattatcttaattttgtttgtatatttgtgaattggtgaactattgattgaattccagtgaatgtgtgaatcaggtgtgtgacaactcttgggagcatatgctttgaatggttgtgctgaattcagaagttgtctgcttacatggatgtcttgcatattctggctgcctctgatatggaaatcagttttttgctctcaatttttctgttacaagataattcaagctagcttagtgttttctgagatctcttcattagacatgtactttctcataaatatgtgaggtgtcgtttcacattgttgtgtaatgctcattgtcttatgatatccagttacttatgattacatctggtgcttggtttatttgcgtgacatgttatttggtggcaacttgattggcgaaccatttgttatcaatatgtgtctgatgttttgtaatagctatatataacagcagttttactgaatgacttcaggattttttttttatggttaccatctgcagatacgtgcagatttattagaaaacctcctgtattttgatatgactatctgctgagttggatctttagtaagaaagaatccatgttgtacttacccacttccatccccaactcttgtacctagcatttgtagtttcatcgagccatccttgttgctagatacttcattttgcttggagtgagaatttcctctatggtcagacgctatatggttctgttgtgctcttgtgatttggttttcaacatttcttgtgtatgtacatctacatcattacacgttttgcttctagtgattctttcttagatagttagactgtactacgttcttttgttgtgctcctgcatcattacacattttgcttcgactgataatttctcattttgtcagactgtactatatatgcttgtactgtgctcttgtgagttagttttcaacatatgttgtgtactcctacataattatacattgcatgcgtttgttaggagtattttcaagtgtacaatcacatgacttgttgctgttacgtgagagtttgaacattttctgccattgagctgaggggcatctttcttaggtccttttcttggagtgtagcagcttgctcccctttttttgggggtcaaatttgtgcttttgcattcactgaaattattttggcttgcactactgcctttgctattcgcaattgcaacttctgtatgcaattcaatcaccatgattttgtttagattcaaaaatttttctttaaacttccaacttttctatcatatcaaatgtttgggcacatgcatagagcattaaatgtggacgaaaaaaaaaacaattgcacagttttatgtaaatcgcgagacgaatcttttgagcctaattacgccatgatttgacaatgtgatgctacagtaaacatttgctaatgacggattaattaggcttaataaattcgtctcgcagtttacaggcggaatctgtaatttgttttgttattagtttacgtttgatacttcaaatgtgtgttcgtatacttaaaaaaaattggcacgcgaactaaataatactcatcgtatgagaatgctgctccatgtattcattgattcttgaattttgattctgtgataattaaataattgtaatgtgctagttatctatcattgtggcgctgatttgttttgtccacgattttggtgtacctgtttgccgctacaaacttacgcagtgttgattcctgacacactgacgggcttgtttatttctcgtcgtatgaacttgcatgcgtgatgctgcctatgctgtgcttgtttagtttatcctcagctgtgccattcattaccaggaattgcaaagctgcaaaactgtgtattatctcttttatcctaagctagtgtacattaactggagacctcgccaaggaggcaagcaagagcaggttccaggtatcaggcagccccggtaagcaccagtggctacagtcagcgtacaccagcggctgttgccgctgctccgtgctcaggggcttcccttccctggtgatggtgtacaccgacggatgcgcgtcgacccggagctcggagaggcgggtgatgttgaggtacgtgacgggcgtcctcgtgctccggatgttcctctcgacgatggacaccaggcccctcgggaaccatgggacgatcttcgtctcgtccgtgattggggacgtctggttgtagcaccagttttcgctgcatttgcaggtgttagatcagtcatcagaggtgtccattgtggctgggtgccgcgggtggtgcaagttaacttttacctcttgtgttctggggagatgcttcggaagaagaccctggtcctggccgagtccacgttttggtcgacccagctcgcccatgtcccaagtgcctggttgaacgcctcctcgcctcccatctcgaccggcttcccgtccgcctccagatggtcccacctgcagtaacacactcggcttcactgccctgctggagagagagagagccagagaggagacgctctggagcggagtggcttacgctctgaggttgccggtgtgggtccaccagtggccggtgttgaagacgaggacgtcggcgccgcgcagcttctccagcgtagccgggagctggtcaagcttgagcgccctcgtccggtcctgcttcgtctcgagcgtcaccaggaacgggctccagaagaactccaccgagcagttgtagtcctgtgcatgtttgagtcacatatgtaatcagaactttagaaaggtcctgcttgtcattcgatgtacggattgataactaaacgaacactggttagttgatacatagcccaaagttttttttttcaaactttcaactttccatcacatcaaatctttcatacacacacaacttttcagtcacatcgtctctaattttaaccaaattctaaactttgggccgaactaaacacagcctatctcaaatatatagcttttaaattgccacctaaaagttagggccagtttggtttggtgctatactaaaatcttggtagtaccaaagtttaggcaacttttagcactaccaaatttggatggccaaaacttttactatctaaaagatgtgttgttaaaaatttgacaccaaaccaaacaaatagaaacactattgaaaattgccaatgaattggtagggcacaatttggaaccaaaccaaactagcccttagtacataacctgacttcccaattcataacctgacttcccaattcacacactagtagttcaatccgctaatttgatactattaactttctcccatcatgtctctcactttcatctcctttccttgttactaatatggtgtcagtctcaaaataagcgtagttttgcattcttcatattcaacgtttaaccgttagtcttatttgaaatttttttataattaatatttttattgttattagatgataaaacatgaataatactttgtgtaaataatttttttaacttctataaatttttcttattttttaaataaaatggatggtcaaacattagacacggatacctatagctgtacttctttgaccattcatcactgttcatgtccaacgtttgaccgttcgtcttatttgaaattttttaatgattaatatttttattgttactagatgataaaacatgaataatactttatatgtgactattttttttataaatattttaaataagacgagcagccaaatgttagatacggattcccacggctgcactaattttgggacggagggagtacttggcaattggcatgctattcaacgtcaagtgtcatcttagttggagcatcagaattttcctaagcatgtccagaatttgtcttattttcggttattcacttatgtctatttgatacccgaggggggtcgtagactggtagcggatcgaaaatgataatatagaggacattaatacatgtttcatactattgtttcaacttaagttgggcttcccttatcgcaaagtgtaaactatttaacatttactgataaagtaaggaaaatatgaaggccgttgcatctcatggtttagttttggatagtgttgcgtgtcatgccttgtaataagaaaactcggcctgtacatatgcactaattctgggacgttgtccaaagaaaaaacacccccgtaatttcgcatgtacagccgacagagcattcttcgatttgactgatttgtcccgtaggtcaacactacctcaactctggcgacacaatcgccaaaactcatcggcggattaaatcaatcgtgtaatattctccctctagtttgtgtctatttcatactacaagtcgttggttttttaagtaagtttaatcaatttttttaaaaaaatatagcaacactttaaaataaaataaacatattatcgaaatatagtaaaagttaattgtagtgaaactaatttggttatataaatgttgctaaatttatcaaaaacttaattaaattttaaaatgttaaaaaattaaaatgatttgtaatataaaatcgaggaaataatatgaaatggaggggtagtaatttgtttggcgtgcacgtaccatggcgcggaagatcctgtagtcggaggcgacgtcgaggacgcgcgaccgcgagcggtcgggcacggcggtgtagaggaggcaggcgagcgactcccacatgttgcggttcagcgagtcgccgacgaacaccaccctccggttccggcactgctccagcgctagcgccagcgccgcctccctactcccgccgccgccgccgccgccgccgccgcaccctcgcggctcccatcgccactgctcgtactcggcgtccggccgcccgttccgccggcacgtcacctggtcgctcaggaacgggcactccgccgcctcgtacagcgggtagccccccgccgccgcgccgtcgcgcacccaccgcccctggaacaggtcgcagctctcctcatctcctccctcctcggcggccggcgaaggcgccggcgccggtgcggtgctgatggcatcatcgtcgtccccctccgccccctcatccccgccaagatcaggcgcgcgatcacgggcaccgcccggcgacgccgcttgcgccagcttgacgtacctctcccacggcgcctccccgaccacctcccgctgctgctgcggcgccgcgaagagcggccggcggaacgggcgcgtcgagccgaggaggaggaggccggcggagacgacgagggagaggcagaggagcgcgcagagcgaggtggccagcgcccacctctgccgcgacgccgccgcgacggcgagcgacggcttgttcgccatggcggcggcggaatgatccatcgctaacgacgagagtttaatccacaaagaagcacacaggtcaactgctcaaagcgaggtagtaattattaatttgtagggttaattagctcgccggagcacgggattaatcaaggcgaggaaagcatggaggaggaggggtttttggtttggttgctttcggtgaggagaggttgggtttttggttgggtgtacacactacacttcacttgggacgctgctgttttcatgtgcacttgaaaacagtcactgactcgcttcctctccatgtacgccgtgtttagttctaaatttttcttcaaacttctaatttttctatcacatcaaaacttttctacacatacaaacttttaacttttccgtcatatcgtttcaatttcaaccaaactcatgtgagtagcaattatactgccgctgatgcttagtggcaagcagtacagtttcaccaactgtaatcatgaagaacgttatgtttatgccttccagagtgaaaacgaagcaattttgatgctaaaattcctactatcaaatacgtggagtacttttaggaaaaaaaaggagtatatatttttaccagaatatttatatctttctcgtgtatccaaatcagtaattatggagagttggtgatggatgataattggatagttcaatttgtattcaaagttcgtgatcaagttgatgtggcacgtgaatgcttcttgattcgttattcttccgatcgatgcgaccaaagtacatacacataacataagccttgtggtagtacgtatgtaggtggacctgcatccatgagtagtagtagggtagtagatgagctgttgttagagtaaaaattagaaaaagcacacgcttttagccgtcagctgaatgggcacaagccttgttaatcttcacaacctccttttgccatgggcatttttctcaatcatcatgagactcagatcgaccacactactacctccgtcccacagtggatgtcgttttaactttttcttataacatttgaccattcgttttatttaaaaaattagtgcaaatataaaaaaaagataatcatacataaaatattttttgataataaagcaaatcacaaacaaaataaataataattctaaattttttaataagatatatgattaaatattataaataaaactcaaagcgataagtaatatgagacagagatagtagtaattatcagcgtgccacggtgtctgtcttttttccgggagagacagaggccatcatctgcatgtttatagcaattagcaaagtcgaatggtgagaacaaacatagtaacggagtcacgcgacgtgcacgttgcacgcacgtacggcgcgcgcggccatgatcagcgagcgatcgagcgtggccgtcgcgtaaagaatcggtgagatttgccggcctggttgcctcgtcgatctcgtctgcgtacgcgcgtaacgtcgggcaaagcgaagctcgcgctcgagtagtggctgcccggccatcatgtcggtcgatcattccatcgcctttgccgctttgcgtaacttatgtctatttagcacagctgtaactccacctttatttcttctggagttgaagtccagacgctctagacaaaaaagagcggagctagatagagcgatttccacaacttcattatagacataacttctggaactctttaccgtgttgggctttcgagtcatggggagttggaataagttcatatgaggtcccttaactttacactgagtccgattttcgtccctgaatcacaataccagataccatgggtccctcaactgtcaaaaccggtgtagatgaggtccctcagcggtttagatggcagttttgactgatgtggcgctgatgtggctaatttgacttagtcctcatcgtatgtggcggtgatgtggcacttggaagcaaaataaaaggtcggacccacgtgtcagtcattaaaaatagtgggacccaccctgctctctatctccccagcgccgtcgtccttgtcccttctccctcccggcattcttcatccttcctcgagctccctagccggccggcgagcgcgcggcggcaggcgagagagcggcggccggagctgcatgacctcgcccccctcccccctcctccggcgccgctgcatcgatctgcacgagttgcggcgacggcaagctcacagccacgggacacggtcagcgtggcgctgacggggcccgggactcgagctcgcagtcgcagccgctgctgcccacttccccaatcccctccatatgcgtcaaagtttttgatattcatggcgttctgctcttgttctggtggattgattgattggtgtgcttgtgcggatgatttgtgcgaaggcgacgcgaagaacgcccacctgatgtctctggacgtcgcctcggagaggctgcggctgttcaaggccgacctgcttgactacggtagcgtggcggcggccatcgccggctgcgacgacgtctttcatgtggcctgccccgtgctcctctccgcccctaacccaggggcacacatctctcttttttcagcaaaataattccttttcttctccattgactggttcaaactgtagactggttactgaaaatcgacaaaaatcaacagtttctactaaaaatgatttgtcgaaactattgatttctcaacaaccagtagtagctgaagtctgcagagttgtaattaaatcgtcatgttcttgtagctaaatgaattgatgttgttgtaggttcatacacttgctgctgctgtaacgggcacgacgaatgtgtggaaggcttgttcagaagaaaggttgggacttggtaaggttgtggtggtgtcatatgtctctgctgcgatagtaaatcctaactggcctgaaggcaaagctgtagatgaagattgcaactcgtgcagatcgatgcggcggcgtagcaggagtcttcgtcggcggcggggccaaggtcgtgcagctctggccgccgctccttcctctcccgtcatgcgcatgccggcctaccctccccgcccgatggctggcgccctccgcacttctccccacgtgcgcccttctccctctccatgcgctcgccggccggcgaggaaggtcgaggaaggatgaagaatggctgggagggagaagggaaaggacgacggcacggtggagatagagagcatggtgggacccactgacatgtgggtccactattttttaaactgacacatgggtcccaccttttattttgcttccaagtaccacgtcaccgccatataggactagaactaagtcaaactagccacgtcagcgccatatcagttaaaaccaccatctaaaccgctgagggacctcatctacaccggttttgacagttgagggacccattgtatctggtattgtgattcagggacgaatatcgaactcagtgtaaagttaagggaccttagatgaacttattcctggggagtttgcccgcacgggcccgaagctggttggaaaaagcagcatcgccgaccggcccacaacatgtgacgcgacggcggcccatgagagaagccggagcccaagcaaaaaccgcttctgctcactgggtccatgttgtcagcgacgcatggggccctccggcctccgctgccacgtgaggtgcgcccaatccccggggagctaggagcaaggaggcgcgcggcgttggggcagtggtactcggtgtgacctggtggaggccgtgctctccgccttttggctgcttgatgcgtcgcagccatccgatggcgcaattgctcgccgccgccaccaccaccaccacgccaccctgcggcggcctcctaaccgcgcgggcctccgcgtcctctcccggctgcttcctccgcgcgctgccgagatcccgcgccatggcctccgcctccggagccgacgctgccgctgcggcggttgctcccccgtcgctgctcgtcttctcaggtgcgtcttgctctctcccgctctcgccaatttggatcgcttggagcgtatgatagtgcgtgcgcgggcgccggggggtctcggtgatttgctggggattcgatgcgtgcccataccttgctgcgagtatgggcacgcgtgatggattggtcgaattggcgagaggaagttcctgtgatttgtgattggctgtgatttgggcgattctgtgcataatattttgtgtgtgactgagtatgcgagtttgggaacaaaaattgtcgaaattacatttgtgcattttttttccttactcaagccatggatccttcagtactatcttactatcttacccctccttgggatatgtattttgacgcaatgtggcaatttatgatttggtatgctcaactaggatgatggaaagtgtccagtgctttatgtgctcctttctagctcacgtttggatgttgaactaatatgacaattatggcatggatacatatgaacgctgctccgatagccctggtttatgtgttgataattggcacatcttaaattcttgtgatagccatgtctgaaatcctggatattctacctgcgaaacggaacactaaatggtgtttgtcttggtaacactaggttctgcgaaagcatatctccatgcagcgctggatgaaaataatgaaatgtcatttaatttccatgtcaaaattttttgtttcatatatcctgcttgaatgatggattgcacaaactataccatgctcctagagtagctgtttaaacagttctattttctttcttatggattatgcattttgcgactttgcgggatttcataaattgaaattcgcttggcacttgcaaccttaccctatctgtgtaatgaacaggtttccttttttccttttctggttggcacaggaagggatgcactaatgtcatttacttttgtgttctaatatttaacgctatccaggaggaaccgcttttaatggtgttgtagaagagctgaagaaagtgacgactcgagttgcacatgttcttcctgtttccgatgatggtggaagcacagctgagattgtgcgagtgcttggtaggttgaaatctcttgccacaccacctgctacctgagataacaatttgtatagtaattgaaaatccaacctgttcttaaatgttaggtggacctgctgtgggtgacattagatcaagatgcttgagattgtctgatgaaagcacttcagaagccctttctgttcggacattgcttgggcaccgtttgcctcttgatccttcagaagcaaagcttgagtggtagcaattagtctgtctattgcatatcaaaactcacctttgttcattcaaactggatcaagtaactggctgatgttttttatgtatgaaacaagatgtgtgatgttgttaggttgtgtacttgacaggtaccagattgtagaaggagagcacgctttgtgggatggtgtctcacagccatacagagaaacaatacgtgcctttttagtctacttccataatgaggtcagttcctctgtagtattttcttttcatagcatatttttaatttgcttaaagattttgctttgaaaatttcaaatgaacagttttctgactggagaacagaagagaatatgatttttcgcctcccccccttctgttttcttttttgccaagatttattttcctggtatagagggcagtctgatgatcaagcagtcgttccttgcccatgacatataattgcagtcgtttcgtttgtgcagatacttcgacggtcagctgaaatgttttgcttcaccaatggcaggtgattcttttaaggtgaaatttgcagtaaatcatattcttgtgattgcttttaacatgtcacccgttggtctcttgccacttctcaattcgatggcgtgacagggatgtcctttgtggcaatacttatttcttggtattggggcattttttgtggtcacaactcataataacaatactcccatcttgcctacatctgttattgactacagctttttattcttgcagcattgggaatttcttttttgctggggcacgcatattcttccagtctctggatgctgcgattttcttgttctcacgtgtgtcacagatccctgctgaaagtcttgttcttccagtgatatccacaaatgacaggcttacactgggatgcgaactatgggtaacatcacttatcagtattttagttgcacaataaaaaaaccagtagattcatttttcggactgctctggtgatctggtcttcttgttcttatgttggttaattttattgcttccatttatttatttatttattttgttatttcactgatagtttaattagccccccttataaactttctttaattattccaacttgcttctgaaaactggcatgattgtctttgttttacaatgttactcctattattacaaacattcccttactacaaaatcacatataatcatcttggacattattccattttcaggatggaactatcatccgaggtcaaaatgaaatatcacatccaagcaatggacgtaaagaagttgttaacaaggtactccagtctataaatcatttcagcatactcccaatagtagttaatatgatctatgtaacatcattgcgatgaaggctccaaagcatttctggggccacttcaatatgttctatggaacaacttttttatgttttatcttataaaagaagctatagaagaaaaaaaaatgttactcctacctttaaaattgtgttgccatatccttctctggtggactgatatttacaattgtgcaaactccatttcgttatgacaatatcggctatttttgcttcatttccgtttttgttcatggcatggttgtcattgattcacatgttatcttgaatctatgtttttctcctttttacctgggcatgcttgttgatttcttataatatttgtttatctgtcactgatttattttttattttgctttttatttttggaaaaggattgtaattcatgtagtgcacttccttcaaggattaagcgtgtcttttacatgtcaagtgaaggcagcaacctgttgcatgaggttagtacattcattttatcgtaaccacctagactgaacctttcattgcacatctatcatgaattcttggttgggtaagactttgatttttgttaaaacaaaagctactagtccctctaagaattgattcagcctttctactttaatttctcagcgtaaaatttttttcttgaataccacacatcttcatgttcttaataatgatcatgatataataatcagaaaatgtagtctatatttccatttatcatgcttatctaatcagtctcatggtgttacttacaacattgtgaactataccattcatcaatagtgggtttttagctcttggttaacttaattctttaaagagtacgcttactccttctaagcttagtaggcatgagaagggacaactccttcatatagtaggctgttatgttttgtgaatatcatgggcttaaaagggtgtgcacttataaccatgtaagcatattgggatgacatgtatcaaattagccacttcacaacagtatatatgtaaacaacccttttttatgttttaaaactcctaactgttcctactaaccttgcaatgcaggtatttcctgaagctaaccgtacagttttggagcagttaagtaaggtggactgcattgtatatgctatgggatcactctttacatcagtctgtccatcattggtaaccatgctgctctattttttgtttgtacataattgtattgacttgatggtcttaagtcttaacatgatatcagatatgttcatttttatactacatgcagtactaagcaaacatgggtgccgtgcacatctgattactgatactgactttaagcttttttacctgtgcctgttttccacatcagcttgtcttcttctgaaatttaaggctgtgcaggtattgcgtggcattggtgaaactatagcatcaagatccattccgaaggtagtcatgttaaaaaaatattgtcttgttttcatatgctttaatacaatgttctgtatttgtgttgattcattttttcttgattccatcatgtaaataaaagcattactaagacctgacattcttgttaaaccatattgacttgcttcatgctcttgatttcattatgctagaatgggtttaatagcaacctagaatagtggattcacctccatagtagtggactcatggggttatttgatgtgtgaagggagtttttcttcacataaaatgttgtttttcttggtttttagccccttggttgatcatgcttgtggctattggtgcttttgtctaaaattatttattctgaatctaggtacttcttttgaatgggtcgcatgacagagaaacaactgggttgcctgcttctggctttgtgactgccattactgattctctaaaccgtacatatggatatcctgacaaaagtctaaagaatcttgtaagttcggtgactgtgcctttgaacagattttcagctaatgattggaggaattatgcatcatatcatttactagctttagaggatgggaatatcccacagatcagcgtcccctggtccacatcttgaatgattcagttaaagatgtacatatgcccctgccccttaacattatctgtgtgaagattttccatctgacagcttctttttcattttgtgcagcccaaagactatgtgaatgctttattggtaccaaaaggaggccaaattcctttggatataaaaaacttgtcttctaaaggaatctttcatgtggtaagtgtttgtgtttgctaaaacagtgatcattaagtgtaaaatgtgtggaaaaatgttatagttatccatcgagtccttaactgtgtaatattttcgagaatggatagaaaatccagcctctatatccatgaatggatatatacagccaaaggttacatgaatacttagattctaggtcttttactgagaaacaatcacgaaaaagaaaatgaatggtcgagatgctccgaaattttaacgcttctttcctagttggcttttctgtgtgcgataccatgttacttccgtcatttcatccccaatgaaagaggatatctagcatcagcttattaattactactacctccgtttcaggttataagacgttttgactttggtcaaagtactgtttcaagtttaactaaatttgtagaaaaaaataaaaatattttcaacccaagacaaatttgttatgaaaatatattcaattattgatttaataaaactaatttggtactataaatattactaattttgtctataaacttagttaaacttgaagtagtttgacttcgactaaagtcaaaacgtcttataacctgaaacggagggagtacatgataaaactacaataattgcagattttgcacggtgggtcacattgagctctgtagccttggttaaacaagcttacttttgcatacttaggcatttatccattacatgttagaaaaaaggcacactgttatttacacaagataaatatgaaaactcaatgtgtaggtcggtattccagaagtacgcgatactggtccacgttcttctgtattgtagcttgtgcataaacagtattgagattgtcgttttaatgtgctaacttatgaagtatattgcaggttactgtggactctatacacgatggaaagacgggcattatttttgatccgcattcattgattcaagccctgaccagtctaatatcggataggcgtttcgtggaacctgatcttctaacagaaaatgtagagtctgtatgctgaaatctcagttctcaaatgttaggtatatatctcgctcctattttttccctgttcaatacattgtatggggaaactgtagcatcagttgcccacttgcacttcgtcagctagcttcattgcttcattcattgaaaacaaaatatacaaaaacaattgtgctcatagtttaatttcaccatcgaatcagatttcagttcttttatttcttgtgttattcaaggcgatgataatctcccctgttcttttgtgctgagtggctgaatgaataactaaatgatctgtgataattatttgaaggtacgtacgaacgaattaaatattataaagttgataaaaaataaattgtagtattctaagaaatctatatatagatttattattattattttgtgtgtgtgtgtaaaaatcgtacccttcgggagctcgggaagcccgggtattctttattccatttctctctaaaaaaacagggccttacagttgaacaagtaaaaccggaggggtcaaacgacgtcaatggaggagcgatgcgagacgggaaccccacgcgtacgcagcagtcggggatacggccggcactagtcgcttccgtccattggcgctaccctaccgggacggaaacggcatggagctcgagaatcaagatggctacaaagaagaaaaaaagaggaaaaaaacagagagatcgatcgggccagccagcaacgttccctcggtcatcggtacgattcagagcgtgtgtgttcagttcggcttcatcttcaattttgtatgtaccagtttggtccggctcaattggccacaaattatgaaattggttaatgcacaacacacgagtacggtacacacgcacacaccaattaaatcgagcaaggctttaccattacgaccttgaccatgatggacagcgagaggcgacgacctttgcttgacttcttcactgacccatggttggagctcgcctacccaatctcctatatataaaaagctagagctaccctgcatgcatgcacagcacagcccaagcgaaccagcagtccagtccagcacgggcgcacgctcaaggacacccagtgtacgacgagagatggcctctgctcgccgctggctctgcctgatactcgccgccgcggcggcggcggcggcgtcgggtgctccagctccggaggacgacccgggcatgccgatggcggcgcggcaccggtgctggatggcgagggtggggcgcacgtacgcggacgccgcggagaaggcgcgccgcttcgaggtgttccgcgccaacgcggagcggatcgacgccgccaaccgcgccggtgacctcacctacaccctggggctcaccccgttcgccgacctcaccgccgacgagttccgcgccaggcacctcatgcccgacgctgacgtcgacgagccggcgaccgcgagggtgttgttcgagcaggaggagaaggcggcgaagcagcatctccctccctcacgcccgcctgcggtgtggggcagcaaggactggcgtgacctcggcgccgtcacccctgtccaggatcaaggcaagaataattgcagtaagcaccaattaaactgttttattaataataaaaatggattatatcttctgtctcagtgagtacgcagccaaaaaaaagtcgtagaaaccaaaaaaaaagtctttgaagtaaaaagaaaggaataaacaaaatgatgtgatagaaaagaccccaacttttgcaatgaaaatattaactgaaagggaaactcttttaagcatttaggtggacgtctactggtttcttacatcccaactaaatgttagtatgatttttttttaaaaaaactgataagacatattaataatatatcgctccataaacatgtaagttagaattaaatttttataaattataaaaaaaaagaaatttgactattggatgtacatatactggagtttaatttgttatttttattataatttatagaagtcgaatttaaatttgcatgtttgtaaagtgatatactacctattaatctattttattattttttaaattttttttaataatcatttgattggcatgcatgaatcacccaagagatttacaacccatcttccaaccgaattacgtttccagaatcacataaatcttgcatcttcatcatgtcgttcatggcggccggggtgatatgaatctatgatgtgtcgtgtgtgtgtgtgtggtgcagacagctgctgggcgttcgcggtggtggcggcgacggaggggctgatcaagatcgagaccggcaacgtgacgccgttgtcggcgcagcaggtgctggactgcaccggcggggacaacacgtgcaagggaggccacatccacgaggccctgcgctacatcgccaccgccagcgccggcggccggctgagcacggacaagagctaccggccgtacgacggggagaagggcacctgcgccgccggctccggctccgcgtcgtcctcgtccgtcgccgtcgtcatccgcggcgtgcagaaggtgacgccgcacgacaaggacgcgctgcgcgccgccgtggagaggcagcccgtggcggcggacatggactcgagcgacccagagttcaggggattcaagggaggacgcgtgtaccgcggcagcgctggctgcgggaagaagcggaaccacgcggtggcggtggtcgggtacgggacggcgagcgacggcacgccgtactggctgctcaagaactcgtgggccaccgactggggggagaacggctacatgcgcatcgccgtcgacgccgactgcggcgtctccagccgccccgcctaccccttcgtctaataactaaggataccgtgcgtcgatcgctgtcgcgtttccttcctcgtttcgtactaagttaccgtaatttcgtccattatattcgtatacatgcttgaaattcggaagcatgtatataagagtatatcgtagagtcaataacccatttgtactaagcaagtgtatgtatatgcatgcgttgtatccttcttttttccttgaatacatatcacagacattcatgatgcgtagtggtagtagattatgccgcgcttcttgcatgtgtacaaaactgtaacgtgttagccccaacagacattccaactcatctggacagtcccgtccgtcccgtgtggcgtgtgctcctgaacgactgcaaccttaattgccggccacagacggccggggctcattggaggaggatcaggggccaaaaattagcgaggcccactactattggaaaaggctaagtacattttacgttcctcaactatgggctgcgttatttgtgaccctcaactgtaaaaccagctattgagtgctccctgtcttataaaccaatgcaaattgagtcattcaatagtattgattgtggttttggttgacgtgacatcctagatagaaaaagaagaaaataagaaacgcattagaacctggctaccccaccttcctcttatcttcaccccccctctctctctctctctcattgtggctcgccagcggctgcacccatgggagctcgattgaggaaggctgcaccaaatggaggaaggctgcgaagacataggagctcaaagaggctagcgagaagggagctcgattgagtagacactcaccatgccatccctcgtctcccccatctccatcgccatgtgcgcaaggaacttgaagctcttgatagccacatcccatcagcacgatgacagacttcaagtggccacttgccctctcatgatgttgacgtcgaaggcaaagaggttgaagaggatgagaagggtgtagtgcttgctgaagctagacgaagtcagatgtagagaggaaagcaaggagcagcagaagaagcttagcctccaatttagagaagcagccatgtgcgccgccgcattcgtagggagtggaacaggagaccaagaagcaacatgacggcaatcgaaaagcagccacatccaccacaccacatcgttgactaccacgaagcatgatctacgagtcgtccagatcagggtctgcatccatggcttgcttgaggatgccaccgccgctccatgtaggcaaccacttgcataggagaagctcgtcggtagttgggattaggaatgtagagtcgtggggtgaagcagcaacacctatggaggccatgatagggagcttctacctgctgatgggaggtggctagcggctaaggagctcaagcacccaaaagccgccaccaccaccggcgccacgcaagagtactagacgactggtgtaggagagggtggtggtcttcggctggtggggcggtggaattgaggatgggtgaggtggtggaattgaggggatgtgcagtggtccaaacaactggcggagagaggaggagacatctgcatgtaaatggagaaagaggggaagagaggagagggaaaagggaagagagatgggtatgccactgacagatgggacccactaactattttaaattctaggcaaattttgctatacgacaccgtgacttcgcgttttagctgtcggacaccgcatgcattaaagtaataatttccggttgaagaggagagagaaatcgtgtgaaatatcaaaaatgcccttgggcccacatgtcaactctcctatctatcctctctctatcactcatcttctctctctatcccacatgttagcgacgatggtgggcaggcgaggtccagtggcggtggtggcagaggcagaggcgtgagggcaagggcagagcggacgcgaccagcgatgtgcagaggagcgccggcgctggccggacagcgggcgaggttcggcggtggcatctgcgtgtggaggagcggcgtcgtggttggacgacaacggctgcagcgcgcggagtgaggagccgtcgcccacgcagagtgaggagggaggggcgccgtcgatggtcgacgccgctgtctgggcgtgccgttggccggagccgtcgtcctcccgtcgccacggccactcctccctcgccctcacgccaccgccagaccttgcctaaccgccgtcgtcactgacatgtgggatagagagagaagtgaaggaggggatatagagagaagagagataggagagctgatatattggccctattactgacatttcatgtgatttctctctcctctctaacaggaaattattactttaatacgtgcggtgtcgaccagcaaatattcaacttttgagaatgtcttccccaaaaatcacttcgtgcggtatcttatagctaaaaccgtaaattcatgacgtactttagcaaaatttgcctaaattttataatggtaatgctacgtaagcgtcccgtagacaccatgttagatgaaaatcagattaacatgccacgtaggacgaatcatccaattccaaaccatcgagactcgagagattcaatttatactggtgtgatagtcggggacgtaaagtggatataccctcgtcccctgtcatttgcctattttgatccgctcagccacttctccatcacccgcgccacgcatgtgccacatgtgccactcgcgcatgcaagtggcgctgctcctttgcacccatgcatgcaggccggagcgagcagtagtagtagttagttattgcaagcaacctcagcgatcgcattcgcacgccgagttttcttccaatatcaggacaacaactcgtccaccctgcccattcgctcgctcgctcgccgtgcgtagctagctgctagtagctcgtttcatcacgttgcatttgcgcccgatcgagcgggccggagcgcgcgtgccgccggtgccggcgtgcgcgccgtcgtcgggacgggccgtggttcgatgcacgccgccgtgccgtcacttgcgagagtggcagacagggacggccggggcatgcgcagcggcagctagcccatatatgaacggagcccacaacccagcatagtagtataatgtaatgtgcccgccgccaaggaggagtgtcatcaggattgatcaggctagcaataataatgtacaaatggactacgcgcgcgcatgcttagtcaggatggggatgcatcgatctggtgcaagcaaacgctgaaacgcaggagtgcatcttcctatcaccttaattgattgttactcctttgctattcgtcaggtgacatcgttttcaaatttctatactgggggaggcgggaatagggcagagggaggggtattgcggactcggtgccggtgaaccggctggcttatttttattagggttttaggattgaaggtgggagggggtttgggaggcggagagggcgatttaaataagtgttaagggtggtgaaaaccagcggcggacgttaaggtgccggggccatgagaatagaggagggtgatgagcggggtttacagcggatctagcggtgtgagccgccggagatagggatgagaggcatggccggagaaaggcaccatagtttatacagtgtttatggatctaatcttgggggaagggggaaaggaggagggaagtggccaggaaggtgcgactgattggccttgccgctaatgtcgataaggtggacggaggtggcgacggttgggtatggaggaaacgatgagagaggtggagttttggtaataacgcttaacatgaatgttgaatcaatttgaattgttaaaaaaattgatttatgttgaaggaagaaattcgtcggctgatatatagtactctttgtactaaaatatagttaacttcatataaaaaaatatagttaaatatatgttatttttaaagtagctatttactactccaccttcgtctcaaaatatattttttttctatgaatgtttatgttttaggacggatgaagtatatcttttatagaaaggggtaagcctctaattgttgttatcagtgtaatagccatatagggatgggatggaataatcgtgctgagcctgagattgaaaccggccgtccacatcaatgggatcacatctgtcaccatcgacggccgatatattgttgcttcttccatcctcatggtgacaataacatgcactgtgtagtttgccactcatggtgataacgagatgcattgtttagatcgctggctaaaaaaaatctacgccgatttttggagtcggtaatgatcttggccgtgcaggttactggactgattgacggccgtgtgcatgccatctaaatgattatgagtatgaggatggattctaatctctcgggtggacgtccacccgtttcttgcataccacctaaatgattatgaaaaaatttcaaaaaaattcacaagataggttaatatgtaatatatcactttacaaacatgcaagttcaaattcgacttttacaagttgtaacaaaaataacaaatcaaactctaactagtatacgtatattcacagtcaaatttattatttttgttacaattngtanaagtngaatttgaacttgcatgtttgtncagccatatattacatattaacctattatgtcaatttttttgaaaatttttcataaccatttagatgacatgcaataaacggatgaacatccacccgagtgtttaaaagagtttccccggtgtgcatgtatggttgaagttggagtattgtgcgtcgggataatgggattttttcgatcggttgattggctccggcgctggtcggctttgttgctccgctgcctgcttgcttacggtatgcgtcccacttcctaagatagaatcaactaatcctttctgataatatatattaatacttctttttgcaattggagacacttcgtcagatgcatggtgtttcttccttgccgagaatcaatgatcatttgagatgttccatcactaattgcaacatttgagatgctttaaccagatgcaaaactcaaaaatatactaatgcaacattaaaaaaaccaatacgtacgagaaacaatcaacaacatgaagaaaaagaattattgacaatcaacttcaatatggtgagcgcacgcctttaatgcgacaatacatatcatttgcaagtacaacaatatgtaaaaaaaaagaatataataagatgaaacaagataaacaatgaattgtaacagtatctaaaaaaactgttcaacataatcctaccagtctagattagccttcttcctctactcagagtggccagatccgctttcttcctctactctctagtggctagatctaggctcctcatgaaaaacaagtaggattcctcactttgggtaaccactctactctcggacaaacatagtgagggccgaggacttggaagatttggaaggcggaggtgcagcccacctatgagtaagcaaaagtgtgcggccctcctatgagacatattaattcataaatatgcaaagttaaattcactatctacaagttataacaaaaagaacaagggttggtttggtttgtggcctagataggtcttaccaaattttgtcaatgccaaattttggtaagttttggcatgactaattttgataaggtaaagttgtgtttggattgaagccaaaatagtctaagttcactattgaaatgacctattttcttagggggcttttaactatttgccacttttagatttggcaaataactatttgccacctctatctcaatgacatgtgggtccacatatgtctatgacatgtgggcccagtggcaaaaagttaattgccacatctaaatatggcaaacggttaaatatctcattttcttaggcatgtcaaaattttgcttcaaaccaaatagacactaaacactattaaaattgacaaatattggtaagcctaatttaggccccaaactaaacctgccccaaatcaaagtgaaactagttaacatacattcacatttatatttattagtttaggtacgactcgtagaagtcgaatgacttacatgtttgcacagtgatataactcattaatcttacttattaatttcttttaaatattttaataactttttagatgatatgtaataaacctctcgaggatgaaaactctttcccggatgcacgccaatccaccggacagtcaattcaatgaaccatcccactggacactggcgcatccgcgcatgcacaccagagtgcaatatggactgacccgaccatgcatcaaccgtgcgtcgtctataaatacgaggcaaatgcgccacgatcctcagctcacaagtcacaagcaacacagagtgaaaaaaaatggcacgggttcccgtctctcgccaccttcgcgtcgcgctgcttgctctcctcgtggtcgccgtcgccgccgcggcggcggcgcgcggggatcagccgcgtcgcgggcatagcatggccgcgcggcacgagcggtggatggctaggttcgggcgcgcgtacgcggacgccgccgagaaggcgcggcggatggaggtgttcgcggccaacgcggagcgcgtcgacgccgccaaccgcgcgggcggcgaccgcacctacacgctcggcctcaaccagttctccgacctcaccgacgacgagttcgcgcagacgcacctcgggtacagctgggcgccgccgccgccgtcgcaccggcatggccaccgcgccgagaatggcaccgccgcggcggcggcggatgacacggacgtgccggacagcgtcgactggagggctcgcggcgccgtcaccgaggtcaagaaccaacgcagctgcggtgagaaccactcccgaacacaaacacgtcgatggcatagctcacgcagtggcgtatctcgaaaattgattcgttggtatcataacgtatctactaataccataatatgctaattatacttagatcatgatgttataatacatggataaacagtttaactacaggtttactgaaagtcgtcggtgtcgtgtcgtctgacaccggccgttacactgtagatcagctcatgtgtactgtacggcgttcgttgcagggagttgctgggcgttcgcggcggtggcggcgacggaggggctcgtccagctcgccacgggcaacctcgtgtcgctctcggagcagcaggtgctcgactgcaccggcggcgccaacacctgcagcggcggcgacgtgtccgcggcgctccgctacatcgccgcgagcggcgggctgcagacggaggcggcctacgcgtacggcgggcagcagggcgcgtgccgcgccggcgggttcgccgcgccgaactcggcggcagccgtcggcggcgcccggtgggcgcgcctgtacggcgacgagggcgcgctgcaggcgctcgccgccgggcagccggtggtcgtggtcgtggaggcctccgagccggacttccggcactacaggagcggggtctacgccgggagcgccgcgtgcgggcggcggctcaaccacgccgtcacggtggtgggctacggcgcggcggcggacggcggcggggagtactggctggtgaagaaccagtgggggacgtggtggggcgagggcggctacatgcgcgtcgcgcgcggcggcgccgccggcggcaactgcggcatcgccacctacgccttctacccgaccatggacagctagctcaactgagcactggacagtgaacactagactgatgcaaatatgtactaatattgataagaatgttacgcctaatgcaaatatgtaatatgtgtgggcgtctggcttctaagtgataagctattaagccatagttaaggagtatatagtagataaaatgattatgaaaccagaactgtatcgacatatgcagttaaagaaactgatgtcggtaatggatggagcaaataagcacttgtacacattaagaaaagatgattcagaaaattcaggacatgcttattgcgcacaacatttttctgtctttttactgttccaacgaagaggaactattcatcgagataatattagtaaccaacataaactgctgcgttcactatatagcaatcatcgtttttatctcccattgcttctaggcatacgccacttgaacagatcatcccaccgtccacaacctcaaagctgataattttaccactgcaaacaatgagaaaatagcataaggcggcgcttttgctacgtcatatgtaaaccaaatcaagatgcacactatcagtatcatcagattaaggctataaacacgctgctaatgatcattctggacaaatgagatccattgagtatctcagacattgtttgattacgagttgttgttagcaaagaaatgctttacatccaagcagctgagtccaggccattaataattctggtgtgttcttccttttatatatttgatcatgcttactgccacatctaaatatctaatattactgtaaaatgcaaccatgaatacgagttcatggaaactgtctgcgcactctaaatatttctcttgctgatctttcattttcagtaagtcgtgaaaatcgtatgagtccatatggctttcttttgtatggctgctttctatctcagcaaacatcacacagcacagtattgcaactattaaacattcctacaacgctaatgtgaatcaatttgtcatggcaacatggatttacctgcttgttatgcacactagttagcacaaaatgttatagtttgccactttggcttttgtctgagatactgtaagctgtaaccatgtaatactttcacatctgaaggacattctggagcactggtgttgaacattcaaaaccctcttatgtagtaagtatagtgctgaccacactgtcttgtgtacttgataaaagatggtatttatttgcctaagacgctgtgatgactttaaggatgaagtttttatagaaatatgatcaaaaggaaaagcaggtggtgatagaaaaaataatcaaatatgctaaaaggtgagactgtattgatcgagggtcactgaactacccggttctactttattatatacataaaaaatcttagttagagatcacagctacactcaataagcattcaatttgaaggtaaacacattggataaccacatctatcttttgtagttatgggaaactggttacaattttgaaagaactagaacacattaaactttttttttttcaaatctaagcccttgactgcctcagattttgttattaaagagctaagggctcttttcaatacagttagcttatgaaaatcattagtgttggaaatagtgagcaactgagcaatgttgggtaatgaagaggatccgtacttgatcttgccatatggttatgaacataatcacaaggaacaattgtactgaacaaataaacatgatagctcatgttcctctacaccacatttgttcaccatgtccatgagttacctaacctagatattgccaatcataccaaggttcaaacttactactataatgcgagctagtatggtacacaaccgaccaaaacatgctcaataaacttgtaggggtactcattgcatccatttctgattcagcgttccaacaagaagatcccaattttactaataagcacgaagagaacacagaaagagtgctcactaggggaagacggccttgactctctcaacgtccagcaagtgctgcgttggcctcggcaccccgagcttgatctgcagcttcatctgctccgtgttcaccccaggaatggatccttcatacaccaaaaacagctcagttaatcaacgataggaaacaaaaagaacaggtgaagaatttggcgtgcggatgaggtgttcgacggaatgtctcagagacaggagaggcgagctgtgggggaggctaccgctgcggaaggccgggatggagttggaggtgatggcgtccctgcaggcgcgcacggcggcggcggtgacgtcctgcccgtgctggtcgtacccgacgcccatctccacgaacagcagcctcatggcctcctgctgcccctccccgccaccgcacgcctgggtctgcgccgcctccatctccatgggagacgacgaggaggcgaccgctctcgctactcctgcggcgggcggcgccgggttctccggcctaagggatctgatccggcagcgaggcggccggcggcaggaggaggtggaggggagcagcggtggtgttggtttggtcgggcgggggaggaggaggaggcagctgggggatgatgctgctgacatcatcatcatcatcatccttccgctgtttcaataagccgacgaaatatagccatcgtgtgaccattatgattgttgatcaaggtcaaatggagttgcagaatacaccctctgttttcaaattaagttccatcttatagttttaaaacgaagggtgtagttggatctgctaaaacatcactgctatactacttccgttttaaattacttgttattttaattttttttcttagctaaagttatgatttatgaccactaatttttaaaaattcatatagtttaactatatgtgaaatatgtattataaaattatttctcatgacggatcttaaaatataaatcatctaaattaaactatatgtcttctaaaaaatattaaactatatgagtttataaaaattactagttaaaaaataaaatatttgatttaagacatatcttaaatgactgaatacgaaagtcgcgacaacatggtatccagaaaattaagtcaccgattatgtgcttacccgtgtcatattaatcatattgttatctcctacgtacgattaataacgaacacggcctatgcaaactgcgcggctaactaccaatattccttattttctattctaaattttcatttttttctaaattgtatttttatatagattgtaaactcttattttagtatttttttaatttttatttttataaattaaagttataaattgtatttctatacggactcatacgtctacttctattttctttttttaatttcaaattttagtatactgatatggattgttttttctttcaatatttttttaatttcgaattttggctatttaaaattgtatttctatattgtctctattattctttttctctgattccatattttaattaattataaattgtacaccagtatgaactctagccttctcttccaatattcattattttttaattatctatgtaaattgtttttctatatggactttaattaatatgagaatttctaggcccagcaaacgcggagtctaattttcttaggctgtgtttagatccagggtgaaaatttttgccctgtcacatcggatatactgacacacatttgaagtattaaatgtagtctaataacaaaacaaattacagaatccgcctataaaatgcgagacgaatttattaagcctaaataatccgtcattagcaaatgtttactctagcaccacattgtcaaatcatgcagcaattaggcttaaaaattcgcctcgcaaattagtcgcaatctgtgcaattagttatttttttcgtctatatttaatatttcatacatgtgttaaaacgttcgatgtgacaggatgaaaaaacctgttagcggatctaaacatgtccttattacttaaataagttaatgcattagttcttaatccaattggttaaattagaaataaactttgtgaatgtggtttgtttggtcatgtccatctcaagctttttttactccgattcctatagttagtttaagcttccgtaaaaaaaattatataactatataactattatggccgtgtttagttgtttaggtgtaaaaattttgaagtatacggacacacatttgaagtattaaatatagactaataacaaaacaaattatagattccgcttgtaaactgcaagacgaatttattaagcctaattaatctgtcattagcaaatgtttactgtagcatcacattatcaaatcatggcgtaattaggcttaaaagattcgtctcgcaatttacatgtaaattgtgcaattgatttttttttcatccgcatttaatgctctatacatgtgtccaaacatttgatgtgacgtttttggcaaacaaattttggaatctaaacacaccctatattaaatctaaactgttataatctggatctactatgacccaatggttattttttctctcttttttcttgattaaaattggaatttctatttttcttgtccgttttcactattttctatctttcttgtccaattggaatttttttgtccgtttccaagtttttttttgtccgtttcagctcttaggtttatcttttttgtccgtttctaagttttttttgtccgattggaatttttttgtccgtttctaagtttgttttttttgaaaagtactccttctatttttctttttttctttaaattaacgtgggattttctaggccgtgagagcgaatgtggagactcttttttctattactatgtagatataatagatttagctacctacatcctctaaaaaaagctacctacatcagatccatgtcatctaatcccagccttaccaaataatttggtactactagactagtagtagagttttaagtaggacaatatattctatgtgcacacatcctaatgcagttactacgttatacactcactcactgggcactggcgaccataggatctcaatcggatggattggatccaaacgggacaatttcgtagaaaactgcccgcttcttcacctgtcgtttgttcccgaagcaatcgattgttgatgacctcgggatggcaagcagccagccagccacatttcacggcagacggcatcctgcgtcaccgacgccgtggtcggtggaaaatggccgtggccgtggtcggtggaaagcggcggcggatccctctggcatttggatacaagcggcagcggacaggcagacgacgcccagcagcggacgagagaggcgatagctagcgggatcgcaaaacaggaataggggaacgacggaaaagaactgctaagaagaattgcttgattgacagttcgtggatcgatccagatcgagccgaacctggagcgagcgccgcgcattgacatctctcgcgtgagccgagccgagcggggtgcggatggagccgtgggggctggccgtcggatgggcgactcatccacgcgtacgtcatgcatctgcgtagggccgggttgaacggaatgaggtttgcacctcgtatgcacataatttttttccgaccatgcaatagggagaggtcatcacgacgaacccactctgatcccgccgatgccgtcgccaccgccgccgctgccaccagcatcgatcgacaaggaggaggcgtgcaacaccttcgatgaggacgacactgacttcaatcttccattgattgtgagcatagacaccttctaacagggattttgattgcgggaggcatcttgattattcatcttcttcaagcaatctcccgtgagcatggtctaccgagaagattcaatccgccgccgacgtcttgccgcacgtacggggaaggagacaattaaggtgggggagaagtagcaggagcctagataaagagaagagagaaatctaagggttatttgcgaaaccactggtgaaaaagcggggcgttttctacaaattgccctgattatatcctatccatccatccgattgagatcctagctacgactgacagcaagtgagtgcacaaggcaatgagacatttacagtttgaagatgacgatatgctgtgtggtagaacttctatagtgaggggcgaaggactttaagagatgctacggtgtcctgattgtttgcttccgtagatttattcgcatacgcgaatacggaacaatatataaatgcatacattcttggtcaatgataggagaggacgacggaagaggacaggacgtagctccacttaggtagcaaacacttcctccatttctcatttacttgaaacatttgattgatgctgttttaataacctgatcacactttcaaattgttctacagattctgatgaacaaaaaatgtatgattgtattaccaatttatcatgcaatatattttggttgcatggtatattattttatatatttgtaaattaattatcgagataaggggtgatcatttttttaattaataagagaaaacataggtggtgtgatttttagataatcgattaaaaattacacccttcactcacgtagctacaaccaattattaaaaaaaatcactcaacgatgagcacacaccaacaagtggtatggctaagattagtaggtttcttatgaggttagggagttactgttatttcgttttctttttttcgagggattagggcagaagctctgcaaattttattatagaagaagagagaatcacaaggttcacctcttagaaaggtgtcacagcgaaggacataagggattacaagaattgagcttgtcatacgctttgcatacatggcgatgatagagtcaaccacctgcagaaccgtactatatgcaccattgaaaattctatcgtttctttgaagccaaatacccaaagtcatgtagatgattaagccattgaaatttcgtctttattctttgatcagttctcttcagcaagcttcccaccagtccagcatgtccccattgaagaggatgcattcacgagatggcgggagtgcgatgcgcatccacatgcgtgtaatgagagaagaatggaagtgaatttttttcctcgaggggacatcccctcgttttgtgcatgtcattcaaaaagttatcaaaattcgaaacaaaaataacaaatttgaccgtgaattacgcgttctattcatagttaaatttttttatttttatttctacttgtataagttgaattttaattggcatgttgtaaagtgacatatcacatattgatctatcctactaaatttttttaatttttttgatgactttttaagtaacatgcaaaaatgaggggatatcctcttatgtcatgatttgagttttccgagaaaaatgaattaagataatacatgatctctatttctatggccctttgatggtaccagggttaccacgcattttttagcgctaattaattaaccaccatctgaatagaaactgccaagtgttacttgtatatatgtacaatatataaatatataattatttgaatttgacacacaaagggtaaaaacaaacacaaccttaattttctcggttcttttctccctccttttgaacgcttttgcccttcgttttctcgttccaaacgcatgcaaattcatgaatcccatataggcccgaacgccgggatgccggccttcctgcacccgctcaccacgtccctgctcccctccgggttgctcgtcaccaccaccacctccgcgccccaccgccgcgccgccgccacggcgagctcccgcacgtccggccgccccatcaccgccgtgtcgtgcaccaccacccgccccgccatgctcttgccgcccgccgccgccgccaccgccgccctgatctcctcgccgtagttcgcctcgacgcccttcgccacccacaccagcgacagctccgtcgccgtcgtcgtgctcggctgcatcagcagcgacaggaacacgcagatgcccgaccccgtcgccaccatggtcgcccgccggtacatgccgatgaggtacgggaggccggcgaagtggacgccgcgaacccagaggtgggtcggcgggtcggcgacgaggccacgggtgaagtcgccgacggcgccggcgagcatcgcgtgggtgcgccgcccgtcggagatgatgccgaaggcgtgccactcggagagcggcgagcggctgatgcggccgaggaggcccgccctgacgccgccctggaaggtcaggatcgccgcgtgggtggacggcgcggtcaccgtcaccggcacgcggcgcacggtgagccacgggagggtggtgaagaaggtgatggcggccgcgagcctgatgtcctcgcgccccgcgaggacggcgccggcgagcgggacgtaggacctggcctcccggtcgtagccggcggagagcacgacgaacgtccagagcagggcgagcgcgccccagccggcgaaccggtgcgtccgctcgaacacgttgtggtggaggtggcgcacgagcgggaacgccgccgcgcaggagagcgcgagcaggaagaggatggccgacgcgacggcgacgatctccggcggcatctcgtcgcggcgccggagcgcctggacgagcgcgtaggccagccacgcgacggaggacacgccgcagccgctgtggacgccgccgagggactggaggatcgccgtgacgcccgtcttggcgacgaccggcacccacggccggccgaggagcgcgacggcgagccagaacacgacgcggagcgccgcctcggagcggcacagcgtgagcgccaggatgttgcccatggcgaagacggcggcgcgccgctccgcgtacgggaaatggccggacgccgcgagcgcgaccgccgccgcgttcagcgcgacgcagagcacgaagaggcgcttgtacacggtgaacagtccctggtcgaacagtatgacggcgagcctcgatcgcctggcggtggccggcgccgccgccgccgccgccgacacgctcggcttcttcttccctttcaaatcatcctcgacgtcggcagctgcggccgcggcgacagccatctcctcgtcgtggccgtcaaagacggacacgccatcatcctcctcctcgtcgccggcgacgtcgaggtcgcagaagtggctgctggcgcggctctgcgaccgtccaacgccgcagtccggcttcgccggaatgatcctagagaaggaggagtaacggctcgacgacagtagaggcagccagatccaccttccggtgctcggcgccgccggtggcggcttggcagggcatgcggcggcggcggcggcggcgatggcgaaggggctcgccggcgagggcttgggctcgaaggtgacgccacggcagctcgagaacttgatctcgatgggcttcgttgtcagctcgtctcgcccatccatggcgcgaggcagtaagcctaagaaactgacttgaattaactagggtttggtttgaaatcgccagtggttgtagaattgcatgtgtatttataagcagctgaagcaagcaagcatcagcatgaatgcatgggtagataggcttgatgaaagtgttttcaactctatgtcaaggggatataccagtatttttcgtgcaactcaaatagtcatcaaaatattttttaaaaaataataagataaattactatgagatatgctccaaacatacacgtttaaattcgacccatgtaagttcaaacaaaaagaacaaagcggacctctaaaaatattattttttagttatatttattatttttattctaatataacttgtatagttcgaatgtaaacttgcgtatttatggaataatttatctcatggtgatctatcacattatattttttttaaaaaataatgactatttaggtggcatatacaataaaatatattctcctaaggaatgaagatccatctgagcttgatattacaagttggcatgaaggttgtaaaatatatggggagtctttgtactatattttgtactttggactttcaacgtactttccaaacgtatacaactatacttcaataaccgtgcggagtcttttgataaggagtactactatctgtctatctttatccaattagtactactgtattctcacagcattatcaagctagttctactccctccatttcataatataagtcacaaccacttttttagatgttctataatataagaacacccgcaatagttatctatagtctctctacaagagatccatatcagcatattttcctacttggaagagattaaatgaagagagagcaaaactatctactaacctggagatagtctatagtaaaaaacgatgcaatgtattagagagctatagatacccatgtagacatactattgaggtgatttactattaatctagtctattgctgagatgtacatgttttatagagagcaccttactttaccattgtgggtgctctaaggtatgcatgcatgtagacaattaactatggccccttctccattaaattattacttttttaaatcctccactctcatgttctctaattctattggatgcatgaattgtatttattatgataatccaaactacaagatgataataattatttcttggtctttgagttaaaggtgattatgccttatattttggaatggagggagtacttttatttttacgaaacgcaatacacaagcaatgctcatataaacatgctcacgtttaccttatccctataaatacctccgaaaactaaaccaacgtatcttgagaatcataaagtcaccgcagacgcctcgcgctcaccctatacatatagacacctcggaatgctgaaccaacatatttttgagattcatgaattcatcgcagacgtctcgctgtcgacaaatatgtcacttacccctgaaagaataattagccataaatgtgggcatcgtaccaagtcttagaacttaaacccggatgagtagattccactaccagaaacttaatcagttgagctaagttcactttgcatatttcatttacatctcttagcacaagagaatgtgtgcaactgtatgcacagttcaattaagaaatgatgacataaacatgaaatgcttttggaaatattcattttttatttcactgaattaaaaattacactcatatgaaggacattgatgccggttttttaaataaactgacaccctcagtaggagtcaagctgatgagccagccaactgccacgtttttaatttggcttgttgctcgctgctctctcgctctctcgaagagcgctgctatgagtgtctcatcctactcgcatccaccaccgtgccatgagcatcgccacaagcttggagtcgctagatccggccgccacaagctcaagggtggctacatccaccgtcgtgagctcggggacaacaccatccccttctcccattcggcggcagagcatttcactccctcggcctccacctcaccatggcctactaaccgccacgagcttggggctggatcctttaaacagtgggtgggaccatgagacggaggcaaccactaacagaagcggcggctgatcttggggatttgggatttttgatggatccggttctcttatctgttggattatttcctctacctcccttgtcgattccctaattaatgttgtttttccctttgttgttgtagtggatagttagttacggattgggtagtagatggattctgatttgagaaataatgcatttgtgccaaaatttgtgtttcacttgattttttatgttgaaaataatttgtgtttgatgaagaacaatttggagaacttttgtgggcaacacatcggcctgaattgagccaatccactttttttttaaatcgtgcacctcatcggtgtcgattctcaattagacactgatgaggccgtcatcaacgccgccttcatggttttggttgaggaatctggcacctatgtaaggtttccaccagcaccaaagtgaggttttgtagtaatgattaatttgacttacacatttaccaaaaaacattgagtatatgtaagagtgcatgtaaacactcactgcaccatgccccaaaattctttaacttattttcccactagtcagcaaagaggacttatatgctgccaaactatatgtcgggaaagctttggcgatagatgaagtctgtcagggtaagtacgtactatactgctcatcatgtcaaatttatccttttctctctctcttttttttctctctcgatatgccgattgggtttggactttcaattctgttactagatattatatgtctgttgtatctagatattatgaaataaatttagagattttaatattaatttggttcacacagaaccatgcgagagcacatctgcacatgcccttatatacataaaagatattaagacgtgaaaatgtaatcagaaaaaaaagaagaaaatatatgtccagtataaaaaaagaccaacgtaccatgcatggccgtttgcactttatgaagatgatgaattacagatttaataatttatgacgttcataattcatacaactagacgatcgacacacttgtttcacttgtaaaaaataatcggaataaaatgtttccaaacatattagtgagaataattagcaataactatactgagtgggtactttttttttttacgtctacgcaagggagagggggattattagcaacaattagcaacgtacaaactattttgtactacgatacatctaatgtgtgcatgcagtttttcgtaataactaggtttaaataagttaacctattataagatgtgacacatcctaatactatttatctgtatagaagcatgtccatgtttatagtactagaatatctcatactagattaacttattttgaaacaaatgaatcatatagtagttattaattagtggagtacaaaataaactagatacgagggatttatagtaataaatagggagcaataattgcacataacatatcaatggttgagatcgagcctaactatacattcggtcatgaacctaacaacaatagggaactataagctagatatgagatccaatgtactcggcttcacccatgttgagctttcagtcccaactatttaaaaataataattcatcaagtaattggtttgtacaaattaaagtactaagtgtacatctaaaataattcaatcaaaggcccactgcagccaaatacagttttgtggcctgtcgatggcactgcactgtactacatgattacaatgtatagatggttgaaataatgtgaattctattccaagtacttgaataaggacttagttgtagtgtgcctaacgatagaaggagatattatccatttccattacattaaaaatgtatttgaagaaaaaacataaaatcctctcatctgccttgccaccgccgagctagctgctgggcgcagcaccagggatggtgggggcggggttttaagagatgaactacgaataggcgatggcatctgcaagtggtggagggtggcagcggctgaagcgccgcctcaaccggatgtggtgccgctatgccagatttagccagctacgaccgaagcacaacttcagagacccgatggtcttgaggctccatccctacgtgcctccagaggcacttgttgaatgtgcatgtggtggtggctggtggttgacaacatcttctgtgcagtggcttcagcacattcctctcatgcttagcttcctccagggcatggtcgcggggagcttcgggtaggcaatgtacaggctagttatagatgtggggttggtagggaattgctaacgaaagccttgctatgctattggcccgcttcaacgatggcgacacccttaagtgtcgttcccctccttggaggcgtcattaatgtgtttctctcctcttccatacacttttgcttattaccaaagaaaagaagcttgttgaaagtgcctgctttgtaaaaacaatgcagaaggaagcggggaatgtcctgtccaattttaaggtgaaaacctcgctccagctttcggatgagaggtggtggcgaatcatgttgtatctcccatgggggcgttgctttagagaaccttcctcgtgtagcggagaccgttggtggaattttgtgttggcctgggacttagcagctggtttgcaattcagttactcttcggtgataccattcgcttcagttcttggtgctggcagtgatgtgtatgggttccgataggcagaacagtcggacgctattttagggagtctattttcagttttgaggaggatgaggattacatacaacctgcaatccatttctcaaaacaatggttatgcaaacttttatcatttgtagatagtgttatatctgcgtaggctgatgatgttctaattagttttcttgttacctatcaagctatgatacataaattgtggtcgttcgagctacaatatctataataattggttgtagcttatttggatcaatagttggaatgagttccattatctaaaaatgcaaccattaatattgtcatatctttttaacaacaagtggcatattatgacatgttttcacactttacttgatttgggccaaattaactagaattacacggacaaaaagggtaagacgagactggatatattattggcttgtatttctggtcaagtttagcataatctacaatcaaaggattagtcggtttcataaaattagtaggttattttaattaaactatagcattaacaaaaccatttactttaccccctaggtggttttggcacagtgcccccaccccactctcaaactaggtattctacccctaacctttccaataccctcaacccctaaggtggtttctgaaaggaccttgatatcacctagagtgtgtgaataggcattcctaaaatttacttaaaaattccagcagttaaaaacatggtccgaaacttcatgacagcttttcttgccgagcagagaaagctatccggaacttctgtggttcttcctatgaagttccgggcaattgtaagttactctttcaagcacctcacaacgagtaaattgattcagaaggaagcctaaaccacaaagatatacaacatgtatcaaacaagagttcgtactagatgagagttcccaaccagcacataaggcatattttgtagttgtgacaaaatcagatgacagatgcgtactactatattcacaaaaaaatagaatgcatcttcagtaaaacgaaatattcaggagctgaagtgaaaacaaaatcatttattgaaaacacacctcaatttactgaattagtatcataacacggtactgttgcagaaaattcaatccattttgttgtttcaacttagaattatgttgaattaatgacagctgtggcttgagtatatttctcaaactctttaatatagctccgaaattgcatagaaagactgcagcaaggtacgtatccatgcatgcgtgcctgatggcccgccagatatgacaacggcgccagatcgagaagcttgtgacggcatgtcggcatgcttgtaaacttgtcctagatggagctgtgtagaagttctaatgtaatctacaagtacacaatacatccaaatggacatcaatccagactgtacatatcaaagatgtatccagtaaacgtatgaaagatacataaaaacattccgagtattgtgtatgaacaagtggattaacccggaccatagatctcgataaaagtacaattgaatttggtatacaagccttaaaaatatgtttgcaactctctatttttttacttaaaaaataagaggtgcttccatcgttcgtcaaaaaaaccggatgaaaaaaccaaatttatcagataaaaaaaccgggcgaagaaagtgcaaaaaaaaccaaatctgtccgatccagaaaaaagaggcgaaaaaaaaccaaaattgtcccatctaaaaaaccgggcgaaagaaaacgtcaagaaaaaagaggcggaaaaaaccagcgaaaataaaaaaaaataaaaaaacacgcaagaaaaattatttccaccgtcggtgatttttttaaaaaaacatgcgaggaaaaaactgtcagaaaaaaggcgccattttaaaaaatggttttaaaaaaccgtgcaagaaaaaaacacagtctattaaaaaaatcgctctgagtcggataggatccatcgattttttgccacctactacatggcttttatttcatcatatattctcctgtattgataaaagcaaaaaaaaagaacatttgaaaaaaaaacaagcaaaaaaacacgcgagaaaataattgtaaaaaaaggcaaaaaaaacacacgagaaaagaaaagcaaaaacgggagaaaattatggttttcgttgtaaataaaaaagaaaaaaaaacatgctagaaaaaaaactttagaaagaaatgcgctatttctgaatggtttgagaaaatcgcgcaagaaaaaaacattgtttataaaaaaacaagctgctcattaaaatacaaacattgtcattgaaatgattattcatgaaaaacatatattatcattagaattttttcacccgtggcaacacgcgggcatttttgctagtgatgtacaatagataaagttataaattggattccatatacaactcttatcatattgttcccatagataattgtatacactagtaggtactaaagttgaatggattccatatttcatatgtaaatcttagcttctattttatcagaaaaaaagcccgtgcgttgtaacgggtgaaggctattttaacttattattgttatacggtttagctagggtgaaatttactctggaaattcgcttgatttttttttagaaaatcatgagctgcaattaggagtctagactttcgtgtcaagttagcatgtaagttgactccttttgtattccaaaaacgaacaaatatgaaaaatgactcaaacataaatctatatttttaaaatcgaacaaaactaaaaaccaactcaaataaggatgacataccaaagtaccggcaaaagcatatataatttttataatagtagagttaaatctaattgtattttcagtacaaatatattaataaccgatctaatacgagaacttacctatcatgatcagacaatcaatatatgtatctgtatttttaaaataaaaatgagaatttcaagattctgaagtgatcgtggtgtcgctttttgatatatctttataagataatagatagatagacaagaataggtaacatatattttcttataaagttattttccactagctaggggggtggcctggcttgtgaaacaacactattcctagcatgtattatcaagttgagcaggttgccctagcgatttttctcttttaggaattgaacttcaaaccaaaagtctatagtgtttttctttccagaaaaacatttgaaatttcttcgaaaatccatcgacacagctgaaaagtctttgctgtgttggaagtgttgggacttattccatatactggtaaaatgccatattttgctaggaacatgagacaaaggtattataatatttcataacaaactattttttttatcaaatattttagtatcccttgtaaccaaatgttggagtaactcacaatattaaaatatagggaaattgtgctacaccatactgctta

SEQ ID NO: 9658 - DNA, 53714 bp, Oryza sativa
gccacccaatttatcatttaattttagttttaattactaatttagcagcaatttcgttttagtcccttgtgttttatataatttagtcgaaatagttcattagttgtacaagtaattatgtaatggtcctacagaccgctgatgttatgtgttaattaacataggtgtttattcaaataccctgtttcactaaatttattgtcttaataacatgtcttttgcattttatttcaagacatgctctactttctcgctttattaatttacaaaattctataaattttgtactttgatttagtaaattctcttaattatgtacaacatgattaatggaggatttaatgcatgttccacttcacattttgactcggaaattaatcacatgtcgatggagccctatactttggtcatatcgaccataacttaggcagcgagtatctcgcccatcatcaagtggtctacattttgagatgattacccgatggagtcctacaaattggccgcactggtcataacctaggcaacgagcaccttgcccatctcacagaggtctacatctcatgatgattacccacatgtgttattttccaagaataagttttgaaaaatgagattatttgaattttggttgagcacaaggtagtggagtcctaaacattggttgtggtatattcaacagaatatatttgcctggagaccgtgttttaggcagcaagtataacttgcccactattaagagatctactccactgtttaattacttggagattatccacattgtgccacctaatttcgaattctaactcaaattgtcaggtccattacctgcattttttttcgaaacattacaaaatatgaagtcttacatttcgcattgagattacaaccttaatatcatgtttttattaatttacctctgtaaattgataatgttaaccatgattgtagggacatggcaacaaaagagttcgacgaactcgccctcgatgggactaactatcccatatggtcttctgatatcaaaatcaattttgcctctcgggggattttaaatacaattgaggaacccaatgatggggacccggaaattgagcctaggaagctcaatacatccctttttcttttgagactctacattcacaaggatcttaaacattaatacatgttagagacgagccctctcaacctttggaaagctctaaaagagcgctatgatcagcaaaaggaactcatttggcttgaggctaattatgagtgggttcatttacgcctacaggactttaaaactgtggcataatacaaccatgttgttcataacatttgttccaggttgaagttttgcgaacaagagccaactgaggcagagaagatagagaaaactctatcaactatgcttccggaggacaggataccgactcaacagtatcacgctaacaatttccagaaacgttctctgcttatacatacattgactcaggcagaaagacaccatgagctttctttaaagaatgcccaacagcgcccaccgggctctgctccactacctgaggtgcacttcaatgtacagaataatgctgagaataagaaaggattcaagggaaattcttcaaataatcctaagaatctgactggaaagcgcaaacgcaacaacaacaggcgcaaattcaagggttgaaagaaaggaaaagggaagggtaaggcaccacaacctcgtagcaatggcaacaagcattgcaacaggtgtggatctgacactcatgtcgctaaagactgccgcatcccgaaatatcttgtttctcttgtaccaaaaatccctcaaggacaaaaaatcttctgagaacccaagatttgaagcccacttcaatcttacacataaagagcgccctgaggttgcaagttctcaccaggctcctgttcaaccagagagcaacctcaatgttgtcccagaagatgtcgctccactctctgcgatggacgatatgttcatcgaatactgctcaacggacccacttggagatttgcaatgatctcggtgcgtcccacttggagatgaagctgctcttatctcaatgtgcttgaaatagtatattgatatcctataagtttgccaaacaatattggttgtaataagtagataagtatgaactcccttatattgtaaggttgtatggcttgctagtcattagagtatgtactattaacatatgtaaacatcatactatgtatctgatgttttaattattgtatgtatgtatatatattggataaagaattcttaatcaagtaattcttctttcattatagatgtctaaggatatcgctccgattggagaggaattatgtcttttggacagtgataccacaaactctatacttagggagatcaaatactttcaaactctcaaaaagagagaaggcaacgttttgactatcgctgggcgcgatactgtgatagttggctcaggacgagcaattattacacttccaatgggtacacaaattacaatcgaggatgctttattgtatcccgattcaactcgtaccctactaagttatagatatatccgtcaaaatgggtttcacattgaaacccatatggataatcgagaagaatttcttctcttaaccaaacaacacggatatggcaaacgcatttgcgagaaaattccatctctcacatcgggattgtactatacatacattaagcccattgcacatgttgcgtataaagtaatttttcaaaatgttgatgcattccacacttggcatgatcgacttgggcatcctcggtatcgggatgatgagaaaaattattggcaactctgttggtcatcatttgatcactgacaaatttcccaaatcctctgatttcgtatgcactgcatgtgctactgggaaactaattttgagaccatcttatctcaaaattagagccgaaccacttaaattccttgaacgcattcaaggagatatctgtggccctattgtgccaagatctggaccgttcaggtactttatggttttgattgacgcatctacaagatggtctcatgtgtgtcttctatcgacacgataccatgcctttgccaaattaatgtctcaaattataaggctgaaggcaaattaccctgaacataggattcaatcaatccgtatgaacaatgctgccgaatttacatcccatgctttcgatgattattgtatggcattgggaattcaggttcagcactctgttccatatgtccacacacaaaatggtttggctgaatcattgatcaaaagaattaagcttattgctcaaccattattgatgaattgcaaattaccttcgtcgtgttggggtcatgcagttctgcacgctgctgaccttgtccaactacgaccaactgcatatcatgaaactttcccaatgcagttagtacgtgaaaatcctccaagtatttcccatttgcgtaagttcggttgtgctgtatacataccgatctcaccaccacagcgtaccgctatgggcccacacaggaaagtagggatctatgtgggattcaaatctctgtcgatcataaagtatttagaacccttaacaggtgatctatttactgcccggttcgctgactctatcattgatgaggaacatttcccggcattagggggagacttcaagtaccagaaagaatgccaggaaattgattgggatgcccagggtgttccagcctcagacccacgtactactgaaattgaacttcaagttcagaaaattatacatttgcaaagacttgcaaataacctgccagatgcatttaccaattataaatgtgtgactaaatctttcattcctgctcagaatgcaccagaaagagtagaggtaccaaataaaaccactcaacttccactcactaaaaagagaggaagaagtatggccacccagcgagaaacaattgctaataagcaaagaaagacggtaaatgcaaaccaacctttagttgttacacaccaaattgatactatatatcaagcagatcgtgatagtctgcaacctagcttggtggtgcacaatgctgagactaggaatttggaagaccatatacacattgtttcgggagatcacgatgagtctataagggttgatgaaattgccatcaactactctgaaactggagaatcttttgatagaagagctacaattgtcgacattaatttttctgaacaaattgctgattgtctccaagttgatccagaacctaggtctataaaagagtgccaaaagcgctctgactggaacaaatggaaggacgcaattgacgcagaattagcctcgctttacaaaagagatgtattctcggctgtaatgcctactcctcgtggtatctttcctgtgggatacaaatgggttttcgtccggaaacggaatgaaaacaacgaggtggtgagatataaagcaaggcttgtagcacaaggttttacgcaaaaacctggcgttgatttcaacgaaagttactctccagttatgagtggtataactttccgatatttaatatcattggcagtacaaaatcgtctatttatgcagttgatggacgtagtgacagcatatctttatgggtcacttgattatgatatttacatgaaggttcctaatggaatcgacatcccgaatcagaaggtaaatcataacatgtattgtgttaagttgcagaattcactttatggcttaaaacaatcaagcaggatgtggtacaactgattaagtgaattcctttcgctaaagggatacactaaaaatgatgattgcccgtgcgtctttatcaaaaagtcccccacaggattttgtattatctcggtatatgtcgatgatctcaacatcataggcaatacacaagatattaatgaagcacgtcatcatttaaagacggaatttgagatgaaggatttaggtcaaaccaaattttgcttaggtctacaacttgagcatttaccttctggaatccttatgcaccaaagtgcatatacccagaaaattttggagaaatttaatatggacaagtcatatccttctaaaacccctatggtggttcgatctctagacgtggagaaagatccatttagaccaaaggaagatggagaggatgtacttggtcctgattttccatatcttagtgctattggcgcactgatgtaccttgcaaatagtacgaggccagatattgctttccaggtaaatctattagcaagatacagcgctgctcataccaaacgccattggactggagttaagaatgtctttcgatatcttaatggcataagagatcttggacttttctttaaaaagaaccaggattcaactttaattgggtatactaatgctggctatctatctgatccccacaatgctggatcacaaacataattcgtatttttacaaggtggaactgctatttcatggaagtcttctaaacagactctggtagccacttccacaaatcattctgaaataattgcattatatgaggcatcacgtgaatgtatatagcttcgcagaatggttaaccacatattaacatcttgtggtattggttcattggaatcacctaccattatctatgaagataatgccgcttgtgttgttcagatggaaactagttatattaagagcaacatcactaagcatattgctcctaaattattttatcctcatgagcttcagcaacatggagagataaacatcttgcaaactaagtcatgtgataatcttgttgatttattcacaaaatctctaccatactccacattctttaaatgtgtcgaaggaattggtatgatacgacataaaaatttgcaggattcagggggagtatcttcctctggaaaataacctattttcgttatattatactctttttcctttgtatgagttttaccctttaggttttctcatccaaagtttttaacgaggtaatatcaacataagttatatttcttatcatttggcttttccccactagggtttttactaaatgataaccgtagacattatactattttggatcatactatgagctttactcatagatctaaaatagtcaataatatatatcacggttctctccttatttttcccactgggttttcgatgagttttacgtgatgtatttaactataattatttctaagattatctttacagatatctggaacagtgaaagagcaatgattaaagctggattcgatcaagggggagtgttatgaaacaacaggtgatctcatccatataaaaggatggatcgcaaccgaaggcaaccgcgccttccctaggcgctccttgggaacggacgtgatggttcccaaccatcgtgtctccggttgccaccccttccccatctatatattgtaccgcattgatcaataaagaattccgttcattcattctctacattcttgtgtgcaattctctctcgctcaatccctcccgctcaatcaatcttattcaccattttttacaggatccatgccattataatttgtgtagtatacgttttttttcactacctatcccttcaaccattttctaaaattttaggataaaattgcccacgtcttcttcctggtcttctccccatctcacatattcatcttccctctccttcttcgaagcagtaggtggaagttggaactgacggcgatgggctcccaggggaggagcggcggtggcggggcaggggccgccaaatccgcgagaacgtggcgagcccaagacccaccaccaccgtcaccgtagctgcactgtgcgcgctgctgcactccagcatctagcttggcctcggtggggggatggcatcaatgggagtaatgccgacgagtctgggttgggataaatccttgggtcgccggcgggggatggattgatgatacatcctgacaagcttgttcttcttgtagtcgagcagaataatggcagcaagttgatagagcatcgaaaggattggcctttgggtagaacacgtgtatctaatgttagctggtatgaacgtggttgccgtctgtatgaatgaggaaggggggaggagagaaagagcccgcgcctccccaactacggatctggaagcgccgccgcgctggagctgcaccattgtccacctgtcgcactcgagctccatcatcttgatctgctcgagagagcttcgccgccggtccacctgtcccgctcgaccaccagagggtgaggacatttttatcaaatacaggtaaaatacatatcttaatggtacaactgaaattataaacaagtgatcgtggcattgttacaaatacgtaaattataatggtatattttaaaacctcaatatttacagtggcataaatctaattaatcattttcattttggagttgatacgtctgctgtagttacacgccatgacttatgttgttatgttagtcaaatctcttaattgtactgtgactagggatgtaagcgggccaacccgagaacccgtttatagacaaaattagtgagtgacccgcgggttaactcgtggattacctactaatttgacttataaatgggtttatatattaacccacttgcttttctataaacgcagcaagctgagccatgacgtgaaaacccgcggattaccctttatttaacatataaataggttcataggtcgtcccgcttacatccctaggcatgtccattcctcagaaaaactagtttttgctgaggtgatgagtaagagatctgcttccattgcgtgtttccaaaatcactttatttaaaatttccatttcccagcttatatcacccactcctggttattttttgattgagacactgtggagctttcattttcttttctgtagatctaaaatatgactgcatggttatatgtttacgtatttgaaaaagaaccgagtaacttgagagtacttttttggcgcatgacggcatgtcggcatgcaccatctcaaaagcatggtaaaaataatacagtaatgaaaacatgaaatatatagtttggctagatggatatgtatgtgtttggtcaatagagttaagtatttgaaaaggaaccgggtaacttgagagtatattatttttggcgcatgacggcatgcaccatctcaaaagcatgattcagatagtaatgaaaacatgagatgatttgaaaaccattgacacgacacggatgtacatgtccaaatactatcaactttacatccgtttcgcacgcggataaacaaaggaaaattaagctgctagtgtcattgtcccttttccaaaattctttccattataatttgttcttctgtaaaggcgatatgtttttctaataatggattctaaattcattaatccggcatctataaacacgagggatatacacagtcaaaatgatagaagagcacttagactcacacctcattaaaaaggagaacacacaacaaaaaggaaaaacctacgatctcgccacatccttgcttcttgacatcctctacttaaacggccaaaattgacgagtggaggacgtctagtcgccaccgtccctagtgcgttgtcgctgcaaatctcagttcatatcatcttcatccgattcaagtgagttgatgccacgctccgccgataaggccacagccgaccaaacgcgagctgaaaggatccgcttccgcttcgccgaattcctaggcctccgccactatcgtcggaatcctcctctgcctctcagactcccaggcctccactgccgatgagatcttcctccgcttgatccgcctcctccttgccgagatccttgcactggcaattaggccgctgccgccacagccgaggaggtattctgcttggactcgcaggccaccgccattcctagggtcgttgctacctacggaaccacctccgtcggatctgccttctccctgccgagggttggccgttgacgcttaggtcgccgccgtcctccgccgcatccgccgccaccatcctccgtcgcacctgccgccaacgtcctccgcagcgcccaccgcctcccaaagaaacaccgccatggcgtcgtcgacagctcgctgctacctgccgcggcgctgttctcctgaccacctctgctaccatgcgcaaccaggtattggcctgccaccgccgcccatggccctgccgtctctcgcactagcgcgccgccagatctgggggcaaaccccagacccaatcccactgtccgtcgcaggtcccgccgaagccctgccgccgccttcctcgcagccgcacggcactccggcggcctgctagggtggcggcatggcagcagcgaggagacaagaggtcgaggcgatgagacgaagagacgaggagtcctgtgaaggagatatataaggctttgaaagaagtccagtctagagcatctccatcaatatttcatattttaaagttgttaaaatgtatatatgggttaccccatttgtgagaaccctaagatcaccttttaagtccggtaacagctctcatttctcagtcttcattttattttttcttctatttcgacatatgccggtttactcaaaacaagaaagtatacatcgatgaatatttcagagcagactgatctcatagcaaacctagctatctgattctgcatctcctgtccctctaaaccctgacgatgcgctgatcgttgtgccggagttcgtgatgatgccagtgctagctacagaaattgcaaagactaggttgatttgagctccttgatcaagtacatggttgattgtgtgtgttcgtcacacctatacttgcaatttcacttgagaaaatacatgacctgacaaaaatgaaaaccaaaagaagatagagtccatatagagaacgcctatgcttcatcgatgatcaggccaatgctccaagcacgatgctgatcgactagggatcaggcttctctaccttcagagctaggtgcctttgtcactaacatgtgagttcaatgaatcatggatacacctgtcctgtcagtgacaaaggaatggtgtctttgaaggtagaggatctcaatccatcaactaggctccatcctcgctggagcaggtcggagaggcgcggcggctagagtggggcaaaggatccggagttgcgcaagatccatccacagtcgccagccccttaagactgaggggcttggcatgaaataatttcgagatgatttaggggcttcagtagggatggatctagtttttaaaccttaaccctcaatttttgttttgtttgagacctgtgtttaggggtcctgctaaagacgctcaatgagagcgtatttgtaactgaaattcagaataggaaaaaaatagaatcgagactataatcaatattttgcggttaggtatgtgaacgttctctccaaaaagacatcctacaactgattataagacacttaacgtttattggaggaaaaataataattatagataaaaattttatatgtgtcgttatggacttaaaagtcaatgctagaataaattataacaaataacatcaaaattaagtatgaaattaagcttgaaaaaaattaaatttagttttttaacacttatataactaacatactccctccgtcccaaaataagtgtagttttgcactattcatgtccaacgtttgaccgttcgtcttatttgaaaattttttgtgattaatatttttattgttattagatgataaaacatgaataatactttatgggtgactatttatttttagtttttttcataagtttttcaaataagacaaacggtcaaacgttagacacggatctccacgactgcacttattttgggacggaggtagtaaataatagtagatgcataagtccaaaattaagcttgtgtgaatgataagctgaaatgcaaacgataaccaattaaaccatacatttgccacctgtcctaaactttgacacggataattgtatttacagctaactaattattctttcagtgataggtgatatacacgtcaaagcgagcgcttgtgtttgtaccgtgcaccatatattcttccatgcatggtttcaaaacattttccgaacaaatacgacagataggtgagaatcgatccgtgccttttcaccaatagcaatcacagagtcctctggtcatttcgagttcttagaccatctacacgcaacaaaacctgctcaagtctttaaatagttctatacttcctatgtaaaaaaaaaaaaccttatacagatgaatctaaatgaatatatttcagatacactcttagaaattgttttttttaacggagagtacttaatttcgggctgcatgcctgcatccaccgtgcatgcccatatggcattacggcaaaatcctccaatttttttaaggcaagggcgacctcatctctcccaatcactccacgccaagtccacccacaaatccagacatgtaaccgcaggcaataaacacacagagcagtacaggtactggagtgagagtgagagcatgcccggcctgcactgcacgtcgcccctcaatttcctcggactgtttgtttgggtgcacgccaatcactcatcaccagcaaggattataccccccccccccccccctgcacgctgatcggatctgcagcttcatgaatgcaaagcgcctaccccagcgtcccagccagctgcgcatgtcgttgcctgcaagtttgagcatgcatatgctttgcaattttattgtgttctcgggtgactgcgtgcagtgcatccatggctaacctgcaacagcaagactaggctaatggtgatccccaaacagcgagccgacgcgtacctgacctgcaattttttttaaaaaaaaaagcatgtctgaatttgagaggattgggaacttgtaacagcagtttgttgcttgcagctaccgtggacgaaacgatgaacccttggtgaaaatcaggtttgatcagacgacaactccgatctacctggctcaggattttattttattagtctttgacggggacctgacctgagacatatggcaatctctgggtctcacattaatctctgggtactttcctatggcaatgcaatgcgtttatactgtgagctgtggctgtgcgactgctagtgctaagctatagtggtataccctgtggagtactcctctgtatggagaaattcttcatgctgcactgtacagacatgtcacattggtgattggccggcccgtcagtatctcgcaggacagatgcaaccaaaggatgaccgcacgtagctctgtgttgactatttttttttttttggcaaaaggaaggccacgccatggccttatcggcttgctccattgcgttattgcgtaccaatgtactatacctccgtttcttggatttaaattctccccatcatgaccattgacaaagtactaagtacatgtctacatgagcatacgatcgtgatcgagcctgccgctgcccactgaattcgaattctcggttttcccttcgaagtctagtgctatttgtttcttctctcgcattttgtaactgctactgatccttgtccttttgcacatcgtcactcgagcagagcagatgctcgatctccgaaaatctcaataagggaaaaaaaagtactcaatccgtctaaaatataagcatttttagcatagtgataagtcaaatatttttaactttgatcattaataaaaaaataaaaaagatcaatcatataaaattgatgttattagatttatcattaaacaaactatcataatataccactcttttaatttaaaacatcttacttttatatatattgttagtgaaaatagcatctcagaaactatatcagagttaaaaaatacttatattttaggacagagggagtagccatccgccatgtactctgcttagctctaaacctgtacggccggctgcatcatcatcatcatcaccatctcatcatcagaggaaggcaagctgccatgctgccgcgcgccattggtggtgaagccacctccaaccaactggctgatctgccgcccagtcaatggtgcagctcatcagaaaaaaaaaacaagaaaaagaaattggccaaacattttcttgcctcgcgcagctgcgccgttgccccgcgcgcgcgtcgcacaagcaagtaagcaacagccacagggcgccgcaccaacccggagcagtcaccggtgatcgatccgaccctgcagagtccgggctccagtgctctctccacggtactccctccgtaaaaaaaaaaaaaaatggctacgtgattttacctacgataaaaaatctagacatagttatccagattagcctttttaagaaaaaaaaagtatacgtggaacacagtctagacatagttatccagattagtctttttaagacaaagaaagtatacgtgaaaaaaatgttttttaaatactttttatattgaacttttttaaaaaaataaatagatcctgtttttctataagatataacaattaatattcaaataattatatgttaattaatgatttgtctcattttagatgcaagtgagaaaggtaataactaccccactgaaactgtggtcagatcatgggttggttttcagaatatgggtagtaaactactcctggagtagtgattggctgcaggttgacgatgacatgatcaaaacgaaagggccaattttcctggagatgactacagtacaaatacggacgacaataagaaagggaaatctccccaggaaattttaaaaaaggaacatggaggaggagaaagtagaaacctgagtaatgccttgtttatgtaatataatgtatggggatgagtaacaggtacaactaataaattcatggtccacacaagcttaattttggacttatgcatctactattatttatgttagttatataagtgttaaaaaacagtccacataataatatctacgagttgctctgttgacttttagaggacgttttttttttttgaaattgttcttcaagaatgaagtttgataattaatttcccataaaatgtatttttaatggatatagactacattgtgcgaaagcactttgaagtataaatctatcggtgcaggtctatgcactaaacacatttgtaattgagctatttgtcgatcaaaatccacagagtttgacttttcaaaattaaaatgtcttaacaaaattcaatacagggagaatatatattagaaaaatattgagagcattatatatcgtattgaagcacagtggcagtcgttttacttttatagagaaaaaccgacacatggatatataccacggccattggtaagtgtaggctaatctcacacgttatttttgttctatgatagtgtatatccattcccgggtacttgtcaccacatactatttatactcaaattttgaccacaactattctagcagctaaattgtaaatatttgaaattataccatagtattgaagcatgttgcatgctaaatatataatcatctaacttccacgcataaaatttgacatttgagaaatatttgagaacgaagcgaacattagagtgcggtgaaaacgacttgtaagaaaaagtatggtaaaaagacctggttcaatcctatgtcctaagtaccatgttaatgagagaagaatatacggtttgacacatgtggaaattttaaaagtatggcgggggattaaattataatggtgtaaattaaaacaaaagacacatgtggaaatacaatttagaaaaaaaaggtgatactgtttaaaaaataatcttgactatacacctagacaatataattaataaatataccatagaggagttcatgtcaaaacaacgcatcaacaatggaatttttgtttggattattggaagataaagatagaactagtagtttgctcactggataaattccaaagtaaataaaatacttttgattcttgaaatacaaatatactttaaatcaaaaccagctgcccaaaagttggccactaaaagctgaagcaaatagcatacccttccatttggcaaacgtccagatcatgatctgattattagcctataggcaaccaattgaaccaaagatgccccgtaatatcaccccctaattctcagatcgagcaccgggacgacacttaactgacgtaatcggtagaaaaataaactattacaactatagcaacccaactaactacaaacacaggtgaggtgatcaccggcatgagaaatttgaaatggaaaataaaaatagtgccatgcgttgatccgtcccagtacaccaatttcagaagcttgggtgttatgcccccaaatcgtcacttccccctgattcacaagcaagccccaaatcatcagtgtgtgacagaaaaaccccccttaaaaacgtccgtgcggtgggcgtaggttaagagagaccgtgcgcgcgcgaaatctctcacacgcccacagctcaaacgcgcgcgcgagaggaggggaggggtttggtttgcttggacactttggtttggtcgggtagctcacctcactctcatccgaccagcgactctctccctcctcctcgcttgcacacttcgtactctctctagtcccccgcatacatgtcgtccgcggccgtggcgtctccgagggagacggtgtcgccgcccatgtcgctggggaaggttggtgtcgccgtcgtcggcggcgggaggaggaggtcgaggtaccgcctcgagacgagggggttgtcgtacgtgctcccggcgaggggggcggcggcgaggttgtttcttggaggcggtggggaggagaggttgctcctgaggggcgtgacgtgcgaggcgccgcccggggaggtggtggcgatcgtcgggccgagcggggccgggaagacgacgctgctgtccgtgctggccgggtcggccgacccggcgagggtggtcgccggcgaggtgctggtgaacgggcgcgccatggacgctgcgaggttccggcgggtgtccgggcacgtcccgcaggacgacgcgctgttcccgatgctcaccgtggaggagtcgctggtgtacagcgcgcggctgaggctgcgcggggcgggcggcgggaatggcggggcggcggtggcgagggcgagggagctgatggcggagctcgggctgcggcacgtggccgggtcgagggtggggagggtgtccggcggcgagcggcggcgggtgtcgatcggcgtcgacctcgtgcacgacccggccgtgctgctgctcgacgagcccacctcgggcctcgactccggctccgcgctccacattgtcaagatgctcagggacatggccgccgcgcacggcaagaccgtcgtgctcaccatccaccagcccgggttccgcatcctcgagctgctcgaccgcgtcgtcctcctcgccgacggcgccgtccgccaccacggctccctcggcttcctcgaggctcgcctcgccgcctccggccacggcatccctccccacgtcaacgtcctcgagtacgccatggagtgcatcgactccctcaagcccgaggtcaccacggcggacgcgagccacgcggacgccgcgtcggggtcgtcacggcggcgcgcgagctccgcgccgtacgcgaactcggcggcggcggaggtgtgcatcctgtcggcgcggttcgcgaagacggtgctgcggacgccgcagctgttcgcggcgcggatggcgcagtcgctcctcgccggcgcgttcctcggcaccgtcttcctgggcgccggcgacctccagtcgaggctgggcttcttcgccttcaccctcacctacgtcctctcctccaccaccgagggcctcccggtgttcctccaggagcggcgcatcctggagcgcgagacgtcccgcggcgcgcaccgcgtcgcctcctacgtcgcctccaacgccgccgtgttcctcccgctcctcctcgcgtcggcgctgctgtacgccgcgccggtgtactggctcgccggcctcgccagggagcccggccggttcgcctacttctccctcgtcgtctggctcgtcatgctcaccgccaactcgttcgtcgcgtgcttcagcgcgctggcgcccagctacatcgtcgccaactccctcatcgcgggcctcatcggctgcttcttcctcttctccggctacttcgtggcgagcaagaacatccccaggtactgggtgttcatgcactacgccagcctgttcaagtacccgttcgaggcgttcctcgtcaacgagtacggcggcgcgcgcggcggcgccgagtgcctcgccgaggtcggcggggggctctgcgtgctcgacggcgccacgctgctgcggcagcaggggatgcgggcgagcatgcggtggagcaacgtcgccgtcatgctcggcttcgtcgtcggctacaggctgctctgcttcgtcttcctctggttcagatgccaccgcatgaggaggtgaagcgcgccaaaaaaaatgcaaatagtaattgctcaatctgaattcgacattttttttcttctctttttttgctgtgcttttttttctctgagacattttcatcttgggttcgagtaggataatacgaatatatatatatatatatatatatatatatatatatatatatatatatatatatatatatgtaattaaattgtatgtatgggagatattgatcaaattctggtggaattggatgttcttatgtatgaaaaattgggagaaataatttgatggtcaggtggttttttgtttgcttgttactttgtgattgtgtttttcaagtattattaatttatttatcattgccctttttgtttgtgtccttttccaagtatagggaagaaactgtcgcattcgtgttagatttgccattttgatggtctcttctagaggtagatgggaaaagcaagattaagatgctaatcatatgaggtgagacagtgatgacaaaggtcaaagtacatgcagcaggttggaggcatgcctaatttgcacctgttttattgaaacaaaaagggtagctctgctagaaaatcaagtgctaatcaattgtcaggacgcagccattttcctgtttcttacccaaaaatcttccatttctgcattcaaaacaaaataagctaatcatattgtattcgttaagtggaggaaatgaataatgtactcctatcaaggtttgagattcttgatgtcttgagatgttcttttttttttcagctgacgaattcttttcaactgggtttagttttgtgaagttgaattttgctcggtacaatgaagaacaaggtggtggaagctaaaagcgatgtatgcataatacgcaactccacattttatgatagagcaaccttttaacatagtacagctttacaagttttaccaaacctttgttaacttgcacactcgaatttaattaccttttgtccctaccgttccaccaactacttttctcccccacaatctaaaacctcatagctggcaatctagcattttttttaacattatggatgtaagccaacaatttgacttaaattagatccatctactcctcccgatcatggtaatatgtcatttaaatatgaaacattggtacaatcttcgaaattaattgtaaccatcaatttcctataaaatgtatttcaaaaatccataaaattacaatattgtaagagtgtatattttgagaaatatatgaccgtatgagcttcatgtatcaaatcaaaatattttaagagaaatataagaaatgtcattgataaacgtccaattctaaaaaatgctatccataagtacgagtttcatgaaatgccatcattcaagcaactatgatatagaaatatcatcgttaagtgctatagaatgaacagtgtatttaacaatgtggaatagatggaactctaacgatgatgatatcttcgggacaaaatcgattgtactataacattttatgaaactcacactcgttgatacaactcttggatttgggtgtttgtcaatggcaatttttagatttttctcatgttttaaacgataattgctgtcaaattttaaagtttaactaaaaacatacaaacgacacgttctcaaggctagtgaaagtagctcttgtgaatctcaaagaattttcattccgagatacatacgagggccaacagcccaatattaaccaaataaaaaggaggtgtcactgacgtggtgataaagttgtatgtaggtgattatagcttcgcttattattgtttaaatctggatgctcataaatattacgcacataccggtgaagttttattagaattttagtaatactaggtagttgccataggtctccatctctataagcgtgtattactatattatgaatgtattcgtgggtgcatgagtatggtgttacgtctagtggcgtgtacgtgcatatgtttcttttgcgcgatctatgtattctatatcgttgaaataaaaaactaaatatgcattaagccacaccacctaaaaaaatcttgacctttggatcatcaattagagagctaggaggaataagatgatgtgaaactaaagagttataaagacatttagttctcttcggttaacattcattttattgttgtaattacggtacgttcgtgtagcttcaactttcaattgaaaaactattgggcatataagtgaagagctttaagccatttatggtgctattcattggtagtagaaagaaatattaactattgatcttatttgatcgaagagtttagatctatatatatcaccttagttagaagtaatagaaacataaagaaacatcattgttaaaaaaagtgtggagaggcataatcatcatttagcagtgactaaacatttttccacatttttttgggctttttcgatggaatatgagcgatgctagggtaatggattaccacatatcgatctagctgaaaaaataaacataaataacaaacttatccttaatcattgaactaataaattactgatttataaagtatattaccagtagagagcaccgtagcatcgctcatatttctgttcttttgtatattttctatggctcgtgtatcttcaaaaatcatttatctttacatagtagcaaagcacaacataccatctatcgaaaaggaaaaaataaaacatcaaccagctgggaggcttttgattgacgctggccaaaagcacaatctttttttttcctctctgaagcagcagaaagtgaaaggattcagaaaacacaccttattgtgtcgtgggcatggtggggtgtaccgcacatgtcacaccgtcaccgcaaatggcatgaccatgttgagcttaaaattttgctacaccaaacatgtctgcatatagctttccaaaacaaattttattccaaacagtaattcatggagctaaattcatacattttgacttttgagtatcccgttccagtatttacaaactatactgcatgggtggcatgcactgacatcgatctcactctcgtattcccatccatcccgagaaaatggaagcataaacttcacgtgtaacgtaaaactagaaactactgttgaataaagagtactacctccgccccaaaataagtgcagccgtggatatccgtgcccaacgtttgaccgaacgtgaatagtataaaactgtatttattttgggacgaagggaatagatgtttaagatttatctacatcatgttatatcacgagtaaaaattttatttattatgatgtggataatttttagatgtcttttttttaattcaatggtcctttacatgtttgcgctagctacttaagctatacatatttctccatgcatctcgaccatccggtgcaccgtgcacagcgtacgtcccaaacataagcagcagcatctcttttttttttttttgaagcagatcaaattttcaagcagcatctcatcagtgcgcggcagcagagagaacgcggggtgctgctaactcgccggctaaaatgtgaccccgggtctcctaatatactttatttgttttaaaatggttgacgccgttaattttttaagtacgtgtttgatcattcgtcttattaaaaaaaaattaagtaattatttattctttttatattatttgattcattgttaaatatactttcatgtgcacatatagttttacatatttcacaaatttttttaataagatgaacggttaaacatgtgctaaaaagttaacggtgtcaaaccattttaaaacggaggccgtcgcccgtcgccatcgtcgtcgcgatgaagaatgcggcgccgttggctttgcggcggttgcccgccactacggcgtgcaagcatgcatgcaggctggtcgatcgatcgcccggcacgcgcggcggcggtgcgcaacagaagtaatgctccatgccatgcatgatgcatcgatcctctgtacatcatcatccagcagctaggattgcattcagcgcgtggatgagtggatcgaatctccgaaatggaacgggcaggaggggtccgatgaggtcggcgacgatgcatgttgctgtcgatcgagctaattctagccgataattccattggccaaactctttgtctgcacaaccaatgagcgatcagtcatcagttggctgtgttcgttttggtgtatggctctatatcgttgcgatcagatcgatcaaatgatggatgatgtgaggaggagggaaaaaaaaggaaaagggacccgagtcgctgtcgatatacaccattatcgatctatatctatatccatagatcggcgatggtatcgatccaccattggctagctagctcctttaaacttgcattgcgttgtacgcttaaattacccgtttggtttccaacccaattatgatgggagccgaatagccgatctgcctccctctgctggtgcgttgcacacacgaaggtcaaaagttttgagccagataaattgacggagattacgctgcgtgcgcactggcgcgaaaaaaagaacagattggccagagtgccagccccagataaataatggcgcgctttttgcgctttttgttgtgaatgtgatctatcgagagcgagaagaaaaggcgcttcgccattgtagtcggctgagtggtgtctcacacacaatgctttcatgtttcatcaacaactcggaggacatccgtgtgtgatgagcaagatatattgatattcctttttttctaattaaagtatgttgatcaactgtagacttaacctgctattattgcaccgttccacctttactgtacatccacctcagcattagtcacgctccatatgataaattaaatatttataaatatgaaattaacaaatattagctccgaatggttcaagcaacacaatacgaaaataatttttttaaaaaaataatttaagagacttgaagcaaataatccgtgatgataattttgtgtggtagctaaaaagaatgaggtcgacgagtgaaatgagcaactataatgttgtactcggtgggtgtcaatgggtgtaaaatgaggatgtgccatcggggaaaattaattatttgtcactattggatttaacaaatcttcaaatattcctctcttaattttgtcataacaaaactgccaataggtagagttgattttttttaactatttgcgaattttgcatgtgcggcttaccaacgtgaaaaatcaatgtgggatccacaagttagctctctcctccccttcatcacccccaccagccagacaaggtagagagggcagcagtggtggaggctcgacccaaaaacagttgctagctcagtaggcgtaggtagtggtgcggcaagggagataagggtggtggttgttggggggggggggggggggtatttactcgggccatcttagagatgggagcaatgaagcgagggagcccatgatgctggcgacctccacatcccagccagggacccgttgtagcagtctctagatgacggggcaatagggagcaggttagggggtcagcttcgtgcaaaggaggcccgacgtggaggtaggggcctcccattccgcgatctggcagatgacaatgcaaggccacccttgagcagcgagcttgggaggccttttcatgtcccaacagagatgattagggctttgagtgaagatctatgtggcacgtcgtgaatagcagaggaagccagaggcagagcatgagaggctacaacggtggtcagggaatgtgggatggagcgggtgacgttgacccagatccaaggacggtaagacattatctttctattggtaatttcataagtttaaaattgagggtcacttagaaagttgctaaattttgatagtgacatatagttaaatttcccttgtcagcaaagctaagttgcccatcgtcaacatcagaaaatttgtaaatggattaattataaataactacagaaagataaagttttgaaaaaaaaaagaaagaggaaggtatacttttttttttagaaaattataaatttaccactggtttgaatcggtattataaaactgatataaaaaattaaaaaatattactaaaactgtcattcgagtggcaatgccctttttttaagagaaaaggaggaataagggatcgagacaaattacatttcttggcctcttgggccttttcggctttcccctcccatggtcttgagacttgagaggagagggcaagcgaggttgggccggaagtattcacaccagttttggcccgttccagctaggaaaaaaacgaaaaagtacaccgaaggtccctcaacttgtcatcgggataaaaaacgtccttgaaccgcaaaaccagatatacggggtcccttaaatatataaaaccggtcacccgaggtccttcggtggttttgactccggttttggtctacatggcggctgagtcagcgtgggacccacgtgggtcccacatgtcaggtgtccacatcatctctctttactctcttatctttcccttcctcccctctatctctctctctcgggcagggccgatggtgagcaggttgagcagcggcactgcgacggtggtcggcggcgacagcgactgccgccgcgcacaccacgcctacctcgccgctgccgccacgaggcccgaggcccccattgcgtcgtcccccaatgccaggctctgccgcctcatcgcccgcgacgacctcgccgaggccacgcgcctcgtcgaccgctcacgcggggagacacccgacgccgccgtcgtgaagaccaacgccggcgaagtccatgagccgaagcaccaggcacacacagccatggacggcgttgaagtggtgagtgcacttatcggctagtactatgactggctggtgctggtgctgcggagaggcggcgttggcgggcgagagcggtgtaccacgagctctagcaccagcccgttgtagtactggccgataagtacgctcaccacttcaacgtcgtccatggctgtgtgcgcggccaccgccgccgttgcagtgccgctgctcaacccgttcaccatcggccctgcctgcgagagagagagagcagagaggggaggaagggaaagagaagagaggaaagagagatgacgtggacacctgacatgtgggacccacgtgggtcccacgctgactcagccgccccgtagaccaaaactggagtcaaaaccaccgaaggatctcgggtgatcggttttgtatagttaagggaccccatatatctggttttgcggttcgaggacgcttttttatcccgatgacaagttgagggaccttcggtgtactttttccggaaaaaaattctgctagatgggccacattttcccaacaaatatcgggttcggcctctaggcttccatccacgaacgggggctctcaccggcccagccgccgccgacgcgctctgctccgctcactctctccccaccgcccaccgcatccgaagcacgcccctccctctcggtctcgtcgccgccggtgcgaccgcggtttcctcctccccgctccacctccgcaacacaaccgtcttcgagcctcgggcttcacgtcgacctcatcggcaattcggcaccgcaccctcccctccccatcgccgggttcgccttctccgcgcgcaactcgtcgcgtcctcgagctcggctaattaacgatacttttactgattactgaagcggttaacgacaagtccaactaacaaagtcgtcgggttggtgtcagtggcccagtgtgccacctactcctcctactcaaagcctcaccgcctcagcatcgcacgacgcctaattaatcaattcctctcccgcgacacgcgcgcgagctcaactgcctcgcttcctccctcctcccgatcgaccgcgccatggctgccgccgccgtcaccaagtcgccgccggcgctggtgcccccggcggggcccaccccgggcggctccctcccgctctcctccatcgacaagaccgccgccgtccgcgtctccgtcgacttcatccaggtcttcccctcctccgccgaagccgccaaggaccaggccgcatcggtcgccgccatgcgggagggtttcgccagggcgctcgtccactactaccccgtcgccggccgcatcgcggagccggtccccggggagcccgagatcgactgcaccggggaaggggtgtggttcatcgaggccgaggcgagctgctcgctcgaggaggcgcgcaacctcgagcgccccctgtgcatccccaaggaggagctgctccctcgcccgccgcccgaggtccgcgtcgaggacaccgtgctcctcgcgcaggtacggattccatcacccattgttacttgagctaaattttccactgcaaatttggtctggatctgactcctgagaggttgggggttgtggatctgtgggggtgaggagggttggtcaccattgctatcgttgactcggtaatgtggggatgtcaatggcggcaatggtgtgaaaggaaaaggtctagctgaatttctagattgaacttgctgcaactgctcaattgtgtgactgactccactctgcagacagtgtgactgaccaatctgaacttgctgatgacttctgacttgctttaagacgtagtactactagcataaacttctgacttggtgtatgtatacagtatcacgcactactgatcccaagtgaaagtgatctatagctccggtggcgcggtgaggtgaactggaccgcgcggtgtgtgtccttccctcaatcctcatcctggtggcacttctctcctcgccttctaaccgttggatggatggaccaaccgactggatcatccgacactctcgtagtcttatgccctgcttgagttgcattacccgactttgaaccgcacacgctcctgagtcctgaagtgtttctgggagatatattaaggccctcaacgaaatttaacaaaacctttgacacaaactgctcaattcctgagtcctgaagtgtttctgggagatatattaaggccctcaacgaaatttaacaaggccaatcacactgtctgctcaatttctagattgaacatacacatatttgacacaaactctaacagctagacaataagccttggaaaattttgtacaagatatcgaaagcaacagatgctgcaactgctcaatgtctggacaccggaattttcatttttgcttgctgctgttagtgaattccatagttccaagcttgcatgtgacgaagagatggtctcatgatgacatggcatgcctgggctgatccaatctgttaggtagttcatgagaattgatatccaaccttgcaaatcattgccatgctttctcttccaagcttgtgaggatgagggttcacatagtactgtcctttctacctacatagcttaattacattcaaggctgcaaggatgaggatgagggttcacatacccctaatgctttttggatactatgatatgatactccctccgtcccaaaatatattttgggacagagggagtacttagttacaaatagattttggtttgattcacatgatgacattatgcgtgcttctcaataggttgaatgttttaactttctgttctaagttcagtgaaattttttcatgttggatgctaaagaggtactaagtcgatgacaattttcatgtaaatgttgttcatgccacacatccttggtaccactacctgttaaaatagtctgacactaagttgacattgtaacatggcctgtattagactagttactgaatttgcatgttctgtgatttgaatgattagtttttcaatttcctttccttcagattacgaagttcacatgcggtggatttgctgtgggcatttgcttcagtcacttggtgtttgacgggcaaggtgcagcccagttcctgaaagcagttggtgagatggcaagagggctccctgagccatcactcaaaccaatttgggccagggatgccattcccaaccctcccaagccacctctaggaccacctccatcgtttactgcattcaactttgagaaatccgtcattgagatctcgttggatagcatcaagcgtgtcaaggaccaggtcgcaagtgagaccaaccagaaatgctccaccttcgatgtggtcactgccatgatgttcaaatcccgtactttggctattgactttgcacctgatgccgatgttcgtctgggttttgctgctagcacacgtcacctgctgaacaatgtgctgccttcagtcgacggctactacggtaactgtgtctaccctggtggcctcgccaaaaccagccaggaggtcaaggatgcgtcgctcgtagagattgtgacagcgatcagggaagccaaggatgtgctctcgacacggttcctcgattggatgagcggtggtgccaaggagaaccattacaatgtgtcgctggattacggcacactagtcgtcacagattggagccatgtcgggttcaacgaggtggactacgggtttggcgagccgagctatgtgttcaccctgaatgatgatgtgaacattgtgccgtccgtcgtctacctgaagccgcccaagccgaagcagggaatcaggttggtgctgcagtgcgtggaggctcagcactccaaggttttcggtgaggagttgcagaagcttgcatagaggtaacttcgtgtttatacgcctacacttcgcagcgttgagagctgttgtattctggtgtgttgaatagccgcttcttgaacttggttacaaataaaacaaggtggatcgtgtttgtattctgtattgttgttaccatactacattatacattgattgacattgttgaggcagtactgttacagttgagaacaaatgattccattgatttcaagaatttgtacaatatagtcctacatgaacattatctttcattttccacctatatggtcaagcctgagacggcctatttgtcattctgtggatatacgcaggaagatatttcacatgtcgtagtaacatcatatgcctatttaccaccaatctgtgaaacctattcataactctgtgtgatgaaacattctcagtacagtgcagtcagactagcatcatggctttgtcttttggcttattagccacaacaaaaatattaaaattttaaaacttaattttaaagtctacctttaggcttttcgattgttgtttattttccagcattagtttttaaatcactaaggacagtttaaagatacacaagtttttttttttgggtaacgatgaaatcattagagtttagaagactagcccttgatcatccagcttcagtagtgttccaagttcgtcagggcccgatggagctcagcacctgagcagattcagaaatgaatcttaggggggagaacagtaagaacacatgtatggtcatgtgaagtccactaatcttccaaccacgaggagctaccaacccactgaaacactgtcctcagtttgtcacagatcagatctaatcatctatacctaacaaaaatgcctgaaaattccacacgagaaaaagaaaggcaaaaaagaagtcaaccactctcactgagcattgagagctcgtgctcgccacttagcaacaaccacttccattcattggggagggaaagcggcaaagcaccagcccagccagcgcggcgccaaactccacctaccgacgagagagagagagagagagagggggagggcatggccgccgccgccgccgtcgccgccgtcgccgccgcggccgcggccgcggagcccaccgtctccaagtcggcgccggagctggtcccgcccgcggggcccaccccgcgcggcgcgctgccgctgtcgtccatcgacaagaccgccgcggtgcgcgtctcggtggacttcatccaggtgttcccgccggcgaccggcgggcccgcggcggacggccaggaggacgccgtggccaggatgcgcgacgggttcgcgagggcgctcgtgccgtactacccggtggccggccggatcgcggagccggcccccggggacgtggtggtggactgcaccggcgagggggtgtggttcgtggaggccacggcgagctgcacgctcgccgacgtgaacaacctcgagcgcccgctcctcatcgccaaggagcacctcctccctcgccctccgcccgaggagaagctcgaggacctcatcctcatggctcaggttcgcaccatctcctccccaattcccaattcccacgatgcagctgctcgatcgattgatggttgaatccagcgagagaaattttaggcgctgattaattcgagatcttgttgctttgcacaggtgaccaagttcacctgcggcggattcgcggtggggatctgcttcagccacctggtgttcgacgggcagggcgcggcgcagtttctcaaggcggcgggcgagatggcgcgggggctcccggcgccgtcggtgcccccggtgtgggaccgcgacgcgatccccgacccgccgaagcccccgccgcgcgggccgccgccgtcgttcacggcgttcaacttcgtgacccaggtggtggacgtctcgccggagtccatcgcgcggatcaaggaggacttcagcgcctccccgacgggcggcggccaggcctgctccaccttcgacgccgtgaccgccgtggtgttcaggtgccgcgcgctcgccgcgtcgtcgctccccgacgacgccgaggtccgcctcgggttcgccgccagcacgcggcacctgctcgccggcgttctcccggcggtggacgggtactacggcaactgcgtgtacccggtggggatcgcccgtcaccgcggcgcggtgcggggcgcggcgctggcggaggtggtgggcgtggtgcgggaggcgaaggaggcgctcgcggcgcggttcacggactggctcggcggcggcggcggcggcgaccactacgacgtgccgctggactacgggacggtgacggtgtcggactggagccgcgtggggttcaacgaggtggactacgggttcggcgagcccgggtacgtgttcacgctcaacgacgacgtcaacatcgtcgcgtcggtgatctacctccggccgccggcgcccaagcgcggcatccgcctcatgctccgctgcgtcgaggagccgcacgccgccgccttcgccgacgagctcgccaagttcgcctagatatacgtgccatattgccatgacgatgtgtgtaaggatctcatctcatatcatttgggtcacaagttcacaaccctgctgctgctggtttgtgcatgtaaaattcgatcaacgttggaattcgtgacgtttattcgtgtcttaacgagacgttatgtcgtaactttggcgcgagagggaataaaatccagtgaagtctctggtttacatctagtcggactatcaccgtttggtataaccgatttgagatattttggtgtgtgattatgatcgttcggacagcctattctgcgaaaatgctcaaaatgggacgctccccccccccctcccgcccccgcgcgcgcccctcccactcgcctccaccattcgcgtctcgttgcaacaaatctcccacatattacagaaacaccctattaagagaaatccggttttttttcaccaacaatgttttagctaacgtactcatgatattttattgtgtatggatgaaatgatgttttattgtgtatggatgaaatgttacagtggattttgttatagtttcatattttcatcttaatgtacacgtggtttgttgatgtacacggggtttaagtattgcagtggcttttaattgtttgttgcatacgttgaaccaaattcttttatccagtgatcttactgtgtttcactacttttttttaagaattaaaatatttttttcgctatttactgaaacattatttttatatagggtgaaacaacggtcgattttttagaaacggttgtttcatacgttgttggtaatgtttcagctttttacaaaattgaaacattttcgacctacttagtaaaacatgttcgatctacttggtgaaacagcgaccaattttttttttaaaaaaatcgggcgcctaatttgtaggcgcctcgcctattctgcaatcgcttgcaattttgggtggttgtcagtcgattctgtgcgccgtgaattatgcatccaacggcatgctgaaacacaaaaaggaaaaaagagcttgcgcaaaaaaaaaaacgaatgaaggttttgggcccatagtctttttgttttggactactttgggctttgggctttgtgtagtgttttgggctaatatctgggccatgtgagagagatgcactgtgatcttctctttgactggtttgcatgcatgtgcctttgggattttgtcaaaatattttgggcttataatcgtcggcaggctgccgtgacttccgctctgagtgaacaatataaatctttggctgaaaagaacttttaatccataaaatcgaattagttttgtttcatgcatctgggctttgggctttatgacattatgtgttgcctctcaagacaaagcaagacacgtgaagggtgaagagaggcaggaccaaaactcataccaagagacacacccatatattccagatcaaatgcactatattggattagaggaagcaagaggatcaggtcgatcgaaaccacagggacaaaatcagtagaaaatacaaatcatcagatgtaatttctattttttggttgatatgtagctgcttgatctgtctgccaccgctcttttttctgttgtagttgaaaaaagttccagtcctctgaaaccaaaaaaaaaaaaagggacaaaaaatagtctcagtagtgttgttttggattggatgtctgattccatcaatatatgaaatgacaatgctttaggatctcatttgcacttagtgggtcataactttatagattgaagggattatggctgaaatgacaatgctaaatgcaaatgatcgtgagagattcatgaaaatatatcttacaaattacaatctcacatgtgcgcatgttggccatgaaactgtcatacgtacatgcacatactatcttctttatttataccttctttatttatcacattacaacatgcatcagatatatataaaaagcaaggacctttcattattgtatcattacacttatagctagacacagcttaaaactaattagccaatcttgggaatctcggccacagtgtcgacccagaggatgacacggttcgggacgaccactcccaggatgatggttcctactgggagcacctcaacttggaggtctggacggtcagccttgattttcgccttggcctgctcgatggtgaggccaactagctccggccactccgtcttaagaccaccacatggcttgctgtctgatgaactcattctggtcacagcaaattaatgaagcaaaattcctgcaaatatagctaggattaatttgttgttgtgtacacgcaaggcacttaattcgaaacactctttcatcaaattaagatcagaacaggtacttacaaccaattgaaactgcttgctatcgagactgaaacgggtgttattgtccagcagaatgatagatgctctattgatcgattcttaagttgtgtgtgcgtttggtgtatgagggatggagttgtgtggtgtatttataagatgagaaaagaagcaaaacgtgcaatttttcggtgccgttaatggataggcttcccagtttgctgagatgagatatacttgtagacttattaatccttctggactcagaaaattcacggatgtaaagggtggcacgtgtgtgtggtggagactctactagtcagagaaagaaagtgtcaatttgttaaggtagtactcttctgcatataccacttggtgcccagatttgcagaaaacgatatgattaataaacattttacaggtcaaatttacaatgtgcaacgtggatataaatatgattcattggatcatgccattgtaacttcttcaatactaaaatataccactacaatttatggaattttagacatgcttaatttaataggtatttcaaatatgccactacatgtgtatttcttcgatgaaccaacttgtccatgtcttcttttttttttttcatcccctcctcctgttcatcttctgcaccattaccatcagagatggactcggccagttatcagcatggagctatagcttagagcagcactgcagcaggcagccaaatccatccaagcttgttgccgctgcctgttaaatgcatcgaatagctaagcactgacatatcactaatgcttatttttggttctaccatgattatggtttcatttcctctctgcgccacatagctactactattatttagctcgaaattaattaaatcttcctagctccaaatgcgtttagaagaattaattatactcagctctatatgtgcaaggttcatcgtcaaaattcaaatctgcaacccacaagtagccacgcaccatatggccaaatgtccccatgtccaaatcgttgaatatgcatccaacaacccctctacacgtgggtgcacatgcatgaagattgaagcctatccactaatgactagtccacgtaccggcccgctttgaaacttcgttatttacacacgttgctcgatgtattggtgtgctgtgtttttttttagaccaaattgctccgttcatatggtcctataaatgcacgcatatacgttacacaaatccaaatccatatccacacatcgcggtgcaaaaccaaaacccactgcagagaagaagcatcgatcaattcaagttaccaagtacgtactcctgtctctaccgtatgtgtctacctgtttaggttctttattatttgaatctacacatgaggagaggttccgttttttgattagtggcgtttggagtcatcgtttcgcttattcacggcatatttgtaaagaaaaataatttatgaataaaacttttatgtgtatgttcttagcgatttaaaagtaaaggctgaaaaataaacttcgataaaaaaaaccttgaaatcagctccaaatttaaggttaaaaatttaaattttaattaataagcataaacataagcgaaaagatgaggctctaattaaggtcccatttgcaacaattttaaagaacaaaatatgattcaacaagtaattaacatagaaaggtgtttctttgatgatctgaagatgcagtaatcatgaattaaccactcataatttgcaggcaacttggatcttctcgattgtttccttgcgaagatgagttcctcttagacccccaagacggagtggcccgagctagtttgccggacgatcaaggaggccaaggagaagatcaaagcagaccgtccagatctcaagattgaggtggttccggtaggcaccatcgtcactcaagagttcgacgagaatcgcgttcgcatctgggtcgacacagtggcaaagacccccacaatcggttaagctgaaaccccgatataggcatacatctagcaagtgtacgtccatgcaagtatttctggatatggtccagtatgataaataaataaataaataaataaataaataaataaagctgtgtatgagcgtgtgtgtgctcatgcatgtgtgtgttcacggttagcttttttttttttaaattcttgcatcaataaaaagtactacggagtacgtatgtactctttgaacaatgcgttatacgacaaatgagatgtgtgtcctcaatcgttttatctgaaaagatatcagcataagtacaaaattgctgctgtttacaacgtttcttcccatctttacctctttttaacttgtactgcctcctttcccacgcacacgtttctcaaatcgttaaaccgcgtgtgtttttctaagggtaacaataatgtatataacaaaaatagtccatataaatgggacctatgtatagagcttttaactattgtatagtgctactgagtcccatcgccgccgcgctcagtagcagccacggccgcctcccaccgccgccacgcgcagcagcagccgagtccttatatacataattaacaggttgtcaatacgtaaaaatcctcctaaatttgtatggattgagacattctttaggaatctcatatgattcaatagtttccaattctttatttcaaagggtcatatagtgaaagtgcatttatgcccctagtgggttttggtttattgatgacaaacgattaagggactaatgcacttattgagtgtataagcaagtgattagaacaatgaagaagctaggaaatagacttatagatggatgagaattaaagagaagatattgaagatgcgggtatgaagtgactacctatggcaagatggtgaagcgcaagcgacgcttagctacaatggaccatgcagtggtgaagggcaagcaaggggcttagcgccgacgaaccgaaaccggtggtgaagggcgagtgaagactgtgtcgtgatgaaccgtgcgaggccatttgaagccatggattatccgtattaatcatttgagaaatggaagatgaaatgtcaaagatcaagaagatgagatcttcccaatgatcaaatgaccttgacgttggtaaccctccaagtgaagaaacaatatggtgtgaaggtactcctattggtataactttgctttttaaatttgagtttaggatgccgtactattaagagggataccacatgcatataattggttgaatactagtgctcaaaatgcttcatgtttgtgtgagttgaaaaacctaagccaaaattttaatcccgagttgtttcacttgtcacaacacttacatcgggtttcattgcaagtttttcaacatctcttgaaggttttggaccatgttttatattgggtttgatagcccacgaaactagctttccatagagtccaagatcttcgaaatcggagttcggagtaaaaagttattgcatttttacttgagcagatgtatcggactatccgatttttcacagaacttcattctctgtctttgtttgaaaaatcctttcgagtgagtttttctaagtgtcggagtatcctatgttggatcagatagttcgatgatacagagactccgaaatttcatagaacttgagtctctgtttgaggacgaagtttttgcttctaaaatatcagatactctgatttaacatcagatagttcgatgtctcggaaagtccgaaatttcatggaacttcgttctctgtttctcgttgccttgaaggtttaaaatatcggattatccgatcttgtatcggactatccgacgtgggctgaaagattcccctccaacggtcacattttgggggatctatataaaccccccaccaacccttttctagggttgcccaaactgatttcattccaatcttgctttgggttgagctttgtgctaagtgctttggatctttgagctctctccctctctatctcaaatcccccttgttctttgtgacttggatctttgtgtgtggatttggtgtttgggagcctagtgtgtgtttctctttatcttgagcactaggatttgtccaagagtcgtgtggtgtttattactcttggaggttgaggattcctagacggctaggtgtcgttcttgggccaccgatctacgtgtggttggccaagagaagtttgtgaaggccggatctcgcctccgcaagaaaagagatacccttagtggaaggaggagtgcatttgtgcaacctcacgaggatagggttgaaaaagacccggctctttgcgagcccctcaacagagactagaatcccctcaaggatttgaactccgggaaatacattggcgcgtaaacctcggtgatatgctcactctctttaccttcttgtaccattgctttgtgctatgctaatattgttattggtcgagctcacctctttgcttgtggattgaatctagagctcttaggttgttctcttgtttgtattgttgttgtgcaggtcagatagtctgatctcagttcagactatctgatcacataggactatccgacctgatatcagacaatccgatcctgttttgttttagctttcgcatttatttaaaaaatcgcctattcacccccctctaggcgacatcaagatcatttcatataggaaaaataaatcctatataggattataatcctaaaaaaatacaaaatacctatacttttcttttaaatcaaagagcctaaatgtcttgtaaaatacacttgcagaattatgtttggcaaaattttgattttttttctttggtttatgcaaaattggtcctaaaattaaggggcaattacttatttttagtaattgaccctgtttcgatacctaactaccaaattaaccctaattaaccctacttttttgaagtttgcttatttgacccttcttttcaaaaacgaatgtactatctgaccctaatccgttaaggtgagttaacggtgttaagctatggacaaattatctcttttgtccttgcttatttgaccatgttatcaattttgaagaattgaggtgaacaattcaatttgataaatttgatatcaattttgacagattgttgacacaattatagaagatttttaaaaaatttcaacagcatattatcgtattttgtgatccaaaattgcatttaagtaagcatatacacagttaaagtcaaatacaacaacaaattcatgtccaacaaattcaaggaagaatatacatagttaaagtcaaaaccaacaaccaaattcatgtccaacaaattcaaggaagcatatacacagttgtagctgaatccgcgctcccaccaccaccgcgcacaccagcaaccgccgacatcccgctgccaccatgtgccacagcagaagccacctcccaccgccaccatgcacagcagcagcagtcgagtcccgtcgccgccgcgctcagtagcagccacggccgcctcccaccgccgccacgcgcagcagcagtagccgagttccgccgccacgcgcagcagcagccgagtcccgccgctgccgcatcagcagcagccgcggctgcctcccaccaccaccacactcagcagcagccgcggccaagtcctgccgccgccccgctcagcagtagcctcccaccgctaccccgcgaagcagccgcaactgactcccaccgccgccatacgcaaccaccgtctgcgcggatcccctacctccctccacggcctgccaccgtcgccggtgctccctccctccacagccggcaccgcagcagatccatgcccctccctccctccacggtccgccgctgccaccggtgctccctccctctaccaaccggtgccaccgcttactaccgtgcgttgccgccgccactcgccgggggaaagagagaagggatacgagagagagagaatgatatgggatgggatacacagagatgtggataaggttggagggtatttcggtcactacgaaaatttattatatttatttttttaaaaaaatgattcttaacggtgttgtagaagcagggtcagacggggtgtttgttttcaaaaatcagggttaaatagtagggtcaatttgatagatagatttcataatagggttaaataagcaattgcctctcaaattaaaatttaaaacccaacaaattgtaaacatactgcctcaccagtcacaaattgtaaacatactaccacctcagcttgctaggcgtattatattagctggaatcgaactcttccacgaaacgaaacctccaaagtttttatacacacgccaaagcaaccatccgattacagtttacagattttaatttcgaaggagagagaaaaaaaaaagaagggagagctcgcagtcgcagcgccggcggagggagaagacacggcggcgatggcggcgcgggcggaggcggcggcggcggcgccgcggccgctgcaggcggcggcgatcggcgtctgcgcggagacgggcttctgggacgcgctccgccgcctcaagctggacgtcctcggcaccgacgactcccccatccccatcaccggtgcgaacccctcctcctcctcccctacctttgcttttgttgttcttagttccgatgttttcttccccccgaaaacctgccgtctcgagcggggaacgggaagcgtgcgtatccccgcgtctcccaggcttcccccatggaattcggacgcggtggtggttcgtcggagcgattgttaagagccgtattgtttgcttatgggtggcgatgccgagtgtggatgcttgtagattaggggtttcgctcgcctgagttggtggtttgtgagcggaatattgtttagggagaggttgcggcgatacgaggttttcctgaatgccacattgagttggtctccgtgcgggagttcatgattttgtcgtcgtaatgggtgtatagtaatttggattttagaacttcttctgttgtttaatgatcaatttctagcccgaagccctactgtttgttgtcattactgattgctctttctgcaatattgctgttagcacccaaacagtgatgtatttcagattgtctgttgagaatcctaagagaagtactagcaattagcaaatataattcaaattttgctaggtcattttggttttttagtttggtcgtccatgtgttgccgtgtgaatggttttttcatggtttgatttctcaatcaactgaacaagtttgctgaactttattgctaggttattatactccacgccaatatgagaaaattgcaagcctctttaggatatgcccagaatcgatactgccaccttctgccaattcctttggcgataggaacaattgtccagtcccagggaccctactaaacactaataacatgagaggattccaaaacttggacagagcacttctactgaaagctgaagcaaagaaggtacatgcttgacatggaattttgctagcattaccactaacactactagtttcttaaaaaaaaattaaagcatgtaatatgtgttgcagatcttgcatgatattaaatctggcaaagtagaagagaatcctgctttgctactaaggttccttgtgatatcatttgctgatctgaagaattggaaagtatattacaatgtcgcattcccctcgttgatttttgactccaagataactttgctcagcttgaaacttgcctcacaagtgcttaagcaagaagaggtcatgttcctttgaaccttatagaattacagttgacaaaagatttttcttgttttaccatttccttgttggcactaaagattgttctatttctgcaggcaacatccttgtctaatgcatttactgagtggcgtaaatcaagtgaaacaacaggtttgagatgaatacctaattgggattgttttacttggttatgtcacttgatgcctaaactgtattatattgaaatttctgcagttgttccattctttctgatcaatatatccccagattcatctgctactataagacagctgaaggattggaaagcttgccagggcaatggccagaaggtctgttttgtgcaatacattttgtcatttcatgttttttaccagatgagttctgacaagtgatttagaagactccttatttacctatcattcttcatgcatacctttaatttcatgtgctaatggttgaatttgctgatgcagttgctattcggattttatgatcatggtaatcgaggttttcctggatgggctcttagaaattatattgcattcgtgagcctgcgttggaagattgagaaagttcattttttctgctaccgagaaaaacgaggacgtcctgacatacagcagtcccttgtcggcgaagcatcatttccggcacctcatggtaatttcgtacatctgagaaaaaaaaatagggggaggggggatcctatcaaaataactagtaattttggaagcttttaaagctgacactggttatgctttgtaatagcaggctgggatgaacctgattatgtgcctgaagcaattggatgggaaggagaaacggccgggaaggaatcgaaagagatgaaaccgaaagaaattgatctttcttcaattaatccagcaaggtagattaacatttttttctgggatttggaaataatcagtaattgattgaattacctttgattgctttaataagcacagtcaagatgaagaaaaacagctgatgcacttgaagcttatgggatggcgccacttccctgtgaatcttgacaagttagctggggtccgttgtcttttgttgggtgctggaactcttggatgtgaagtcgcacgcctacttatggttaatgcttttagctgacacaagatttatgttccatttttatggttaatcataacagggcatttaaatgtgcgtatcttttctgctgttaatttatgggtttttttttcagacctggggtgttcggaaactaacagtggttgatgatggttgcgtttccatgtctgatctagtcaaacaatccctctacacggataaggattgtggtgtcccaagagtgactgcaatagtcccacatctaaaagaaagatgttctgcggtggtgagtctttgcagccttatcttaaaatctatgttgtttacatatttctctcatcggtaacaattgctatcatgcaggaagttgaaggcatccaaatgggaataccaaagcttgagtataatatttctgccagcaaaatatcaagtattactgatgattgcaagcgtctccaaacattagttgattccaatgatgtggtcttcttgttgaatgaaacatgggagggaatgtggcttccaactcttttatgtgcagacaaaaacaaggtaaatcgtagacaaccactctgtaattaaggaccttttgagtagttctcataagagagaagtgaatatcatgcacttttaggagatcaggcttgagtggcaaatctgtcaatagattgaccatgcaactcagtttagtattcttcgccttccatttttcatcacatagagtgcccttgggagttggaactaataatgagttggctccgctgcagattgccattactgtgttgttaggatatgacaattaccttgtcatgcgacatggtgctggtccaggaacaaaaagtggaggtatggatgaagggattgctcagatagagaatttgtccacacaagacgctctcggtcggcaaagattgggctgctgtttctgcagtgatactacttcccttgttaatgtataactgtggaaaattactttatttgtgttttatcgcgtgattttgcatttatgacataattttggtatgcttaatcttattctttgcagtcagatcataatggagcactggatcagcagtcggcagtaatattacctgggctgacctcagttgcatctggcaaagcagtggagctctttgctaggatgttacatcatccagatgagtaagtatacctacatgaaagataggtgtaaagtgcaacatacatttgtatagcattgtctgtgatagttgaatagttggttgacctagtacatgagaacataaaaacaagatgatgccttatagaattttacttcttgtagaattcatgctccaggagatattgctggtacagacactgagcatcagcttggtctattgccacatcagatgcaaggatcgctctcaaagtgtgtcttgtcaactgtgctgtgcaattcctcaagcaactgtattgcatgttccaatgctgtacgtaaagtagaacatatgcaggactaaattctcataattctatttattctaatgtttctgcatgctattacaggttttatcagaatatagaagaagaggatttgattttgtaacgcaggccatcacctgtccaacatatttgaaagaccttacaggcatatctgatttgaaaaaaccatttgcttctaaaatttcagccagcattcctgtttctaaaacttcggccagcattcctgtaaacctagagaagctgtccagtgcccgatgtctacttttaggtgctggaacacttggatgtgatgttgctcgtattcttatggttagtctttgtccagttctacttttatgttgaactacgaacagacttaacaaaacatttctttgactatggtggaaacaaaacttttcaggactgtggtgtgcggaaactaacagtagttgacagtggtcgagttgttgtgtcgaatttggcaagacagtcactctacacatctgatgatcgtgacagcccaaaagcatcagcaatactagggcgtttgaaagagagatgtccttcagtggtaaatttcaattctgttccttcaaagcaatcttcattttctcacattcttgctccctttcatgtctgagcatatttcccttgtaggatgcaaaaggaattaaaatggaaataccaatgccaggccatcctgtatcacctaatgaagcagtcagtgtgcttgaagattgcaaacgcctccaggagttggtatcttctcatgatgctgtcttcttgctgaccgacacaagggaaagtaggtggcttccaacacttctctgcgcaaatgaaaacaaggtaattcttgtgtgtattcttcactaatgtagacttgtgaagtgttacatgataatatccctcgcaccgcagattgctattactgcagcattaggatatgacagttaccttgtcatgcgacatggggctggtccaggcacgaattgtggaagtccagatgtggttgctgctgctgatacactgtctgcagaagatgttcttggtcgtcagagactaggatgttatttctgcaatgacgtcgttgctcctgttgatgtaatgttgcctaaactttggaaattatactctttttacttaacatgctacattctgcaactgtcacatcattttccttaaccatcttgtgatgtagtccgtgtccaaccgaacactggatcaacaatgtacagtaacacggcctggattgtcctccattacatctggctgtgcggcagacctcttcacaagaatgttacatcatccagatgggtaagtgactggatacctgaacataatatgaacttgcgcgatatcatttccagggaaaatgttggcggcatttggtgattgaaaaaccaactgcatttaattgatctttactacattctgcaggatccatgctccaggagagattgctggcacaagcagtgagggtccacttggtctattgccgcatcagatacgaggatcactctcgcagtacaacttactaaccctattgggctattcctcgagcaattgtaccgcatgttccaatgcagtaagtaaacatttatgattgcatgatttggaacagtttctttagaacttctttcttgtattgtattgcttcttcctcatgtgatttggtgcaaaatattgcaggtgttgtctgaataccataggagagggatggattttgtgatgcaggtgatcaacgaaccaacctatctggaagacctcaccggccttactgacttgatgaaatcagcggcctattctcaggtcgagtggattgatgaagttgacgatgacgacgagatggatatatgacgtgttgcatgttttttttttcatgatgttaacacgtgtaaatacaattcatacgcatacttagtccatcagacgatgagaatggcgttcttgaatctcgaatagcctcttcttaaccaactagcaaatcacagtgtaaacattaccaatctctggtgcaacaaacaattgtaacctaggggaaaaaaatgtacactttgctaatattcaatgctaatgttgttcccattctcaattccaaaagagaacgttgtccccgtgttaaatcgcatcgttttctatgtttctacgcttgctggagctgcaccgtcgacggctgcatgcgcctcgttgtgccgcaagtactcggcgaggcagaacccgaataacgcagaaactcccgcgacgtcggcgcccatgaccagcaccccggcgacgggggcgacggcgacggcgagcagcgcggccaggaagccggcgccgaagacgagcgggaacgcgaacacgagcgcctccacgggcacggcggcgccggcgccggccgcgaggttctgcgtgacgtggtacgcccagaggtagagcaggaggcagagcacggcggccagctccgacgcgagccacagcggcgagccgccgtagctcagcagcatgagcgccatcgtcgccgccaggagcagcgacagcgagcacacgaaggcgtgcgcgttcgcgtgcgtcctctgcttcttcctctcttccgcctcctccttgctccggtcgccgtaggcgatgccatcgccgtcgccggccagctgctgcttctccttctcctccatctcctatacaggttggcttggctcgagttgtgcccgtgcacgagctccttttattgctccgagtccggagctgagctcgagtcggattgcatcccgacttactctacggattcggtggcaaaaataactttgaagctttcagcagaagaactggacagcaacagcaaaagaggaggtatattgtgtatccatctgttcttttatagattataacaagatagttactagctctctgtactgtacagcaactcatgtgccggcagaagtcacaactgatggaacatggaaaatcaaaggagcaatttgagtaacatgtggtatgtacaagatacatgattcacccagctgcctgaaagtctccgaagtcgtcgtccacgctctcttgaggggccttctctgctgcagttggttgctcctgaggagcagcttctgctttcggtggtggggaagaagcgacgttatccgcggctggttgttcatgagaagaaggaaattctgctttgaaaggagtggtatcagctccagtatcagcagctggttggtcttgggaaggaaactccgctttgaacggagaagccgcgatgccagaatctgtaggagagaccggtgatggcggaggtggagggagcttgagggaaactggggcctccttggagttggctttttcgttaaatgagagcttgttgaggccttgctcaaaaaatgcagattttatctttgcgccggactctttctgcacagaacaaaagcaaacccaaacattaaggagatgttgcacaagaagcatataactacaaaaatcagaagagacgtcaagaggttatttctcaaatgatgtgccaaatctggcgtaggggcagtgcaaatatccttcaattaagttcaataaggctaagatggatccctacgtaagagcagctcaaactgatatatctacaaatatgcagttttatttaacacattacatggaaaatagtctagagagcaaaataatctaatatgaatattactgagaaatagtaggatcctgtaaaccattatacggttagcttcatttcaacaagacaagaaacttattaaaacaagtttgtttgaatacaaaagtacttaagacacgttcatcacacatgccgtataagggttgatatcttcgagccatgaataggcattgtcatatgcatggtaaacctggttgtcatgatatattttttttacaactgataattctgagaattggcacagataatattttcatcttaataaatttcacggtttgacaatttatgcgtgtcaatgcttggagtggacacaaaaattaacttcataataattatgtttgtgaaaccaaatgttgaactacttcctactcaatatataaggcatcttatgagtgaatacacagattaagaatttaaaatggtaatacaatcaagataataagaacagacaactatcgttcttaaatacctagggaattggagaaagaataaggccaaacatcagaaaatcccagccagaaaaaactggacctggtacctgggccaggctgttctggccaatgggaccgttaaaatagctgacaagggaaaatcccggttcaaccgccggtttcttagcccaccagaccaacctaggcaggtaacgagccattcaaaatttgcaaaagtagttagtgacaactggaattcaaactcaaaagatgttgctaattgcttgcatgggcaaaccaactcggctaacaccacttgcttgtttctactagctgttaacacgcctacaatagcacaagaagtagtacgctcatgtggtctgagacccgttgaccaagcgattcaacctcttacttactgatccaagtcctcggacaagtcaatgtctggtctggatctaataacattgtgtgtaattactttagcaaccaagcagctctagtggctttaggtaggatgctaatactctagtactgagctaataaaacaacaattacatcatgaaggcctacagaaacaatttcacatcaccaatctctagtttgaccaccaaaatatgacacatgaaaacttacattttttagctgcaaaaccaaagtttccccttctttgaggctgtaatccactgatgatgatttctcatagtgttgtaccatctcttcagcagtctttttcttgtttagatatctttgatgatgtaagaaataacaaatcataccggaaaatggtccgttataaaaagaacttattggataaaaatattaccatacacaactacaactgcaaaaaggaaatacaaattgaattcattgtgaccaaaaacagaaacatttcatctgaccgaccaaaagaaacataattggcaagcaaaaaagtacatcctatgaattgattgtatgggtagaggatttttttgggttcatttagacctttttaataataaaatggttgaacattcaaaataataatctcacacgtacgcgtgttaacaggaaatcaatgtcatgttagaccattttaatgatactgcaattgaatcaaattcacatacagagtccccagccattgagtgattacatgggagaacattcgaatacatatcatgcttcaagtaatgaacacaaggatacttcatatggtcgtgcagagcagcttggaaatcatatgcttgaggtctttcacggaagcctaaaccaataaaggcatggcgctgacgtccatctgaaaatatgtggtaagatttttttaataacttaatatatttctacgtatggatcaatgcgataactgataagccacttcaaacactatgcttaccacctcaacactatgatcaccaactcaatggaaaaaacattaagacacaagaaagtcataaaaatcatgagaagatcagcttatcacctatattctcttcaacacggagtacaaaatatctgcaaaaacaatgttggagtagcaacaatcatttcaggttatctttatacagtctctacatagtaacttatgcagaatagaaacactaaggacaaaagtcaccacaggattaaaccaccatgtggcagggaaaaaatgcagacctgctgctatcaataacaggttccaccggatgtggttcgtcttctctgaggaatgccctagcgtacagctcccctaaaaatgtgtccgaggaatcaacattggtgatcacacaagcactgaccaacggcactaccgtgattttttttgtacctgtgttcttatcttccagtttgatgatgcactcttctcctttgctgacaaccttgagagtcccttcccaagcccacttgttgacgttccattcatcagccctggttgatacccacggtttaaaaaatgtgactcaggctctcggctcataaggtcataccaaaatcagaacagaacaagtacaacaatggagtgagctaatccaagattgccgcattcgatagggccaatggaacgagagttctcgaaacaggacgacctatagctaattcagattgttatctttgatctgtctagcccctcacacagtcaaaccttcaaactacatagccttgctcccgcggacaaattgaaatgtgaatcctactaagcccatttctatcgggatttttttgatgaaccaagactagtatatacctgtaggaggcggctgtcttcctgggaggtatctgcgtaaagagagagaggattaaaaaaaaaacattagcacgttcacgcacacatagtgctcgacgaattgcgcgcccccaagagaacacaagcacgggggcacgaagcgggtcactgactacacacaccctaaacagtcaaacaaaccggaggaagaacaaggcggcgaggggggggggcgcacggggcgtaccaggtagacgtagcactcagcgacctggaacagcacgagctccaccgcctcctcggcctccgccttcgcctgcgactgctcgccggtgctcgacatggaaccggcgccggatcttaccgaggaggggagcggccggggaaaggaggggaggggggaaggctggccggatccggcggcggtgggcgtccccgaatgcggcgacgcggaggcgcgtgagagaggaatggatttcttcttgggggggagagagactgagagagagagagagagagagagagagagagcggtgggagaggaggaaggtggggaagggaagtgccgaagaggggagaggtttgcgtcgggttcggggtcggccacgcctgtttggtcttgggtttaggtgcggtgttgcggtcgtgttcggctgacccgatcgatcggtgttgcttccggtttgggtttcattccacgtatccggtcggtgtggcgatcagggtcacggtatataccctttgcttagattcggctcaatttgaaagattagagatgtccggctccattggcttattccgagaataaaccatacaatatatctacaaataaaaaataatttgtgaataaaatttatatatatatatatatgctcttgacgatctaaaagcaacgactgaaaaataaactatgataaaaaaaacccttataatcaactctaaatttaaggttgaaaaaacaaattttgtcttataagcataagcgaaaatatgatcgcattgcccatgacttgtttagaatgtgagattttatagcggtacaactcttcagtttatagcgggttaataccgcacgataataagaaattactcttttataatactgtaaatgatcgttttccatttgtcgtaaagtttattgacacctaaaatgctatcaagttggttcgcaccgagctcgatcatcacataccatcaatctggtgctcaatcctgataactatagtgcaagctttgaccgcttcactcaagctccacactcacacacatgagttctgtcggtccgcactcaccactcgagctctatggtcatgtggccggtctttagatctgctaatcgatttcccctaagccctattattgtgctcaagcttcatggctttgtgcgcgagcatcactgcctagccctagacttgagttctgcaatccaacataagctttgaaactacgtctgtatgctttgttggtctcacatcttatgtccggtagccccatccccaagttttgccaaccttgaaaatgggctctactacacgctgagagattggtgagcaattggcgggagaacgaggaagaaagatatatccgtccttagttgtataagtgttacttgtgacaaaaagaagtggacatcttctctatttttttttacattttagagtcaataaacttttagataaacagagatgatcctcaactatattatggcataaaatcaattttctccttacagcttattaactgtaaagattataaaatttaaaacattattgttagttcattattagaaaagaaaaggactgaactaccccctaactatagggaccacacgatttaccccacaaaaccacaaaaccagacacccccaaattttcataccggacagatgacatcccccaacctgatttgatctagagcggttttggtcctactcctacgtgatgcgcatgtggcaatctcgtcagcataaaaagtttaaagaacgatgagccagttagagggtaattaggactttttcttattaaaaaaatgaaaagaacattattagtaacaaaaagagagtcgagatttatcagtgtcagcgacgatacgagtcctaaaatcaggtaaaacgtcagagcgcataaactttgcaaccttaaaatatagccaaatgttgtgtgcacagtgcaccgttgtactactttcttggtgcttgagatttaatctatatatagtagtcaaatctactacaaatatgcttttggaatgctttcctcgcaccttcaggagcaactactcttggtttcttcaaaaccgttgcagtcatggatctagcttgctatcttgttgggaagagaaagatttgattgccttttatagtttcatagttagtcctagacgaatttcaagagcttatgttaatttgaccatattcaagagggtcttttgcaaaagtgcttgcactcgcagttaactcccctctagggataaacttcatatgtgtctaattatctatcaatatgtatctaattatctatcaataaaaatgcatgggttttttgtaaaaagaaagtttactaacccaatcatggatgaagtttctggtaatgtccacccggctaccagtcctatatcaaaggtcacgcaaaagcaaccatggaaacatacacggggaacttgtaaagcgtacacaagaccatcaagaagtgtaaaactcaacctgtggattatccgaattaatatgtcaattgtccgaggtgacaaagggacaaaagcacaaagcattgttcttgaaccaagaacagtgcaaaagtaaaactcaaaatctcaaaaactaagattttgcaccagccgggaatcgaacccgggtctgtaccgtggcagggtactattctaccactagaccactggtgcctcttgttgtaaatttagaaaacaaagttatataatcaggatagtaaacgagattcagaaacgctgtggtcttgctgttgtagttccacacaggctacttgggtctattcagtcagcaaggtaaatcatggggagaatatcatcgacatgtttgatctgaaaactacttgagcatatgttccttattgttttaagaaattttgttaaggagtacgatggaacaggcaaatactaagtttcagtaactgtatccttggtttcattaatatagttgctgctcaccttggtcgtgatagtgtttaggtgcaagtagaaaattgaaccaccgttttcttgaaacgtcttctttttttttaatgtaagtcgacctgtaaatcccaacctaacatcctggttccctagttaacaattgccacaattctcacttttttaaagaatagtcacaattctcacttccaatgcttaatctttcaatcccaaacaaagtttctttactgcaaagtagaagagttgaaaattttcaattaatatctaccctattttcataacgtctcgtatcttatcgatattttgcctaggatttacaacaccccatagttggtggccatctttctaagttctatgcacgtgattaaatttatactttaaaacatactacgttctagagtcttcagaaaagacaagtaaaacaaccatagaaaaactccactacttccatgtatgacaaaccacaataaaatataatactatttattttactaacattaatatcaatgtactattagggacgaagctatgaatgcgagcatccaagtttgaactacggtgcatatacgagaaaatagataaactaaaacttaaaaaaaattataccgattttctggagttctcatcttctcgtatgttccacccagtcactaaaaaaaatttgagcctttttcaatatgaaattcagataaacaaactttataagtcaaataagggtaagagcaagtttaacagtatagccaactactagctccaattcatatatagccaatctaatagcttattcatacaatagttacatactacactattaatatctggtctcatctgtcatatactcactgcatcttggagtccatgctacagctggctataaatctgtagcccgctgcttttctctcttctcatttattttcttaaaatatatttatttacagctagcttatagtctgctattgtacttgctataactataattccttttttagacaagtcattgacgcgtccggcttggacaccacggatgcccgtgtccagaaatcctgcggctgccggcctgacccgataaaacccctcgaccgatcccaccccaacccaacccttgtcgaatccgaatccttcccccc

SEQ ID NO: 9659 - DNA, 47010 bp, Oryza sativa
  unsure (1)..(47010): unsure at all n locations
cccgtggtacggcacaggccagcaggcggcgtctcccctctctccctccctcgcagatctagccggaggaggaagggggaaggccgacggcggcgacgacggcgtgaagcagcggcggcggcggctcccctcccctcccctctcagatccggccgggggaggggggcggcggcggtgcggcgatttttttttcgttcgtttttttgcattttggcaggcgggctgttgcctcgactgcgaaaatcatcgattttcacagtcgttgtattgcaggcggacctctctctcacctgcgaaaataagttttggccgcttgggaaaattggttttctagtagtgccacacatacggtcccaaccccgtaacgacgaagagaatacatatgtatggctataatatactgctctccgtgatcggaaccacgcaacccacgaatatgaattatatgattgagagtggatgaatcttgggccaaatctttgaccagtttcagagatcacacgaaggaaagaatatattgaaaccaatccaatatggatgacgaatccgattggaacggcaggaaagattggagccacggctattgagtattgaagctcgatcagtacgtcccctggttgtgaccttccttagataagagtgatatggggtctgtttgggggagcttataagatttgagacgcaactagttggtagccaatttctgagaatctgtaaaagctgggttttccagatagacccatgatatggtagcactgaactagtaggcagacgcacctggtttctactactactacaactacccaacatatcaacttgctttgtgctgatatcgtcgtgggcatacgggcgtatctaatatcctgatgacccagtggctaggcaggggatcaacgccgtcacacgcacgctacctgctttgctcaacggatccatccagacatcctgtgctgttaattccgcatgagagtgatctacatcgcgtgatatggggtaatttcttcctcctaaaatacaaaagagattttaactgggtagtatattttgaagtgtaaccataggatatatggtattgttttttatagaatcgagcaaagttctttcattcgccttaaaatgttttgattgataacattttgttagttttagggtgagtacgggacggcagttcattcgggatttgtatcccgtttgaatgggatgatacctctgagatatcgcccgatacgtagttaggggtggatagcgagccggctcgactcggctcggtcaagctcgttaggataacgagctggctcggctcggctcgtttgaaagctcgagctagctcgttaggctcgcgagccaacccatccaaaccatccagccggcagaagaggagggacctggcggctggcgatggtggtggtgggcggtggcttgctggcgcggcacgggcggagccctaggctgtgcgggtgcggtggcgaggtggggaggaagatgcggacggaaagggaggagttggggtcgacttggaggtccttggaggcgacgccgtggagaaggccacgcggcaggagaccccgaacgccgccgcgtcgtcttctcctcccgtcgccgcggcgagcgactgaagcttgtggtggaggagcttgaagcaactggagcttgtgcccgaaacgccgtcgcgtcgtcttcccctcccgccgcagatcacccagctccgtcagcgcagtgaggcggcggcagtggccctagcggctggtggtggcgaactggcgatgtgtcgtgtggtgcggccgtgccacgtgcggtggatgaggagtgaggagtaggaccgaggaggactagggttttgcttgcacttttgctgttgtctatttgtcttgggcttgggtctttcttttgtattgggctgggtctttgcggatgtctgatggagtcctagctcgttaaagctcgcgagctagctcgagctggttctttatctctaacgagctaaaatgccagctcaactcgttaggaaattcaaacgagccgagccgagcatgtcacgagtcgagcgagctaacgagccacgagctttctatccatccctatacgtggtaggtatcagctgatatcttgttcggacgggaaggtattacatgatacctatttggtatcggctaatacccaggtatcatcccgttcgaacgggataccgttctgtagcatttccataaatttaaaaataaatttatttgatttttaggaaacttatatagaaaacttttgcatgcatgaattgtattgtttaatgtagattacaaaacgtgctcatggagaataacaaatcaagtagccgtttcgagttgctattagaacttaaccgtagtgttgagctagtagtagatatactgcccgttcttaaattttttagatgatcaagtggattttggacaattgcatataacaaatatattatatattataaataacaagtagcgtaaaaaagttacctaaagcaacattgatgaagaaagtaaaaaagaaacgtcatttagaacggagttgcaaaaaaagatggcggcatattattgcgaaaaaaaatatatgtcggtttcttgacattctatagcccgggattcgtgctataaaacaatagtgaagcagcagcgagcggggaatgaaacccacgaccttaaaccatgtgtaccagggcagccagctcaatttttaacttacatacaatttacttttttttccagataatggaatataatcccggcctttgcttaaatagctacagccaattattacaccaattcaacaaaaactcatacctaaataaacaaaagcacacacaaactaataaaaactcacacaacataaaaaaatcacaaaaattttgaataattctatttgtgaatctacatccaaagttagcgagtagctgataaccattgacttaagattacgacatgcagctttcactgacttgatttcttcaacacactttagtagttgaacccaacatcagagctagtatgttgccttgaaaagaacctacatacaggatatagatggtgatttataaaaaccatatcatttctatacaatcatatagccctatttatagcagatgctccaacatacaattttacatataatgtgatgtaactacactatatttttactataattatatttggcatacatatttttggatatttccaatttaaagcatgacatatataaatgataatctatgaagtaaccacaagctaaaaaagaaaggtctgacgggatgatcacttgatcagctttctgtgtgctctcgtcaaagcatgataagcatatctcagaataatcagtcttttctctatgcgatagctacatcctctagagcctacgatctactagcttgttgaaaatatcaaacctcacaatcgaaggcagctgggtttcaagttaccatgggcgcttgtttggagacaaattgctaccgataatgcggcttgatgacactttgaataatggaacactgacagttatcttattctgtcatgcatatcacactaatcacttacacgtcaggagatatatataactggtctactggcttatattgtcttaccacttattgatgctgcgagctgaagctggtgactcggatacgccgtacgtagcaagcggttatccctccatgtgggctgaaacacgttttaatttgtatgacttttaaccttctaaattatttaaaaccttataaaaaattgtatgagctttctaccactactgcacaaacgattttcttggacagctacccttttaaattgcgtgcggacggtaactcggtccacacaggaaaatcggctcgcgaaaatgagccgattttcctatgcggctctcttaataggtccgcacaggaactttaaaaatttccctttttctctcctctcctttatccgctcagctaagtcccctcactcacgtgcgttcctctctctcacgcctcagtcctctctctctctcatgcttcctctcctctcctcactcctcactcctctctcctcggcggcggaccacggtgacgacgacgcgtggcgcggaggccgacaggaggcgggcagcacggaagccgggagcggcgacagcgacggcggcgcgcgacggcctcttccacgcggcggcagtggaggcgtgggatccgcgggcggcggctgtccccgcacggatccggcagccggccaccctccccccgcgcgggatccggctcccctcccttccccttccttccctccccagatccagtggagggtaggggcgttggcggcgggcggtgggcggcgcggaggccgggagcggcggcgccgatgggggtcttcagccggcgtcggcaacgggagcaggcggcggatccggcgtctgggagaccgccggcgacgggagtgggcggcggcagcgggcctcggctagggcggcggcggcggttggatttggggttttggttttgatttttcttttgtttcatctttttattttcccatgcaagcggctgcccgcgtgcgggtgaggtacccgcatgcaaaaatcgcgattttcgcagacccttcattacagacgggcgaaacaaccgcacgtgaaaatgagtttcgaccgcacggaaaaatagttagtgtagtagtgtactatattgtttcctttacgaaacacaatacagacgcatacatcatataaatgtgtgtacactcacccatatataacacgcgcacacacatctgttgacattttagatcacgactacggtatttgcatgatatggggatcattggtaacatggtatatgcgagattgagataaaagaggcagagacaaggatttttatacaacttcgggccccttattcatcagaatcaggtaatagccctacttctattggccgaagccggtgttgctcttattcatcataatcaaacaagtacagcatttaggataacctatttagtcatcgttgacttggcggcatggaaaaccaacacgtagttgacgacggggtagtctttctccttgaatatgtactcgtcgagatcagagatagtgctaaattcctcttattggcctctgtaggcgccagattgggtatatctaggattatctctaatatcaatatttggaggcgtgcattggtgtccacgtcccctctcctcttatgaggtcttgtatttatacccatagatgtacccttgtccaagtagaactagggagaacaatatggatataatccgagtagtccttatagtttccaatagaactctttttgtaattttttatccggaactccttctatataagagatatgattccgtataagacttggtatatggtggtctcgccgagtttagtcgattactattgggtatgtgtgtatccataaccctgataacatcctacccctataaatgcctccaagaaccaggccctacgaacgcctacacgtacaccttaactttatgaggacatgccaatatattttgagattcatggagtcgccatggctgtaccttaaaaaatatagcagacatatcttgagattcgagagacattcgaggactagactgacataccttgagattcacgaagtcactatagataccttgttatcgacagatatatttacaactagtggtaaatgtaaacatccttgtcaagtctaaaatttaaatcatgatagcaggtttcatcatcagaaatctaacaagttgacactctcttgtagcaactattttaattccctttactttatgaattagtttgttaacaaagggtggggcatttattcaagtgaaatggccggtggttagtgaaagataaaaggatttttataatgactatacaaagttaattaaattaattaatataaacgagattagtctacctagaaaccttttaaaaaactgtttgttttcatacacgataacgtggaaaacatacttagggcttgctcagattgatgtcatttcaaatcatatcgttttttttagagttgtcaaatatgttcatccattattttctggccaaactttaataaatagataagaaatcctgctaaaattttagcaatttggcaatattgccaaaattttgtaaagtttattttagctacaatctgaacaaccacttagaaatcaatgaaactactcttttttttatcatatttcatatttgacctattttttttaaaaaaatcaacgattataacacatgggttcaaatttcttgaatggtggggaagcatcagtggtagttcaataattaagaatgtatgatccaaactaaaattaatatgtgattctacttcttatacagctactatataacgttttgaagtcctcactatcaacatgtgagataggcgcacaagtagggacggatctaaaaaaaatagtagtgaggctgaataaactacatcaatataaaccgaacctccagtcccatatcctatgaatctatggaaaaaaatttaatgggagcttaggaggatctccactgtcccgaggacggtagtccgcccccattgtgaatccgccgctgcgcacgaggaggtcaacataacttatttctttacaagaaaaaagaattgcaaaaggagtgagcaatgatttgtggcccgttgtccacgttgctgccgagtgtgaaaacaaaaccacaggggtagtacaatataaacaacacgtcagagatcagacacccacctctccacctccctcctctcctctcctatcgtccccacgcgcactccaacttgcgggcgatttgttttcccccgatttcctctcgtccgatccctccccatcacgaggccggagcgccaccccacactgcctccgctgctcccaaggtatccctcccctgccctgccctgccccctccacctccgccggatttctcagccggcgtagagcggagatccatcagtggtggctcggatttgttttttttttcctttttgggtggtgatttgactccaactttctcggaccgtgtcgagagctttgctccgatcttctttttgaatcgctttgggcgatctaagcgtagactgttctctctgtctagtccgcccattttgtttcggattggtttggttcgtgcctgcgtggtggtggtggtgggggtaggtgtggctatttgtttccaggagaattgggggtggttcggctgaatccccaagctctatgataggtggcgcccctgactggatgtccactaattcgcagtattcggatgcccgctaatttgttcgatggaatcacacaatgggtttttttacccactatcatgttgcttgttttggcacctggcaacgtttgttcttatcccttctgatttgtagactagagatccaaacattgtggttggtcagtggtcaccacacaaatatcaaagccctgtttttcaactcctccttgatcggtacagatttatgtctcctgctatttattaccaatacaaaaactacttcagtgattgtatttctctttgaactggtattacttcgggttaataagaagtatcatgtaatttttaggaattccaattcctgcttgataagaatcagtgattgtgctaaggctccagtgttgactgcaggtgattaaaaacacagaaaatggatggaactgctggctaacagtcgtcaaaatttatatggccataggtaatgcatatcgctggcatatttgtgcttgttaattatgatttttttggcttatttagcaaatatattgatatgtttcccattgtttctgtagataattgtgcgatgtgtgtgggaggtaaaggtttctacctcaacagtaaggagacttccgacccttcaaggaaaaaccattccaaagtctctcagtatcggatggcatttgatgcaccaagaattactaaaacagagacatcaaagttgaagaacctcatttcagcatcattcaaacccttgtctcttaccatccccataggcgacggtttccatgaattgtttcctgtgggtcactgtcatttatagcagataaagtcttatagataagccaaagtttttcatttctgttggctaacaaggggaggcaaaaattgagttgcgctctcaagagtgtacaatgcttacacttgttggcacaagagattcttttgctcagtcacaggcacaactttgtgctggcatgcagctcaaggctccaacaagggcgaaatattcccaaggctttatgcccataggagaatccgacgcatactgtgctctaatacctggcttacctgaagatctcgcaaagatatgtcttgctcttgttcctcggagccagttccctgttatgggttcagtgtccaagaggtggatgtcattcctcgagagtaaggaattcattgctgtaaggaaagaggttgggaagcttgaggagtgggtgtatgtcctgactgctgatgctggatcaaaggggtcccattgggaagttttggggtgttcagggcaaaagcacagccctcttccacccatgcctgggccaaccaaagctggttttggtgtggttgttctagatggaaagcttttcgttattgctggctatgctgctgatcatgggaaggagtgtgtttctgatgaggtttaccgatacgattcttgcctaaacaggtattgttggcttttcataggcatcaataagtctatgcgcagacaatagattttgctaatttaaagacaatcattgcaatttgcgaagactttaaggcttatattaacatgctccttgtaatctgaatacaaacagtacttatttacagaccatgaaatgttcaaatgcaggataataaccagggttttgatatttcgaaatattggactgacccatttgtgttatttgtaggtgggttgagctttctaagatgaatgtggctcgttgtgactttgcttgtgcagaggtcaacggtatgatatatgttgctggtgggtttggtcccaatggtgatagtttatctagtgttgaagtttatgacgcagaacagaataagtggacattgattgagagccttcgccgtccaaggtggggctgctttgcgtgcagctttgaaggcaaattgtatgtcatgggcggtcgttcgcgcttcacaattggtaacacgcgttttgttgacgtgtacaatcctaatgacaactcctggggtgaggtgaagaatggttgtgtaatggtcacagcccatgctgttcttgacaaaaagctcttctgcatcgagtggaagaaccagaggtcactcgcagtcttcaacccggctgataattcttggcagaaagtcccagtgccactcacaggtagttctagtactcgtttttgtttcggcatacatgatgggaagctgctgctgttctctctggatgaagagccctgctataagacactgatgtatgatcccgctgcaccaacgggatcagagtggttcacatctgagctcaagccaccaggattatgtctgtgcagtgtgaccatcagagcctgatgctttctggcttgtatcgccttaccatcatccttgtaggatgccatccgataccactatttactgcttacaatcagagttgaactctcatttccagtgtcgtttgctcaggtattttgatatcaaataatgctccagggtgcttatgctgcattcattcgattgcagcgttgtgccaggatgcactttgtttcatgtattttactgctagttgtagttcacatggttgttgtcgttgtactggacgatgaatagctgataggctgatatgcaactgtagtgtttgtggcgggcaaagaggctaattgtcagaaaagatttgtcagctcttgctgtatgtaaaccttgttgtctgaaacattgtcattcgctatttctgatgctctgtttttccatatgaaaagtgggttcttgcttctgtttgcttgaggaatccttggacctcatttgaacgccttctgcatatcctctagcctttgaggatccaaatgactaactttcaattttttccatgggctgcttgtaccattcacgcaagtttactgctagtggagttcaataaaaataagttaaatttctttctgcaaaaaacaaaaagaacacccttcaagtgtgcagctgcagagcgtacaatacaatgatactgtaccatctacactctttctgtttgaatgaaaggtattagctgcctttgagctgctttattagtgtataaatcaaaaacgacttctattttatgaatcagagtatctctttcttcccaaagaagaaccctatatataaatgtgacagcatcatgcgttcttcgtgaaagcagataaccacgggccacaccaatttcagtaggcggacggttgaccatttctagcttctcaggcactgtaaccacgggccacaccatttcagtgatgccgtcccaataatctggctaatcagttccccgtttgaacatcaaatttggcacttcataaattcatagtagctacgtttgttcattcatcaaatagtaatactacaagtctaccgtagaattttgtaggaattgcagtaccttagcggtatatatttttcaatgatcgatctggtactaactgtggtagttttaataagcatttcggtttcaaacgtttcgaatgttagacagcacagatttttaacatcaaaagaaagaatgctctctccgagttgacctgtgcttgacaatacagcagacagtaaaaaaaaggatagtactctctctgtttcacaatgtaagtcattctagtatttctcacgttcacattgatgctaataaatctagacatacatatatatatatatataatattcattagcatcaatataaatgtgggtagtgttagaatgattgtgtccccgaaaaaaaaaagacttacactatgaaacggagaaagtatatctgtaaaattggaaacctctggaacctccgggacaaacaggatgtcgaagtcaggtgaaccagaaaatttgcctgacaggtcgaagccaaaaacagaagcaatactgctcctcttctactctgcttcactatagtccattcagtattcctcttactctgcaagcgcgtgcaagcaagaagagaagaagaagaagaaggaaggtagcggcggccatgtctctcacgggatgcctccctcctcggccgccatgctcgatgaggaggagaaccagtggaggaggagcctctgtctctcctgtcgtggcgatggcgtccacggcagggtgcgctttgatccatttcattttcattttcctttctgtcgaccttgatctcgcctcgaattttgccgggtttgattaggctaaagggattaattaatttgctgcatgttcttcatcttgtatgttgaaaattgttgattgggagtttcacttcaaacaatttcggccattcgcccgtgctatagttgttgaactgcccccctgatctcgtcatctacattgtgtcatcctttgtttcgttctgaatttttcttgatcgtttttactggttgccttgcgcctttgttcgtcataggggcattggtcgtttttagcttcaagctgttctctctcttttctttttcctttttgcatgttttccttcttattgtttggttctgttcttttatattttcatgtgtacactagtaataatactggtcaattgcattatataaccaaaaaagttcttcacttcttcttatgcgcctttcctagataaaataaaatactgttcgcttgttctacctacttttagattataagactttttagcattatctatatttatatagatactaatgaatgtggataatgctagaaagtcttataatatgaaacgaatgaagtagtttgtttgattatgctagtttgtttgtcacagttcttctagtgttcaggacacccgcctgtagcatccgaaaagcatgaagtcctagagatacagttcagtaaagtgccactgccttcagactggcacaccttcctttaatttagttctagaaggggaaaaaaatagatttcacaattactgttgatttccacggccaatataaagtactacctctgtttcaagacaattgtatttctaccatttaaattttgttctaaaaaagttgtatttgtacaaaggtagaacccagccaattaatttgtgaatgctaatcaagtgagctaattgcttcggatcaccacattaaatatgtctgaaatttagttgaaatataattattttaggatgaaggtagtaaataaaatacagatggagtcagatgttcatatttagcctagtcatgccaatttaggtgataatttgaccagcttatcttacccaaaaaaaaaaaagtaaaaacgtgttactctctcatatagttccttttcactgcaagtgtaccccttcgtaaaaaaaaaccctaatcctagctacgaacctggacatatgcatatccagattcatagctaaggtttatctttttttttaacagagtagtatgcagccgtgctttgaagagagtacttgcttagcatctcaaccagggtttacgttaccaccggtaactgcgcggttaccgtgggggtacggtaatataaatgccacggttactgggcttaaattcaaataaatttaaaaaataaattttgcatggtttttcacggttaccgtggtaaccgtgcttaccgccgggacgcggtaaccccggactcagcagtttggaaaaccgtgatctcaacatgacaatgatttatttacagaaagattacctcgttgccatcatttctgtacgttctacttcgttttatatcatatgttgctttttacttttctctagtcgattttcttttaaaatttaatcaaatttataaaaaaactataacaatatttccaacccaaaacaaatatattatcaaaatatataaaatgttagttttgataaaactaattaacttggtattgtagatgttactatatttgttataaacttaatcaatcataaaagaagtttgaatggaaaaagtcaaaacaactaaaagtatgtaacgaagcgagcaatgattagtatcatctgtactgcatttaatttatcgtaaaattcactgatgtttcaacaatccaatcccacatatccagatgcaaaacattcggttcatatatcatcttgaccatacagtcgccatttctgaatattcttcctcctctgaacctgaagagttggcggcatcggcaaccccaccccgagaggcaagaagcccttcgccccgtggcgcgaggtgccaccccaggtgacccacacgctgccgccggagaagaaggaggtcttcgactccctggaggggtgggcggcggacaccatcctcccctacctcaagcccgtggaggagtcgtggcagccgcaggaccacctcccggacccgcgctcgccgtcgttcggcgacgaggtggcggcgctgcgggagcgcgcggcggggctccccgacgaccacctggtgtgcctcgtcggcgacatggtcaccgaggaggcgctccccacgtaccagacgatgctcaacaccatggacggcggggtgcgcgacgagaccggcgccggcggcagcgcctgggccgtgtggaccagggcgtgggccgccgaggagaaccggcacggcgacctgatgaacaagtacctctacctcaccggcagggtcgacatgaggcaggtcgagaagacgatacagtacctcattggctccggcatggtaagcatttgctccctccgtttcaccttacaagtcgctttgattttctttttctatttaaactttttaaagtttaattaagattatagaaaatattagcaatatgccaatatcaataacatccattgaatctgatattgaatatgttaaatctgatgttgaatatatattgataatatgtttgttttgtgttaaaaatattattatatttttttataaacttggtcaaacttaaaatagtttgattaagataaaagtcaaagcaacttacgatatacaacggagggaatattacatattgtatatactactataagattgctggtttacatttacagatttgttaataggacatgacattcagatgagatttggcggcatgtgattttttttcctctacaatttgctttgcgattcgtggtttagttagctgacatccatccgtgaaagccctgtaacctttaaagtggttaagttttagggttgagatcgaaaagttggaggagttcccttatttagagggcgatcacaatgataaagaaacaacagcggatatcagcagtggagaggttgcgaggttataatagcgtcaccgaagccatgtatggggaggaggatagtggaggcagcgagggtgtcaaggaattagttggttatgtagtggtccggtgtcgacggccgtaaaagatggagaagggcagttacatggaacattagagctagagaagatggagaagaagcaataacataaggctacagggaggatataggtatgaggagaggggtgtcatggtcttgcatgtctctttagcgcaagaggtgatgccggttgtgacaaagggtagtggggtgctaggtgacggagacaatatcttgatgtaatggtgtcaggtcgttggtagggccttgttaacgggtgttttaaaattcttagaagctgtaagttggtagctagcttataaaaatatagaaaaacttggtttttctagttttagttttcaaagtcgttttttgaattctataaatatatattttcagaatctaggtaagaatatgattgtttgaaggagttagagattttgggagaattatttctactagaagcttcttcaaacaaactaggttgagcaagcaaggtagaaggggataagaaaaataggggagttatccgaacagttcaatttagatcgtgatgtctaatggttagaatttcgtgaaattctcatgatccctaaaaagttcgaatattgcgtaggcattctggttcatttgtttactccctccggtttcattttaattgacattttggataatgacacggtctacgaaatatatctttgaccttatttttctattataatatatacaataaataaatgcatgtttacttttattatagtgctttgaaagataaatctataaatgttgttttagtttctttaaaccaaatatttttaaagttatttatggtcaaagttataaaagtttgacctcaaccttgtccaaagcatcaattattatagaaccgtagttagtactcttgtagctcatttgttttgttagttgagaaagggtcttttttttttctttcaacaaatgaaactgtggtagacatgaaaagcgatcactcacacattttttaagaagaaattatacatacatttttttaacaaataaaactgtggtagacatggaaaatgttcactgacacatctttcaaacctaaattatgagcgtgttaagaattaaacccgagacctcaggttaaaaccacaccactcgctgcagtgcatctagaaagttttactcaacacacccaaaatgtttggctagatttcaattcaatgttgtttgcttggttttggttgcaacttgcaaggatccacgaacggagaacgacccgtacatggggttcatctacacgacgttccaggagcgcgccacctccatctcccacggcaacacggcgcgccacgcggggcgccacggcgacgccgccctggcccgcgtctgcggcaccgtcgccgccgacgagaagcgccacgaggccgcctacgccgccatcgtcgccaagctcttcgaggtggacccggactacacggtcagggccttcgcccgcatgatgcgccgcaaggtcgccatgccggcgcgcctcatgtacgacggcgccgacgaccgcctcttcgcccgcttcgccgccgtcgcgcagcgcctcggcgtgtacaccgccgccgactacgccgggatcatcgagttcctcgtcgcgaggtggggcgtccccggcctcgccgcggggctttccggcgaagggcggcgcgcgcaggacttcgtctgcagcctcgggccgaggttcaggaggatggagaagagggcgcaggaggcggcgaagcgggcgccgcccgccgccgccgctccgttcagctggatccatggccgtcaggtgcagctctgattctgactgaatcggtggtaattattacagtaacaagtttgtgtttagacagaaagaaaatctgacaacaccagttgctgagaaagacataaaatagctttaagtctaataattgttatgtgatcttgcaaattaaaatgtgtatactttgtcctttgttgataacttgatatggtacatgaaagaaaaaaaatcatgcatgtggtgttggtttctttgatcactcttcattagcctccatgaatttctgaagtttcttcatcatgaagacaatactcatttctcacaaagtatcttacaactggcaaatttatgactgaaaattgtcgccagtgacacgatataaatagatacatgagtgagaatcaaaagccagattacaggtaaaacatcatcagcattcttcatggactagtgcaggatgctgagaaacaaagccaagataggaaagggaaactgtagaagctgatttatatacttagatatatatatgttacagacctgtatcgcattctatattttctatgcacctatattcaagcaaaggcaaagtatttccattatatgaatctcttcaaatattcaaatgtgcctttatatgtcaccaagaagaacaaaagggcaggtccagtgcaggatgtccagctcttaatctcgtcacaggatgcagcatgagcaggcctgagagggaaagagatcagtgattacattttcattatagtgttgcactgaaaattctgctgatgaattcagatttcccaactcagttgtatcaatctagtttatcactttgaaagacccaatgatataactaatcaaaagaatttaaaagcagaaaactgaaattgttcagattttaatctgccaagtacataagaaagcatcaaatattaagacttgttaggcaaaacatttcttttttagataatggaagcaaaccacttctggcatctacacccaaaggtgtacatagccaaaggtcaaacattccatggatatacaaactgcataactcaatttgcatctcttgtatatacctctgttatgacttctgggtgatcaaatattcaaatgaatttttgcatgttttgtagtgtcgatagtaattcatggctttgtgagaaacagagttgaactagaacaggggacaatgcataactccagaagtgcaatcgaaaagtaaaaccatgatatataaaattttcactatgttcattggtccttattatattccattagtgggacagcagaattacttactgagggactgcctaatgcatctttaagttacttcgctatatatctgtacacataaatctagcatattacaaaacaaatgcacctaaagatgccaagaaaaaatcaccatagtcgccgggagaattgaccataactccataagtaatcttataacctgagcaagaatcatactacaaagtaatgctcccatatggattatgtgggataagtcacaaaagatttgtcgtatagttagggacagcacacagatacctgttgcactttatgttcctgtcttctgccaccagaaggagaagatggtggttgctgcttgacagaagagtttggggtcagcttatcacgcctaaccctgttaaaaatgccggtgtacttctccccagatgccgcattagcatcatcccaatcaccaaatggaggtacagtcacttcatctaaagcctgaaaaagaaaaaaaactcagaatgcaaatgcactttattcagaaaacctctaacacacaatgtgcacatcatttctgaatttgcaaatggagatcgagatgaggtgaagaactgtacaggttcaaagcctctgcctccttgcttcaacctgctccttcctggagtcactgggacacggccatcagatgaagaggccttcctatctggagtctgcatcccagctgacctgtacctggaccttggagaggcagcagcagcagctgcaacttctctgtaagggcttctgggtgagccaccatagccaccatggtccagatgatgctgctgcagcggattggcgtgccgtctcgccacggtttcgcggtggagaggcgatccggcaggccggggatggccggtttcgggctttctttcatacctctgcctttggttcagggcatcatgagaggatggatgcagtggtgacctgagaggaggaggaggctgatcaggtgtttcagtgatcacttcatttgggttggagtaaacaccggtagcagttttcttgctccttctcaggttctcaaacttctgcgtgtacggggtgtcgcctgcggctgaccagttcccgaatgtaggaactcctccttgctgtttggagaaatgaattagcaaacatttgtcatctaaccaaatcatggctgatacattgtcacagattctaaaaaaatgtacagttgattatagaattatacatttcaaattgataagtatataccccataggttgaataactttttgaagagttatcagtagtaacaaactaacaatactaaatcggtgagaaaacaaaagtctgaagggaaattactggaacaacaaaagggaaaaaaaatgatatgagaacaatactattccagtattctatcattaagaagcatgtgcaaacagttgtctccttgataataaatacacaatctattttacgaccccctgattttatcattatcctgtgttgtcaacttgtcatcatgattcatggatgtgccatttgcctttcatccatatcaagccaataaatccgtcgaattctttacaaagaaaaaaaaaacccaagaacatgaggtaatccagaattacattatactacctcccaaacacctgaaatttctgtcatagatctattgtgcaataatatatgtgttctaaataaaaccccagcaacaagaagatcgtttggttcaatactgtgatcggttttaactaaccaatatgaataagatcccctgctttcctctgtaactactaaatcaatcgtcggtggagtaagaaacatcaagtaaaattaaattgcatcatgctacaagccaaaatcctcaataccagcatcatgaatattttaattccgggagcaaaaatcggaaataagcaactcaccgacgtcatccacttcaagtttgatccgaacactgatccagtaggagaaaactgctggtgctggaggatgcaagattttctgtccaagaactgctaatcaatagtatttctctcacaaggcactaacaaattgcaccttctctcccaatcatccagagctaccaaaatcaactgtagcgatatggcaaacaaacactaaggtatctttcattcaaaagaaaactactcaagattcctcgtttgaagaaatacaaggaaaaaaaattgaaaacaacacttttcactcggattccttaacagaacaaatcgaaccaaaagatttcctgaaaaactacaattctcacaagaaaaaaaatgaattaacaaaaaaagaataagctccggcaagactaaaactacaattctcacaagaaagaagcaaaatttggggagaaagcaaactgaaacgcccgagagccagtggaagcaggctgcttcactcttgagacctagactgctagaacagctccaagaaaaagaaagaactcaaatttcttcaggaaaacacaaaaccactccccacaaaaagatcaaaccccctcaagaaaacggccacaatcttctcccttggaagaaaccaaaattgaacggtggtcttgcctgtgcaaatccctcaagaaaggacccaaagggccaaaaccaccttaaaatcaatcagagaaggcacatttctgctccattccgcagcacccgcaagtggtatatatacaaatacgctcataagtagtaagagaggaggaaggagaaggtcttgccgttgacaatgagacaacgccattgttttatttgaagccttcaaagtcccctcatcattttatttttttcttttttatttagtttagtttagaccaagctaatgtttctggttttatttaactgtaataggtgttaaattaatgagtaattggtttgcttttttttttttagtaaaggaaagatactaaaagattggttggaaggcagagttctagtctgcaaaattaatttggagacaactccattatcatgagaatatagacttttcaagcagactgcatatagtacataattaatttggcaatggcgtcatcttgaaatttagtttcgcgaatgtacctgtatgcaattctctccctgtttcattttcaattgttgttgtatttgtgttgaactttattggccccttgtctcagtttgatttcttaattggtagattatgcaacttaacaagaaatcagtttagtgcatgcaaactcaatattgcgtacttaggctgtgtttgataaaagaagaaagacgaaaattgagaagatacgtaaaatgagctgagccattaatgcatgactagttgagtattaattatttcaaacttgaaaaatagattaatatgatttttaaagcaaattttctacaaaatttttttttaaaaaaaacacaccgtttagtagcttggaaagcgtgtgcataaaaaacgatgcactttatctctttctctcgcatgaatgaacacaaccttacttactttagtactcttttcggtcaaaattgtttgacattttcacctttcccttgtctttgaggtgcgatttttaccataattttgtttctttatagatgtagtttttaatgcaaacttatatatgcttagctttatgtgttttcaaactaaacattttattagaagccattgaaaatataagcttacaccattaacaaggtgtgtagaaactatgacatgtacaaaaattaatatgtatacatacaattaatacatacttcccttagttaaaaagaatgaaataatctaggtattatcactccaatgtaacctttccatatatatattgacagttgaaagaagtagttcagattcatcatttttctgttttatatttatacacctcaaaatggttactgtgctttccccttatacaccccgaaacaaatagatatatatttctttgagtaaaaaatatagatattttgaaatgagctaagtattttaattgttgtctatatgcagttgggatgatttgtgctacttgactttactgatcgtccactcgcattaatttagctcatctttattttctactccacttgtgacctaatctaggttgcctgtgctctaacgtaacgtgacttgatctaagtagaaagcaaagaaagagacagcacgttacctgagcctgcatgcatgccaatatatagctaactactactactataactaattctcaaaaaaaaaaaaactactactataacttaccgtatgctatgtgtttgctggattctcctctgactttccttgctagaggtttttaaattaaccagagctggttccaggctgcatcattaattgggtcttgttttcttgttttgctcagaaactgaaactgtgtctcatttttttataacaactttcttagtctcaacggatatgattataatactatctagggtgatgaatattatgagtactagaactgatttcaactgttgatttataagttttacgtactatcagtagaaaaaaaaatgctactactagtagttgaggtggtagtataaatatacacaatccattaaactagcaaatatgagcagtctaaattgatttctaatagagaccattgtaaaaacacttgattgtgttgtcgttacttgattgcttatttggtcgaaaatcttggtttctttctgtcatttctgaaagttttatgcaagcttacaataatgcggctatatatgtgccccatcagattgatgcagatgccatgagggacttttggtggaaaatctctataacaagactaaatgtaagataaatttaatagatacacacgcgcgcgcgcgcgcacacacacacacacacatatatatatatatatatatatgaatatctatttgaaaaaatatttggctttgtaccttcaatttagttaatttggaggtagaggccgggttttaatctattttctaaaaacatctaatttgaaaaaaatgaaaaactataattatctttcaattatgtattatgtttcttatatctagctagtattctttttttctctagaactcaataatatatgaagggtttggccaagggggcttaggcccacatttgcccctgttgggattgtcataattataaatggataggataaatcaaacattacatattctaaacctagaaaaatagcctacaacaagttatatatctaaaaattttatgtatactacctctattaaaaaaatataagcatttctagaattcaaatgttttactataatataagcatttctatattgatccccattattcgaaagccaattagatgcttagaaatggaatctctagccattcaaaatttaaaaattgacaattaaaatgaacaaaaggaatcttttgacataatcttaatatttgctaaacaacgcctaattgttatcctaaaataaatcaacttttatacgacattaatctaaacaaagtgatttgcttcaagatatagggagtaaaaatccttatattttagaacggatggagtatatgagtagactgacctggcgtcagcttatatacctgggtttgggtcttgatcatagtggtatgcaggttaatttagagcacgtggtccacatgagaaaaatgctttacttccttattgtcagtgtcttcgtttggtcaatgcaagccatagcagggaaaattacacaggagtgtacttaagtcatatatatatgcatgtgattgaaaagctgaaactataatatatcagtcggtgtcatactgtcatgcatgcattgtagaattaaatctgctatccgtggattagttcaaaaggccgcagcgcacagttagggattaattaattttagtattcatggctgatgttgacaagttagaagacatgcttataatgcgcgcactagaagtactactcctacttgtgttttggtctcgtgtctgtttgttactggagtaaaacttatttagcaactataacaacccatgctatgtgcaagagaggggatgatttcttttgtttttaacaatgaaaatagtttgaacgatactactgtgttttctattggtagtattataataccaatagaaatgatttatccatattaaggataaattagtaatttattaatataataattatgggtaactttaacattatgttttttcccgtttagatcgatctgtggtcattatattgcgctggcatcatttatattccatcgaaaaagccaaaaaaggagaaaaggaagtgtagtcactacttaatgacaattataccctatcgcatctttttttaacaatagtacctctctatgtttttactaccgttaactgaggtggtggtagtacgaatagatttgcatccttccatctattaaatgagatcaatggttcaaattgtttcctattaccagtagagaccaccgtagtggggctcaaatagtttacaccgttagcctctactggctggcatagaatcaataagtgttaaagttgagaatgacaaaaatatattgagtgataggataaatccttagctcctctaaaaagatgatcacttgaataaaaaggtaagacatatcacacatattctacctagtagttctattgtatcgatgaactaactagatgttccgtgttatttccttttttttttcttcgatattatactcacccttaagctctaagacatggtatttgatcccttccagctttcaaatatttggttttcaagtttggagatgagttttagacaaagcgaagagtttagaggtcaaatggatttatgattatgccatatttttttcaagttgcatgcatgtatggaaattaaacctcatgatcattgttttattgatcgaattgtggttagataaattatgtttttaagtctctctctctctctctccctctccctctctcaattgtttgatagtttcatgccataaataatattatccttaccaaagtacattagaacgtaaacaattcaatttggcaaaccacataacaatgttaaaacgttttcaccaaacaaagttatcataaccaatgcaatataataccaaaccaaggctaaaacatccttataattaaccccagctcccaggtagagctaggtcttggctaattaatttaggggaggaaaaaagaagtataccgtccaaatgtaatgggactttaattcttccagaaaatcaaacaagcatgtgataattaatatgtcgtgacgacgagtcgacgatgtgcaacatacgtgttcctatgtactatacgtttcagacaaacatgataatttgcacgtttctatatcgtcaacccatcttaatatataattaaccagtaaaaacacacatgactgaaacgatcgaaatcgagcacaaagtcttccggtaattaataaactgtcattttcatgctggaccaaaatttctccatgacatttatgatctccaaaacgttaggcaaaaaccaacgcttaactgatcttcgatctccaaaacgtggtcaattgttgagagctgcaactcaattgcgaccgtagggtgacttgctactgcagtcatgcatgtgtgtgtcatcgttggtggtgctgtcgaactacatgctccccaaactcctacagatgttattgagttacatgtaccagctagtttagtcaaaagattaagttgatgagtgaggaagaatataatgagtcaattcaattcaaacttatattgatgtggaaggacggacagcacatttatatttcaatcaacaacttttcttgtgtgtccattcaacccaaagttataagtcgataaggaaagattttggcccatgtaggagccggttcaacccaaaagttcaagtagattttataattcagtagattttatacgctggttaactggctatatatttacaactctagtggacctaggggcctaaccgccctaggaagctacttagactcactggcatactacctctatcacataaaaagttcatttttcagtatttggatacaacgtttgatttttcgtcttatttaaaaattttatgattaatattttattgttattggatgataaaatatgaatagtactttatgtgtgtgactattttttttaaattttcttcttaaatttttcaaataagaaggcttaaaaataaatttattttgggacggaggtagaagcaaaatggtaggcatatatgttgttggtggtccgatcgatgtagtgagctttgcttcagttttggaaatttcctgtgttgatttagacaccaaaatacaaaagtacagtaaagctctactattttgcatccttcgctataatccacagtttaacaatgacctgaaatagcttgccaattttcaagattctaagccaaatttgttaaaattgaccacgtgttttaaatggagtcgtgccgaggttcatacatgtttgaacactgatgcaaagtggaagagatcgagtgacgtactagtgtcgccaaccctaccgagaaaatttcaaccacacagaatcgatgaatcactggatcactctcatgaatatatttttgaaacattcagtaatactccgtatgttctactcatcgatcgaattatgaaggcactataacacatcgatcgagatacggatagccaacgatagcttaaaatatttgactgtaaatcagcacatgtcacaaaccagacgagaataatgattcaaactaatggacagatcaatgatggggcctaagaacaattaatcaagctcgatcaggtcaagtagctagtggtcagtaatgcacagaagttcgtgagttcatcttgttagacacggcctcgagagtaaaatttcggtaactaattaactatatttcctcagctcaagatatgactactttttttatataaaagatatggctagttggctacttatagaaattaagatttgttctaaaatataaaaatataaaatataaggacttgtagagtattattcatctaatttactcaatcttacttctaaccatccttaaaatttccaatcaacccttatttaataaagggcgtggagtaattcataatgttgcctgattaaaattacaagctactctatccattttatatatattataagtcaaacctttttaagctcgaacatatttacagaaaaaacagcaataattacaacaccaaattagtttcgttaaaattagcatttaatatattttgatattatatttgttttgtattgaaaatatatctatatttttctataaatttggtcaaacctgaaaatttgactaaaaaaagtcaaaacgatttgtagtaactcataagtcaaaacgattaggacagtaatttacaaaaagatggagtagtctataactattaggaaagaatcttgagaaaaaaattacaaatataatacttcctctgtttcaaattacttgtcaatataggttttacataactcataagtcaaacattttaatttttaaccataaatttctgtaaacccatattgttcaacattataagatttaggtttttagatttaccatgaaaataattttcataacatgtaattctcatgttaaactacacggatttataaaagttaacggtaaaagatacatattttaagtaatttgaaacggatggagtatcattggtttgttattttgagaatacacatgacctttatatgcagtcgcagagagagatattggagagcccaaagctgcttaaaatatttgattgtatctgcatcaaaacaacactaacatccccacacacacaagggacaattgctcatttgaccatgttatgaagtgtaactactaatttgaccttactttttaaactttgctcatttgaccctactttccaaaatcgaaactgccgtccgaccctctttccactccaccattagggtttttttaaaggagacaaaaaaaatcattttataatataaactgactaaaatacccctaagcagtgaacactaaatcaatcctcaaatttctcaccccacggtcaaatttctcatcccgtgccttcttggcggcatagctagggttcggcggaggcggtgcacggtgaggacggcggcggcggctcgtgatgggagctgtggtccagcggcatcgacgctcggtgggggctgcggtggcggcgcacagagaaggcttcggctgtggcggtggcggcgggagttgcggtggtggcacgcggcggggctgcaacggcgggcgccgcgcggtagggactgcggagatagcgcttggcgcgagctgcggaggcggcgcacacagagggcttcggcggcgacggcgcgcaagagctgtggtggcggcatacgggtgctacagtggcggcatgtgagagtggcggacgaaagggcttcggcaacgacagtgcacgggtgcagaaatggcggcatgcaggagttgcagcgacgcgtaggtgcggcaccgacgacgacacgcgagtgagtgctcccgcggcggcgcgtaggagctgctcagctgcagcagcgacggcatgcgggagatggccatcgagctccatctggttagcctcctgggttttttttttttaagcctgcggggataccttaactacgttttgtgtttttcttggatatttgtacagtttgagattgatctactatctacttctacttatatatatatattactacttaaaattaaaatttttaagaaacgtttccttcgtccctttaataaataaaaaaaccgaaaaaaaaaaacaaaacagaaagagtccgattccccttggaaaaaaaagatcggatcccttaaaagggaaaaaatgtccgagaaaaaataccgtttaaataaaaaaaagcgaaaaaacataaaaaaaaatccgactcccccgatggaaaataaaaaggagagaaaaaccaaaaaaaaagaagagaaaaaaatctgtcgcaaaaaaaaagaaaaataaaagggcgttcgagtcttaaaaaagtccgactccccgactccccgttgagaaaaagaaggcgacaaaaaaaaggaaaaaaaacttaaccctaaaaaaagaaaaaaaaacgtccgactccttaaaaaaagtccgactccctcgaaaaagacttctcgaaaaattgaaaatatttttgccggtattttggtacgtcatctgtatatgggtcggtttttaaatgttcgcttttggactggtactttggtacgtcatccgtatatgggtcagttttaaattcgttcgcttttggaaatacaaatccgcaattgagttagtttttaatttcgttcgcttttgaaaatatagaaggaatcgtataagaattctctttaaaagaactcacatgctaatttgagacgatcggactcctaattgcagctcatgattttcaagatgtttttgccggtaccttggtacgtcatccgtgtatgggttggtttttaaattcgctcgcttttaaaaatacaaaaggagtcatataagaaatctctttaaaaaattcgcatgctaatttgagacgttcggactcctaattacagttcatgatttccaagatgtttttgatggtactttggtacgtcatcgtgtatgggttagtttttaaattcttccgcttttagaaatacaattccatatttgagttagtttttgaattcgttcgcttttgaaaatacagaaggaatcatataagaaatctctttaaaaaactcgcatactaatttaatacgatcggactcctaattgctgcttatgattttctaacaaaatatatatccaagcgaatttaacacagtgaatttcattttaactaaaccatataacaataataagattaaaatagtcttcacccgttgcaacacacggatactacttaaaaaataagaggtgcttccatcgtccgtctaaataaaaaatagaaaaaaacctaaaataaaaaagtccgattccccataagaaagtggcgaaaataaaaaaaaactaccgtatccgattcccatctaattttgttcgttttctttttttttgtttttttccgttttattttctttcacccattttccggttttctttgtccgttttcttttcccctttttgcatattttcttttcaccgttttttctttcaccaatttttctgtttatttcttttatcgctatatttttttttgcggttttttcatcgggccaaacccagcgttgccgccacgttgattttcctcctcatatgcttactcctcctacttactgcaataaccgatttcccactactctctcattattttccctatgaattctcctttcgattcagctttaattcaccagattgaatctccatttaatcatccttatttttttatctcaagttttgcagattgcttcgattttgatgaaccatttaatcgtcgtcattttttatcccgagttttgctgattgctttaattttgataaaaaaaagggaaaagcgagatcaagtggataaaaatccctcaataattttggatatggagaaagattcgaccggatttgatggagaggatcagcttcgttagtcatcgtacgggtacggaactatgcgagctcgagcggattaccgtatttgatgggaggatcggctctgtcatggtataagactatgggagctcgagcggattaccggatttgatgggaggatcggctttataatggtacggacacgatactgttcgacttgggcctacaactccatttgtggactgagccacagagagatagaccgagcagagggagatagcagactatactaggactagaggtgaaaaggacggaaggaatgtgcgttcgtttggtccaaaacgcatgggcattaaagggagtatagtgcgtaggataaaatatatttttacctattgcaacgcacgggtattttttctagataaaacgctaaattgatggacgcttgagtcagataggatccatcgattttttgccatctattacacggcttttatttcgtcatatattctcatgtattgggaaaaaaagcaaaaaaagaaaattaaaaaaacaagcaaaaaatgcgtgagaaaagaaaagcaaaaaagggagaaaaatatggtttttgtcgtcagtaaaaaaaataaaaaaaaaacatgctagaaagaaactgttagaaagaaatgcgccgtttataaaaaaataagccgctcattaaaatacaaacattatcattgacatgattatgcatgaaaaacgtatattatcattagaatttattcacccgttgcaacgcatggatatttttgctagtgttgtaaaaaatttatcaaatctgtgaataagttaactttgtcaaaaatatatcaaatttatgtcaaaattatcgaaatttatcaaacgtatgttaaatttatcaaacccatatcaaaatttctcaaatataacaccgctttgtcaaacctggataaataaacaaaaataataaaagtagggtcaaatgagcaagggcataaacaatatttttgtcatgaacaacgccgttagattgccttcagagaatagggtcaagtctgatctttattatttttgaaaaagagggtcaaatgaacaaacttaaaaaaacaaggccatcaaaacagggtaaaaacacaattcccccccccccccccccccacaaaaaaaaaaacgatgcaaatgcggaggcgtagcgtagggaggggggggggggaagaataatcaggttcgtggtcaactatatattggccagtaaacggaaacgtgaaaattgcacttagaagaacggctcatgcgtgtgagtaaatctttagtcccgtcatcccacgaaatcgctaataaatgaaaatgacagcgacgacgacatctctacggccagattattttgggaatttacagggaacttaggaaaataccttaagtgatcatgacatatttaatttatatattattgtccgagggattgaaagaaatatatcggcaaattgtttggaagaaagattgtaagtgatcccatgaatatatgatggagaactctttatagaaattttataccaccttaccctatcatgtcacttgactcttctcacgacgactatgaactcgcgaagatgatgctaccccttgttgaatgaaccatgctagcagatagtactgttttgcttactaaaatttaatactctccgtgtccttagccaaacttgtttagttttgactaagtttatagaaaactttagcaatatctataaaaccaaattagttttactaaatgtaatattgaatatgttttaataatatgtttgttttgtgttggaaatatgataatttttttataaacttgatcaaacccataaaagactaaacagaggaaagaagtgggaagtaaagagaatttttccaaaggatttaaatactccaaattttctatgtttttcatttaaaaactgtggaagagagtggagcgacattgtatggagagagaaggtaggtgtacattttttttaattcatgtaggtgccttaagcttaagagatctaccttaaggcgggcttaccttctattgtcaacattgaagatgccataaggccttcaaaatacaaattaacctataacttggctctgaaatactatgccagatcgagcaacagatttggaaatatgcaacagatttggaaatatatggacataattcgaagacatggagattggtagacatactcatttttaactagtaccctgtaatccccctactgactccctctactggagcatgcccaagcagcatcaggacccaacagtagctaggctacaatcagcttgaaaattgcatacgatggaactgttcatgcacgaagctgactcgagtcctgtcaaactaagttgcagaaaaattaggaaaaagcttaaagttcatgtgggtatttatgttttattgctttaatcgttggaagaaatatattgggaaattctttccaagatccttccatctcgtgcaatctggcgaccagaagtgagcgcagtgaaagatcattcgctcaatatcaatatttctgtgcatttgtgcttcaagcaaaggtgaaacagagaggttcaagtgtacatggaaattctatacgatttaaaggactccaaagaaaggattagtgatagcagaattcagctcggctccagcagtgttcaggacggccttgtcaaccttgtcccttgccaagaacaagaactcgttgccttcaagtttctcaaatccacagagctggagaaactctatgcctccatgcagattgccaaccctctcctgcattgtaccgaaacagattataagtagcgtgttgttcttgaaaggataacagcggatcattttaccaggtcaatatgtacagtaattattttcacctgaaatgtagcgttggtcagtctgatcttcctgaatttctcctcgtcaggatttttagctacattgccaatgtaggtaaggagtgtttgaaaagccctcttcactttagcatcgtcatcctgttgcaaaaacggcccataattgggtcaaattgaataccaaacatataatatgattatatcagcattgaatgattccactctaaaactacagggagaacacaatttttggtatagtttcaacaaacaatagaattctcaagtctttacagttgcatctgtattcacatgcaatgaaggatatgtgtcaatctgcctgacaaatatgagtaacatagaagatgatttcaagttaaaactacatgctaccttgttctgctgcttaagatttcttaagcaatccctcatgcgctcggcctttgtggctggcctgacaggtaatgccctctggaaatccatagaacagagttagatggcaataatgatttcaaaacattgtttatttatacaatctgcaattatattctttggcctactaagttcggatctaaaggcctctacaaaagctgttccaacaagaaatccattgactgatgtaaggcataagatctgaatgtttcctgagaaattcagaatcagataaaatttttgctcgcattcatctcagcgatttggttcagttaggcaattcaggttctcaagaccagtacagggtgcaagttcaaactggcagtaggttggtctaaatgactaaatttggatcaactgctaattatgaaaggaaattcggatcaactgctaattacgataggtgtaccttcttctcttcaaccggaggtggtgcgcttggtttaggagcagctggatcttccgggggcaatccaagtttccttctcctttcagcctggtaattagaaagaaataattgaggtctaattgccagagtgtgacacttacatgacaaccatacaaatatccccaggttatgtcgaagcaaatatgtaacgccagaaattcttatataaataatagaagaaatgatgagatggagaagatggaaaccttgtcctcttccagtttctgacggattttttctctagctcttttctcctcttctttctcaagtcttcgcagttctatcatgctgcaggtggtggtaaaaacagtcaaggggtggagaacagaatactactagtcaaaatacagaaaaatcaaaaggggaacaaagaaccaaccgtttcctttcattatcctcctcaattcttttggcttcaagaagctctttaccgatccgaatcctttcctaaaaatgtctaatatgtaagataaaatactggcaaaaaatgaacagaaatatatgccacatataatgtaaggaacaataatatgctattaattgtaatattggaaaaagatccaccaaaattataatattgcaaaggtgtaactggaaaatgccaagatcacatcacatcaaacataaaactggaatttgaggggaacaaccaatgattttcatgctttggtattagtgctcatcattatcttcaaatgaagggcatagcgtaatttgtacttgttgtctagtagaacggagacaaatgagagaaaattttcatctttgatatcaactctcatcagtattttcagatgaaaaatatagtataatttgcacttcttatccagcagcttatatcaaaataggggacagtaggctgaagtccctgtaaagacatgataacgtgacaaaagaaaacagcagataccatctataccttcaactctacatattacagcaacaaatttaagactagctcagtacttcagacataattgcacttccaagtaatcttatgcagatttcttcatacaaattgacaaatttgagatgagatttcatgaaacaaaatcaataagttccagcaaactatttgtgttatgttattgtacaagattgctggcaggtggaatcaaagttacatgaaaatacatcataaagggctattgattgtaatgactaagcataatgcatgtcttttttggatatgctgtgcaagatactgactaaaaacacatctaactgcacagaagaaaccagatatataaatgtgctgcaggtaatcttgattcatacatttctaaatacattaaataaggtaaaaagaagttgagaacaaaccttctccctttctctttccatccttctctcttcttcttctttctttttacgagcacgttccctacaaatcgagtgagtaaactcaatagtttagtaacaaaaagttaaaatcagaatcataacgccagatctgtggttgttccagtgttaatatgacaaacggagagcaaatattgaacaaagttcctgtttaaggcggtacgataaaaaagtgcacaatctgcatattgggggttatcatgtgcaaagaaaatacgtagggaatgtaataaaagtatagaacttcagggattaaatatgagaattctattgtcatttatattgagtttcaagtccaataaaaattatcatttttaaagcagtgaaaaaaattgtcgtaccaatgcatgcgattacaaagcccaaccacatacgacaaagcatacaagtacttaaatgtcaattgaactgatttcaacgaggaaaaggtagtgctacagacagacacaagtcaatgcaattttctgaagatatatataaaaccatcaactcattaaagataataagaaagcaataagttcatgaacacaccttaattcctgagctttaatcttcatttcctcaggagacaaagagggtttattagcctcagttattgtattagccggtacctgagagatgaaagaaggtaagtgtaaagttatgtactggagagcaaaaattttctggacaagtataggtataacacagaaagaattcatctattactcccattggacacaattaattgaacctctgaagtgggaggttagatatattcaaatgtgcaagtttggtcctagatacatgggcatacgcaggggaaaaaaaaccaaaatggacaacctatgccaatttttcaaatgtttgaaatgcgttttcattgttacagtaaatacattgagctgcacaaataataaataaatatagtaaaagttttgggtattactgaaactccatggatagaatgtcagaggtcagacagtgcaattcagtgtagcactacacaagcacgatgaaaataataccaaaataaccacttaatatccaaaacatattattttttcagcaaggggcaatttagcacaccagcataccaaaacaaataaaggtataatcaattaatcagcaacaaaaaatataaattcatcataccagaagcggttcgtcaatatctggatcttcttggtgctcggaaagccagttaatggcaccttcaatagtgctattacctagaggaaaattaaatgggtgcaaacaaagttatgaattaatcatggtttgcttactgaaggtgttatgtttatttaactaatatagatgagacaatcataatatataagtaagactgcaaaacgtagtcttattgacttctggtccactgagacagttttgtccaaaagcacagcaaatagttcagctttcaatgcatatataatgccttgttttttctgtcatattgtaaatttcggtccacaggcactacaatgcagaatgtatgtctaattttgcactcataatgtatcttgttgcaatgcacaagcactagcattatttgatctgcaagactcaatagcaaagcatatactttccaatcgaggtcgttcctttattcaccatatgctgaaatccttggtccagaatttactgtgataaaaagccttctagccgagactttcttagatcaaagtctcaaatagctcagtcgcacgagcgaacatatatacacttgaacagttaatacttttctactgcatctgcagtctactcctctgtcccataaaaaaccgaatcttagggatgaatctggacactaagattcggttttttatgggaaggagggagtactctagtaataatttgctaataaataaaatctaagttggagaaagaacttgacagcatggtacaaatgttgaactaagacatactatcttgctacaccataccagaaaaatgaagtgccctagtggcacgcgccgtcgtgaaccccatcgcctcgaggtccgccagcatctccttgttaacctccggcgccaccatctctgccggaagcaaaaagccaccaagattcaacactctttgccacccaaaggcggccacagatcataaccctttctatcatctcaacaacaaccacctcaccttgtggctcggcgcttgccgaggcatcgacatccatggcctcgccggccggcttcggcggcgccgcctcgagatcaattggcttggccgcctccatggtcttgtcagtgaactccgtgtggcccgtgcgcttggtgtgcaggtccacctcctgcgccgcgcaagatcagagatccacacaaccaaccaggtgagactaaaatcggatcgagaaccaccgaatccggcggaattcgatcgagaaagtgaaaaccaaagggaaggtggggagggggatggggggatctcacggtctgggagcggcagggcttgccgcaggcggcgcagactaggttgaggacggcctcggtggactcggagaagttggcgtggttggtggcctcggcgtgcgcctgcgcctcctccacgctccgcagcagcacgccgcagtcgccgcaccgcagcgacagccccgccattgccggcgggcggcggcaaagagggaggtgcttttgcttcgccgcggcggcgaggtttagacggagagagggggattccgctcgcggcggcggcgagaagacgaggagacgagaccaagtcgctcaggtagtccagatcaggtaattattaagcggaattttttatatttcttatagagaggaaattaattaacctgatttgttacggagtatacgtatgtacgtactgtattccgaacgggaagggctcatcttctcctcggattgaaggatctggtttattgatcaacggttgggattactgtttttaataagaaacatgatataaatcatgtatgcgctcacaatatacgtacactcaaccttataaacgcacgtaactatatttttttatactaaaaagagatcgatatatctagaaaatgttgaatttagtaagtttgatttcagtgttgacataaagtcacaatcatggtaatgaacacccaaatttcatggataatatttttttccttgtccaaaatttattacaggtttgttaagattgtactagtataaatggacaacaatatgatcatgcatttggctaaaaaggttatgcttttgatcagttccttgcaacaagttaagaatattccataccttttacagtgtttttttccttattctacgttgtgagagataggagtatttgatatgttttgcttcgtgtgaacaccttttagctagtgcttgggtgttttttttaaaagaaaggcaaaagctttgcctcgcctcagagctagtgcttggttggggcacaagaagaaattgaattagcatatttctgaaaagcaaaaatggattatcagcttgtttggtttattagatgacttgaaaaaaaatacacgtatgtagcaacgagtgaaggctaatttaatcatattattgttgaacggtttaactaaggtaaaattcacggtgggaactgcaattataagtttgatcatgtcaagttagtatgcaagtttataaaagagatttcttatacgtctccttctccttctttatttgtaaaagcgaacgaattcaaataccgactcaaacacggatttgtatttccaaatgcaaataatgaacttaaaaagcgactcatacacggataacgtaccaaaataccggtaaaaacatcttcaatttttataatagtagagactagctaaatgcatgtgtgttgcaacgggaaaaaaaataaaattacgctaaatattaaattatggtttaatttttttatctaagtcatattttttttattaaactcaaacaaatctgaacgtagggagcagtgttacgtaggaggagaagatgggctttgtattcatcgagagtatccatgcatctttcaaaagatttttatgatcatatgtcacggtctaagattatgtggagatgaatcgagatgaatgaggatagattggattatagtagatgaaataacaagaaacggttctgaacctaaacagcgcgacgctctctgtctcactgagaaggcaggccgatgggcactaagataaatcttgatctaatgcctaactgatctggaatagggtccctccttatatagatggaggactccttaatctaatcctaacaaaccctatctaatcctaacaaaccctaactctatccaataggcctaggattcccggcccaaagcccatgacattactcccctctttttaagcagctcgaggcacaccccgctagactcaaacaaagtaccatagcctaaacaaagattcacaagccttttacatctcggctgaaatatatactcctatataattaatactactgttgtgaacaaccctacttttacttttatgttgtcatcatagatatggacaggtggaccccacccagaagccttgaaaggaaagtgaggcccatgccagaatccaaacatatctaggccaacatggatcagctgcagatcgaagcccagcccaccagtctagcccatttaaattgcccagatgaggagaaaagaggagaaacccttgctcctcccgtagatagcgctgcctccaacaacatgcgcgtgaggagcgccgtccgcgagaagagaagttgggccacgccaaaagaaatcgcccccaacttcgacttgaagtccttgcacaactgccgcgtccacagttctcaacgcgcacatgccgccaggaacgactcagccgtggtcgagccgcaaacttcgtgaaccagctcgcggacccggcgcgatctgcgccatcacgacaagcgaatgccgcgcccacccgtcgcgctagtgaatcgcgccgccatacgccggctggctctgctccaaccgtcgccgtgttgtgtcgccatcgaagtggaactcaccgtcgtcttctctgactccgttgagggcgccaacagcgacggcaccatcgctaggcccagcggcgaggccgaggttgctcgcccacctgccgttcccgcaattcacgccgcatgtatgtcgctatcttcccgcgccaaattgtacctgccactctcggaacttgcgccgccgctcgaggaagcgtgagcgcctcgccgtgagtcacgccacccccgcatggttgcagaacgccattgccgacgaccccggacggtgggctgggctgcgcatgcgtgagtggcggaggcaagaggcatcaccgatgctaatcctagcagcgcaccacccagttgcgccatagttggtcgccgatggaacctgcagccgatcccgccctatggtcgacgaaatgacgtaaaggaggttgtcggcgatggcctgccatggagtggcgtcaccgccgattactgccaccatccgtgccgcttgaagacgcgccctcgtggtcgcaaggacgctacatgccagtatgatgattcggcatcctcaaggaaggccgccggctcggctgactgggctgccaaggcctagagttgcgccaccaagtccatcatcttcttcgagatctcggcaaggccttcgctaatgttgagaaccacagcgatctcggcacccatgggcacggaaccgaagctctgataccaagttatcacgtgttaggattatttgggatgaaaagggacgaagggaaatagattggattatagtaaatgaaataacaaggaacggtcctgaacgtaaacggcgagacgctctttgtcgcactgagaaggcaggccgatgggcactaagataaattttgatctaatgccaatctggaataggatccctacttatatagatggaggactccttaatctaatcctaacaaaccctaactctatccaatgggtctaggattcccggcccaaagcccatgacatcatatcacacagatttttaatctttagattaaaatccaatagacacagcaaaaagacaaaaagcaactaagaaacaccataatggatactaattgccatatcttcaagaaaaagaccaaacccaatataaatttcaaaacttacatacgaagattcaaaaattacactgtaacttacaaaagttacaatgtaagttttataaattacactgtaaattacaagaaaatacactgtatatttaagtgggaaaatcaagtgagagataagaaaaaaaatatttcgattgagatgtagcaaaatcgatcacaaaatagggagctgccaatctcgcgttacatctacaacgttctgaatcaatcacgcgcccatcatgttctcgcggactgagtcggacatctaccacgtgtgcattgcgaacccatatagatagagtcggataacaaacgaaagaataatgagtagataatcattattattattattattttaaaaaaagtataggtaaagatctagaaatcgtaaaaggattcggatgacaattaccaaaatcttgacaaaaacatctttaatttttataatagtagagatagagatagagaagaaatagaggtatggaacatagtctggttccaacctcttcctccatcaaaaatattaatttctatggataattctagatattctaagagtcttttttatggaggatgtacggaatctcttcaagatgcggtatgaagctataccgatttttcactgacaaaactgtctcctaagtcctaaccaaacgctagagagatcaattcggttctcaaaaaaaaaaaagagagatcaattccattccctcaatcaaatacccggcaagtatgaccaacttgtccaatggaatagccttcttactaccagggtttcccttaccgtttttagcgcggttaccgcacccccgcggtaaggtggttaccgcggtaactgcgcagttaccacgaaaatcacgtggtaaccgcaagacataccgtgatttcaaaaactgaaaaggttactgtggtaaccgcgcggttttgtaaaccctgtgttggcaacttttttgacaagttgacaagcacgatcgcagcaccttaagccttacggtgatcctagagtcgccaaccacctcgatctagcaaagagctaaacctagatgggttttgataactaaaccggctagcggagccgatttctagataactacccgcctcgtgggcaaaacggaaggttttcaggacaaacctacaaagagatgtcgcactctcgcagcggcggcggatggtttacggtgcaaaccgacaaagatggacaaactaagagaaaactaaaagcaatatgaaaaacgatttgattgattgattgtagattgatttttacaatgaaccggccatgtcccttatataggggttggtcttgccctctacaggcccttctccacgtccaactcggggtagaaactaaaggaaacccgaaacatgccttcccgagcaaggaaacctcgagacccgacgaaacacagtcggactcggacctgccagtcagaccggccacacaccgccgatctgaccggccctgaaccggcggtctgactgcccaacacacggcggtcagaccggcccactaaaagaaaaccggcagacttccaaattttggcaatctttcctattttaatcctaggtgctaaatttgggtgtaaacaccctgcttaccactctaacggtgaagaactttgccacaattccttcaatctttttcccaacttatgtgggcttattcggattaccagatttgcacaggattttggggagaatactattcactaagaaattttcatttcctcccattcggatcgcactaaccggccataggaaaatcgaaggaaagtttccctcacgaccgatttcacaggaaaaacacaggaaagccacccagatcttagcttcacgatggatttttggttggaccaatttttttctagtttgattcccctgtaaatttttcattcccacggccattttgtgattcagattagcaatactctgtcaaaataattagtatcagtttttactcctataatgtgtattgaacacattagtaaatacattactacatggtggctacgagaacatgggctatattgacaggaaggtggcaattggtttactcatagactacaaagtctaaacaatatttataacactggttaaagacttactagtgttgtaagctggtagtaatttttcggccatctaagaacagtgtcgaatgatgtgggagaattcatacaagtaagtacttttgaaggggggcatccatgtaagtaaatttattacttttcaaggtgcagagtgggaagctgggagcaaatagaaaactcagtaaatttgttacttttaaaatatggggagacactaggaaaacaaaaaattcaaaagaaaaactagatggtaaatattttactgaaataggaaaaaaaatctagagagaaggaaccagaaaacatgaaaaatttagatggttaatattttatcgggccctttgatgaaacacaaatgagaaaaaagaaacacataaagtagggtggtaaaaaacgaaaaaaaccagacggagaaaatgtggggtggtaaaaaaaaagaaaaactagatgaagggaacattttgtggtgctcgaactactgtttcacgcgctaaataggagtttattagcgcgtgtcaattaataaactcctatttagtccaagtaatactatatttctttctaattgaacaagtatgtgattttaaaatttaagggagccaatgtgaaatggatgaggactttcaaagtggtgtaataatatacattatgtggcccaaatgtcagtggtaagggatggtgtgagacagtgagaatggacatcaccactactacattttaagttgtctaaatttccatctctttttatacaacaccaacaaattgccatggcctttcaagaaaaaaaaaacattgttgttgctaatgaaaaccgtccttatgtggagtacattgtagtataaaattgaagatgttcccgctgatactttggtacgccatttgtatttgagtcggcttttaagtttgttcacttttgaaaatacataaggagttgtataagaaatcttttttaaaaaaaactcacatgttaacttgggatgagagtcggactcctaattgcttcagaattcttgcatgaccacaagaaaacaatgtacatgatatggctatcattccaataaaagttccaaattagatatcaatactatcattataaaaatcccatataatttttagacaaaaaaaatctaacaataattaatatgattaaaatagctttcacccgttgcaacggatattttatctagttaactataacaaatgcaatgcttcgtagtcacttttccatgcacacatagaattgttgtcaccgtgactgcaagtctgaaacccttagttcatcaggcaaaccgcaatacctcccggtcatatttacaaggttatgcagcaagaaacattagctgagtgaactgagcgaagaaccattacctactcaagaccaaattttaaataaaatgaccaaactcatgcagttaagatacaaatatttacaagaaaaccttttataacaggaatgtgtcaaaccacaaggtaaactcatgcaaacaaaaaatgtgaatacgatgaatgcaagggtagaaatattgagcagaatggtatttatcatagagtgaactataccaaaaccatggcagagtgccaaattaactgctggtttatgaaattgacattacagtccgtgaaatgaagtacacagtggattatgaagattaagaattaatagcttctccgtgttactgtcaccaggcaactgaactcaagctgtggttccaatggaattcctacaagagatgtaaggaatgcattagggagtacagaatgaactgtcatcaccttcggaaaatactgcttgaggtaacctagtgatccagtcaagagagaaaataaatggcaccacagatggaatcaacttaaactgttagactaaattttagctattaatctatgaaccatcttcatggtaaacatataattttcacaatatgcacctgcaacttaggtgaaacaatcttgtctagctaaccttatccggaaagccactaagccagtattactcttactgtttttaaagtgtgacgtactcttataatgattcactactttaccttttcatttttgtccttttcaattttattaggatattttcttaagaaaaaaatcattataaataggtacttatcttacattgtcatgtagagtactggttgaaatttaacatagaagtgagttccgagatggttatatttgatattaaaattctaatccatatgtagctttgccagaactgagaatgcaaagtacattcctagcaatttaggctaacaaaatgttagtaacaatcacaaaggtaagctgtaatgatgacagagaactgaaaagtttgagaaaactccatgcattgttcacatatgctctgctgtaccaaatcccattccatgtcatgtatcatatctcaacgaatgtcggcatcactgatatgtgcaatcttaacccaatcatggcctacatgtttttggcatctcttcttgagctcagagctgcagccatagatgtgcaggctggtaagagatgctggcatatctggaagtgtctgaatcttaactgcattgtttatatgcatggactgcagggaggtcaaggttgtcactgcttgtggtaaacattgcagatgagaagcattagtcagaactagttcttcaagggcatgacagttatgcaacagatattcctcaggtaagagtgctaggttaggtccaccagaaatttgaagcctcttgatggtagtgacgcttctcaatggctctctaagtaagattgatgggtggtcaatatcaagttcactgagattcagagataggccagatgaatcagcatcctctggtgacagaatagatgaatcttcaacaagcttgtcacagctagcgattgtcaatgacatgagcgatgcgagaccttggatcccgataagtgaaaccagctctttgcagtcccaaatgaaaaggtattcaagatttatcaatcttgcaaaggcttccactgttggaaggtgtgcgattgagcaagcatttaacaccatatgagttagccctatcaaacctgcaaacagttgtaaagggagttttgacattgcacaaccatctaaaaagatccgtttcagatatttaagacctgtcaatgagtctagtaacgcaagttcagcattagcacacaatccaaaagtgatggttctcatagtatggggcaacatgatctgtcgtgcgatcagatttgggcacttcacaatttcaagggttttcagggaggaacatgaactgaatgaatcttctggtagacatgataaacttgcacattgttggatggacaattcctcgagagcataaagagaacacccatgccataaagttgttatatacgggcagttggatatcattagcttagacagagagaggttgaacattgatgatgaacttccatcactgctcacaaaaaatgtcggcatagcctgtaaaccagcatgatcaatttcaatttgtcgaatgctagtaggtaaagtcggtagtcttctcagctcctgacaatcacgcactgctagtgtctcaagccgaggaaataagttttcaccctccaatccaacccattccgtgcaaactggcatgttctcaatctctagtaccttaagggattgcaatccagaaggcttctcaccacttccataaaatgatgaatccacacactctaccgacttcatgttaactatgtacagatattgaagagaaggtaaatgggtaccaagtgntaatcaaaantgtnctcaaaactacacattttttttttttatattattatatagtcaaatcataaataacctacaataaataagacgtccatataaagacgcaggcacagantantagcgacaaaaaaacatacacacactactaaagacacacgacgtcg

SEQ ID NO: 9660 - DNA, 57485 bp, Oryza sativa
agcggcaaacgagcggaaaaagggtttttggttgcgagagcgagacgcacccgccgccgctgccgccgcacatctccctcgcatcgcaagctcaccggagaagcgcaagaagagagagagagagagagagagagagagggagggtaagaggaggaggaggaggggtaggcgagggagatgggcgccggggaaggggatgccgccgcgggcaacaaggagaagggcggcggcggcggcgtggaccggacgtcgctggacggcgtgcgggacaagaacgtgatgcagctcaagaagctcaacacggcgctcttccccgtccgctacaacgagaagtactaccacgacaccatcgcctccaaggagttctccaagctcggtgcgcgccctccctcccttcccaaccttttccttgttcctccatccaccctccctctagcgcgccgcatccgacacacgccgggacgagctcgttgcctcttgccggttgtttcttgtattgggatgtattttatgcgttttcagccctcggatctgcggacagggtcgaggaaagcgagttcttgaggcggcatcgataagcattaggatttgtttggttaataaaggagatgcttcatgtaaatgtgatactaattagccatgatgataaactaggggtaggattgaatggtgttcgttagtgtgcccttgggttgaataaagatgcattttactgctgtcttggatagattgtatttctgctgctgccgttgattactgattgtttctctttttttttttcttcgtctgtatatgtagcttattacagcgatatatgcgtcggggcgattgcgtgtcgcctggagaagaaggaaggaggagcagtctgtgtttatatcatgacgctgggggtactggcaccgtatcgtagtcttgggatcggtgagaatttcccctttctgactttgttttgagttatatgaatagactattctgtttgctgttagatttctgatcagcattattatgtataagctcgttactatataaacactgctttttttttctatattagtgattaaacaacgatttacatgtaacagcacacatgaaaacaagtttaaaaaataaattgcttacagtaagaccccaattctgacaagccttatggttagctccaatggtcagtcgatgccttagatattgcaaaattatctttcgttattaggtagaataccttgtgacattacctgaacatgctcaatgtataatgcctacttgggtaataaggtgggatccgatattagttatggtgtttgctacaatttatatggtaagagaaggcattagcttggggagaagagaaagtattgttattttattcttatgggtaggcattatgcatattcaacgattaaacatcctattgctacattgtaagagtaagtctaaagaatcattgtgtgatagaactcttaccatccaatcattatgtagcattataagtttataactaactttgtgaaatattttccggtaattgatattttgtaagtagacagctttaggcgctgaatttgaacatacaagattagccttggttagctagtttcagcactaaaataattatctgttttgttcatgagtttcagagcctatgtcaattatataatgcagtcgcttggctgtcaaattccttttatgacagaagacagtttcagaatcaaacaaagtgtagcattgcgccaactatggacctcatgctacaaaatcttctgtcaacacttgagttcatcttaagaaaaaaaaatggattagcattatctatctgataataaagtctgtcacttttaaaaggttcctatttgcctgggttttaatcgttgtcaagtggatatgaatgatgggaggttgagcagagactgataaatcagtattgatgctagcatactagataagggtgcacctgcagcgtggcactgatatagaaggggctttttggttatttcttgatgtcaattgtgcagggataccttgtatgtaacaggtaggccacacaacgatatcttgacattgattctttccaccttgagccacacatgaagacccggcctgttggtggtgttgaatgccgtcgataaccgaattattttgagagaccattttaggaatgaaaacactctatgggccacttgtacttgccacttggaaatcgtcaaaatgctgaagtcaataactcaatattttgttttaaactcaattttaaaaaggacaaaactagaacatttcagctttgaacagcttgaaaatttagaatggggatgccagaatttaagcgaacaaatcagcaaaactagttgcacagcaactatgttctatgttttgtttgctactagcctactagtaccacacaacaatttgaaacctcactttttgtgaactacccatattgaaataacaattcaaaaacttttatagttttgaagttttcactctatgcatagtaatggatagtttgcatttggaaatatcattagcttttttagggccatagcatagaagatatgtgtcttataattgcttcgtttaattttcacaggatcgaagctgctgaaccatgtgatagatctgtgtgagaagcagaacatccctgagatatacttgcatgttcagacgaacaacgatgatgccattgctttctacaagaagtttgggtttgaaattacgaagacgatagaaaaatactataaaaacatcacgccgccagattgctatgttcttaccaaatttattggtcaggctgctacaaagaaatgagcaaccgccaacactctccttttgtgacaataccaccaccaccaccaagtcgtggggagatagttgtgatcttgtcgcggtttctgctgtgttttcacttcatgggtgctaacattattacaaaacactcgagaactatagtagcctttgctacaagcactgaggtatcattcacattgactgtttcctttaccccccatgagcatgagtgtttttctatttgtttgcagattttaccccttgttcttgtgaaatcatctgtttgttgtgacttgtgagtgtatgtcaccacaggtaattcctgtgaacttatgtccatgctcacgcacgcatattcgactcgaataatccagtatatgtactctctttgcttcatggaatagctgggcagattatctcttgctactgttttaaacagtaagttaactctctgcatcagcattgtttaggctcaagctcttaagctaactttttggtttataggctctataagccgataaatttgaaaccttaagtttaatggtagagttgtatctacttggtataaaaaaagctactccaacctaacttttgatttaacagtgtaaaaacagcttatggctttaaaaaagccaaacaaaaaatctacttgtttgtttagtaaactttttggctcataagttggtttaggaactcaagttttttatcttctactttctcgtttcatgtgagcacgctttctgaatagctaacggtgtgcctttttttaaaaaaaaaatattggataagttcttaaaaacagtaatccatctgcgaagaaaaaagttactaaccaccactatagaatacagctttataattctaaacaaggagagcttggatactctatactctatagagtgtggcagggaagccaaaccattcgtgtataagaccatggtgtggtggaggcatggataaaatgaaatgtggtatggacttggtagtacaactacgggggagcacggacacagctgatgggattaccatcgatgactcgcactttgttcctaggaccttgttttggcaagtccttcgctgaagatgcagtagatcaacattcacatgactgtctgttcctctttgatttttcctgaatgtttagaccttttcataaataatatttattaacaaatatgttaaaaagatatatccctacttctaaaaccgaaccatttggctcctcctttaagtaatgttgtcaatacatactccttcttgaacaaatataagtatttttaggattcaaattctattactcctatatagggcagctctagctccacctcttctggagttagaggtccgccagataatttcagctccatttaaaatgggagcggagttaggtggagctttctcactccagatccaactcatgtagctaaatttaggagtataaaatataaacatttttaggacgctgattctaatgtataggaatccaagcattttcagcccatcagatgtttacaggagaggaaccaaagcaattcaaactttgaccatgagataagtgaagagaatctttcagtttatctttaatctttacttaaataacttaaaaatattatattagtaagaaatgcatgctttaccgctgcatgctgccgtatcttatccttttattcattttatttttcaacgagtttttttagggatatgttttcaacgagttgatagcatatatacgtgaaaaatgctaatgggtcaatttagtggaagaacaaggtactcctgtttagtgagaggaactcatgataagaggtatttcatccatttcatattataaatcatttttttaaaaaaatataagtttgattaaatttatagaaaaatatagtaacatctcaacacaaaaacaaacttataaaaaatatatttaatgttacatataataaaactaatttggtgttgttaattttttataaacttgagcaaataaaaaaaatgtttcactaaataaatcaaagcgagtacaaactcaaagcaacttataatatactccgtaaaacataaaacagagtactcccaagttatttttcgatgaggaagtaaccatcagttcatctaatttaacagttaattaaacatccaaaggcatctaaatactcgtcaaccaatcatcaattgattaagtggttaatcgttcttgccagctagtatttttcaccgtattagattattgaaacaagagccttgtatatggcattaaaccatcattgccaagccaccaaaaaaaaaagaagaggaaatgcacgaaaacgaaaatgatagcagagtacatcgcagttgcaagacgaacgatgagctgcagtcggtactgggtacgaatcggggaaaaaacatgttagtaattcatcaaggaagccagcgcagcgacatctccatttgtaattaattattaatctcaagtatggaacacaaaatggactacaaaaggggattctttaagccttaatctcgtaataatccatggacaagtcttgccattgtaatacgtctcgtacgctaacgaagcggcctttccttgtcacaatgtcacatgtaagatggatgtatacttggaaaattacatcaacgaatccgggagtaattcggcctgaaaaaccgtgtatccaatcctgactaatacaagcaagtatggcagttccctatacagttatcgtgaagaaatagagtttcagcaaaacagccaatcccaactgcaacaagaatatccctgcaacgatcaagaaccatcgctctccagaatttacaatgtgagcgcgcagattcatagcaacgaaggtagcagacataaaccccgcgacaccagcaatcacccacctgaatatttctattggcacaatagacaggagctgtcacatggaaagagtgttaaattcatgcagaagttactcaactttctcaacaaccaatagataatcactaaacaagagactatgggtttgcatgttaatagggcatggagacaacaacacataacagacaacttccttgatagagattcggtaaataacggatatttttacaacacaaactatggtccttggtaatgaattagttttttgaatctaaagtagtgcaacttcttagaaacggcaaactggaactgattgctttgtaacgctatatatccagcacacttacatcaaacccaaatggaagccttctaaacaagataattaaccataacaaaatcgacaacactataagaagaattaatttctattgtctaagttttaggattttccttaccgatgctggaatgaagatgaataaagagtatccatagaggcaccatagttgcactagtccagcaggtgctgagaagtacttaaggatgacatatagaccaaggggaacaaatgtcacgtagccatagaataagccagcagaccatgtaaccaggttaatatcatagttccactccttcttatgccatttgtgggataggtaggtgacaaatgtggcaatggatgcagcaacgaaaatcagggtggtgcatgtccagaatggcccatatctacaaaatttaattgaaatgaaaattagcaggcatataaccagtgcttcaattccttgaaagtgcaataacttgataaaacacttaaattgcagagctatttatttacaaggaatttatcattatctgaaaaaagaaataatacttccaaaagcagagtttccactgaattaataggttagctgatatcgaaacacaaagttctatttgcaaatgatcaaacagcacccattgcttcagatttcagacattgagaaattcaggaaaatgctgtttaggtaatataatttattgctatcatctcaatatattcagtcctgcatatttgccaagtttttcacaatggtatcccactgccacttacaaatgcctcttcacctaataatagtaacccatggtatagacttgtactgctaatctgctattttcatgacacatgaattggtacaaacattcaagtttacttagtgttgacaccatacggtgatgttgaacaaggcacaaggtacattcaaaaggcaatcttagaactgttaccataaacactctcaagataagttcaacagaaagataatggtgcacacagcaagacaaagtagatgaaacaaagctttgaaatgaaaaataacaatggaatgatccaagcatgggtaggacatgtcattgtaaaaataaaaataagtttaggcagtgaaggctaaaggaaaatcctagactcccttttagtatgttgttacaacaagtcctcggaattattcattctttgtcatagaactctcagcaagaagaacgggaaaacaacatacaaaaagagatatagaagtattctaccgacctaagacatgctaacaactaattacatgtcgctatgagctgaaattattgcgctactcactcttaaccaaatgcaagacatgtcatcgagaagactaggctattttgctggagcaatcaaattcctcctatcagttcattatcttaaaatccccatttcttacacctatgtgaccaactcctctgaaatacccagacaaaattatcacattgtgcacgcaaataagtatcatggactttccagcaaaacaacagaagacgttcatagtctgtcaatgctattaaccatatccgctacctgagcatatgatctctaggaacattcgaatgcaaactatagtactactactaaggtaaggaggagttaggcgatggagaggcatacaggtcggggttctcggaggtcttctcggtgaaggtgccgcggaaggggaagacggactcccagatcctctccaccacgtcggaggtgtccacgtcgaagtagggcttgtacgccgcgacggagaacatccggaaccacccgccctgcccggcgtcgtccgacccagcgccgccgccgccgccgcctcggccgccgcccccggacttggaggaagagaacgtgtctgcgcaggcagcaaaagcaccaaccacaagcaaggtcagatccagacgaagaaatcaatgggaggaggaggaggtgggggatctgatctgaccatccgcgtcggtgggcgggcggtaggcgccggagatcttgcccttggcctcggacggcgggaagatctggaggttggagtcggcgaacttgatggtcggcggatctggccccgtcgccgcctgcgaaaccccgacgaggagcgcggaggtgaggagggtgaggagaaaacccatcggcgtgggaggggacggggacggggaagcttaccgggacggatccggaggccttggggtcgtcgagggcggagtagccaccgccagacatcatcttcgccggcgacggcgacggcggcggcggcggcggcggcggacgaagcgtggaggaggagcaaagcggtggtgggttaggcaggaggggcgcgtgaatgcggctgcttcattcggatctctcgttgctttgcgtcagttataacctggcgcgaactgtgtcggtgttagtcactggctcactgctaatgtttgctcttgtaacactgtactccgatatttgttagtgtcaattttggtcatgccaaaatatatttgttacttcttctgtttcataatgtaatcattctaccatattccacatttataatgatgtatatatgtctagattcattaatattaatatgaatgtgaaaaatattagaatgacttatattgttaaacggagggagtagtactgaagttttaatactatcaaatttaataaagtaaagttggtactagtgtggataaacataggtatcaaaccaaacgtatgtttgttacttctaaagttgctaaaagaattggcagaataattgtttttctttgatatatagtacctccgttttttaacatgtgacattgttgacattttacaaacatttatctattcgtcttatttaaacttttatgcaaatataaaaatactttaattcatgcttaaagaatatttgaagataaattaagtcacaataaaataaataataattacataaattttcaataaaacaaatgattaaacgtatctttaaaaagtcaattgtgttatatattaaaaacatgaggtagtatatgtaatggttaattttaggcttttagaatgttagatatggagaatcaatgattgtttttctttgagtatatatgagtagccaatccagcctcgtttgtaaagactgatttaacttgaaggctgctttccgattgaatttataagtatttatgtgttaatatctcttgttattgtgttctaagggaacgttcacaagagaaaatcgaattagcaaggacttgttcgaggagccaatccagcctcttttgtaaggcccgatttaatctctcgactgctttttaattgaatttccaagtatttacaggcttccgccacgatggtgtaccgggcattttggtgagagagaacattttcatatttgtagaagtataattatcattttggtgagagaatacctttttatatttagccctgccccaaagccccaccataccataccatttgctccatgctcattctccgattcttcacacaacggataaaattacttacccccgcaaacatccacactcggaaatacctaaatactatgaaaattctctgttgacagcaatctatgcttcacagtagtatatattttgtatatccaagtcgtagataagaaagtagggtctgacaaggttccaacttctctatgtaacttcgagaccagcgagattgatcggtgaaggtttttgcgcaaataagatgatgttcgaaaccagcagccttgttgtgcaatcaggttcaagtaggtaaagattcaccaaacctccattattcaagtttcatgatttcctgtaggataggacatgacactcgacgaccaagaggcaagagcacagcaatagagtatttgccatctgatgtttgcttgggtgtccaaaagcccccatcgcaggcttacgcttagcttaaggtaagttagggtctccgattggagcatttaatcaaatagaattaaaaacatatttagttgtcgcctcatgtacaaattggaaagcatgccgataaaataaagatatgatgcgttcttctattggattagaagaaacaatgtactgctctatattgttaatgtagaaatggtcgttgatataggccccaagattctttttccctggggtttgtgctagggtagttgctgtttatgtaggcaggcacctatcgctggctccgaaggcaaaacccctctttgcctgtatgacgagcattattttgtgaatgctaattcacaaaccaaagcgatatgatcacttccccatttctgtcaagcaacaaaaacagcatggattagagttctgtcatgaagatataacaattattcgatgaaatttgtgaagggttcaatgataaaatatacgatgcacttggtgataccttggtagggaacccaattgtttgtttcagaatttcttttgggaaggtatctagcacttgaacagtctgcagatcttcggaagcccttcattacacaaagtacaagattgtatagaggtaattagatagttgaatgtcagtggcaatagcaaaggaattccaataatgcttatttaccatatgtagtccactgttcccataaattttctgttgtaacttgttactagaggctccttgttggcatcttttgtcccttcaaaatcctggttgaacaatagttaccacaatcacaattgtttcacatgattgcctggaatttattggttctagaaaattattctatataaaaagagtaaatttgcacttttgcactagctatttgtcctttatttcactctgcactggtgtttcaaacaatattttcactttgcgctgcccaaagtcaccaacagtattgcagtttgcaccagccaaatctcatgttggtcttatccaattgtctgtcgtcgttatgaatcaagcacctttggtgatttccaacaccaggctagactgctacagcccagtattgtgttgtgttagtggttatacagttaactggaaatgaactcggctactgaaaaactacaaccttcgttagcttagggtggtgcaaagtgaaaacattgcttaaatgaaactactgcaaggtggaacaaagaaaaaaatggtgtgaagtgcaatttattttgtttatagagttaagaactacacatattgcaacccgccaaaaattaggcatctcagaacgagctaacagttgatatctgatatatctaaataaagatgagtggtgaaacatgttgatttctcacatcaaagattgatggagaaattgtagctagccatgtgaagttagcggttacctccacatctgtgtagacacttcggactttcaaattatgttccacgaaggtgcaatcttcattcccagtagcagctttaatttcatctggtgtccacctgtatggatcataatcgtaatatcttttatcagaagtaatcacttgctgggcagatggtgaaccatctgaggttgtttgcagctggtcttcatcttcaagtaaaaattcattaacaccagaaaactctttaaagatggaaggatctgcattcacatctgagcacaaaacttcattggatgccccatcatcctcaaaagcacaagaacaatttccaagctcatttgaacatgaatgcgattttgaaagcctgtttatcacttcaggtgtacattgaacatcacaagtgtcagaaaaggcacaatctgtgtgttgcaaaggctctagtggtgatgttaactgagttggctcagtattgttttcttcttctagcctcagattactcatttgatgaagtgtatcagcaaacttcaggggatcactgaaacaatttgattttgattcactacgcatgcaattattttgagtagacaaaggttcactgtcttgttccttttcatcgggtctgacctttgatatatcaaacagtgtatctgactggacattgtttcgctcaaaatcacaagtagcttttccagaaatcacatgaccaggaaagtttgccagggtatttgaactgttattgctaccaccagctaattcttcccaagaatctttagattcagatgattcataagatggaagaagctgacttctatcaactatttcactcgaatctgactgaagggtctcatcatttactgtcgttgaagcagacgaaaagtttgtaacgttagtttcttctacagagctcttttttattactccatatccttcactggagttgttaaccactgaagtttcttcaccattagtggtgttggtatgtgcttcagcatcagatgtataggcttcctttgtaggacctttcacacagcccattaattcttgctcgtgaggatttgtagagctctctgggtttaagaaagagtctgaagcagtatcagtcaaagttggttctctgccagaaagacgagaattttccgttacatttcttgcttcaggttgaggcttatgatcatttgggtaacttatgctaccctccttactattcgtcgtgtgaaaaggcggatagaatctgttaaataccaaaaagcatcaaacaaaggtcagttaggttaaaatatgcagaaaaaattgtcaaaagagggtgtctctgataaagcagaaggttcaccgagctgtgttaggaccagtatatagtccctgtgcagtactagtttgctgccctgatatattactcttcacaagaccggacagattcaactgcatgattattatgttgtgtgagtttcagtttctcaaaaacagccattttcaagttaatacagaacactctttaccttttgctccagcataaaattgtacagagggctctgaatgaggaagaaatgggtcagacattttgaccttgttacatgtaagcatgtaataaaatgtccaagaaatacagtgaaccagatatgaatctttaatataaaatggtaaggtactgaatattgccttgggtgtagagttgaaatctccacaaattattactggagcatcattccatgtctttgatagagcatacactcgatcaagaagcgtccttacctgtaagtatgacaagaaaattagtattcaaataatacgtatgaaggtgcataatgtactgactattgatggtcaagaaagatgatagaaatactaggtaatgcagctatactttgtttcagtgatgaaagtataaaacaagataatagcaaaagaccacaacccacctagtcatctacaacgagagggtggaaaacaatgcacgatctcaaatgatgccatgaaagcatcagaaagcaacacgatggaagataaggtgtacattgttgctcagtacttaaggtctaacaaggtgttatttctttaccatgttatactaaaaacaaaagtgcttaggccaagaggctaattctggtgaaaaaaaaatcatactataaaagtctgaactaatgtaggaaattaagactcacgagtgaccacaacataatacctgaccaagtttgatgtcccctctctttggattgtaaagaacatgagtattgcatacaataatttgcttagcttgttgaggatggttagggctgtgaaacgaaagaatggttataaaaacatggatagataataccaatgtggacatgtgggttatgaaattttctcttcaataataaaggaacgtggaataggaactacacaagccagaaacaactaataaaaaggagacagcataacaccattgtcacaactcacaactgtgatgcatagtttagaaatcttgaagtttcaattacctagactcagtttgcacatttcctggaatcaccgactgaaaaatataatgaggaaacgattagcagatataggccatgcaagattggcagcataaagaaagcttcaattcaaagtgatcagtagtttgcccaacgatttcaagcccacctctaaaacacaaatctgtgcaacattatcacggagatcaatcttattgaactcgatatcctcttgatagcgcaactgaaacctacaagatgaaaaattttggatgactatgagaagtcaaagtagaagttttttaatgtaggtataacatcaggagaaataattttgtatcatacaaaaggtttctttctttaaaaaaaagaagaagaagggaaagacaggattgacacacctagctgttcgccaaaagatcgcacatccatcagtggcatttccagtccgcatctgtaccaaaggtccagcataatgcgtaaatcatacggtcaagcagattcaagaaaattgtgtttcctcaatggcaatcactaatgaaagtttcagttctgcgcatgctatgtaatcaagtaactgtaaatgagtagttagaagcactggccatttttgcacaactatattttgtccacttcatcaacagagtaattcctgtgatatatacccactctgtcgatttttatagggaatattttcatttaaaaaaacaaattgtagattttgaccaagaattagtcaaatgaccagtaaatttagtgtgtataaattataacgatagatataaattcatacttcaaaatgctttcgaacatcggtttaaaactattggatattaccttccatatgccattatatcctcgagttgccatttcttgctcaaggtctgtaaatttgtcaacctcctacaggcataaccaaggaatataagtctaacgtgtgtcaatatagatcccatttaatcattaatatcaaagaaatgtgtttatagcatacaggttatattcatcaagaagtgtcaaaaaactaacaaactttatcctttgtatgatttctagttgacaatgttatatgcagctattgaactagcagggagtgaccatgtagactagtggccttgcaattccttgcaattttccaaatttcaacttttcgagataacataactagctccacgaaggtattaccacttttttaactattgacttagcagcacaacccttctgaattactgcagtacagcagttataaattacctgaagacataaaatatctggagaccacaaaccaaactcgaacactaacttttccttccgccagttccaatccatgatgaaagatggtatgcgctcataaagaaactggtgctcctgggccagataatcagctagtatattgtatgatagaaccttaaacctctctgcatgataaaaaaagatctactcaatataccaaaggaaaacacgtggtaattttaaaacaagaacatcaattccacacacataatgattactcgactttaatactcttggtctaaaacacaccatgtccatgggtaattatctgactgaattattcatatacggaaagtgtctacttttacatcttcaatacttctgaaagtttagttttcacccctcaactgtaaaactgaatagattacaatcataagcttgaaataaggtgtttgctcatggataagatgcccatggacccttttctgtttccctctcccattctctttgcccattatcctgtcacagaacaagatagttagctgtgatattgatttagctgaggagagaggggaaaggtaataggagggaaagagaaactgtatcacttttccaatgccttgctgtggcatcagtgctagcatggcagtggatgtggcgctgaagtctgtttcaggcttgatcggttaggggtgtaatttatctggtatagaaggttcagtggtggttttcatccaccttgagaattgaggtgtgaacacgtaaacttttggaggagttgaggggcataaactaaatcattttccttcatatatcatatatcacataccacatggcacatctgttgtctaaaatcaagtgaaactataatccattactagtttagtacacaaaccaaattgaaaagctttcaccattttgacttcagagaagtgctaagccatcaaatattaagaaactccgatcattaataacctaaaagtttttccacacaaaaagtaaaaagcaattacactattttttacttcagagaagtgctccctggatggtttgctatgcgattctactactactgcagtgctaagcattgagacagaatatatcacagactctggaagatgttaccggcttggcgtggtggccgatgctgcgtgaatcgccaccgtcggcggtactccgctagccttggtgattgctgcggcgcaccaggcctgaagccggcgtacggcggccggaaccctgcatttgttggcccacgccagtacggctgcggatgcccctggacatacggattcggggtcgcgtatccgtactgaggatcctgtggctgcggcggcgggggcccgtagttgtacggcacggccccgtagggcgggcccggctgctgcgggtggccgtagttgtacggcacggccccgtatagcgccggcggcggctgaggcggcgcgtatccgtacagcgacggaggaggcccgcggccgccgccgcggcggagcgaatcgttggaggcacgcaccgcgctgtggtgggagtcgccgctgacgagctcggcgccggcgtcgtggtggtggtggggaggcggcgtgggtcgcccggagtagtagcctcgtcgcgggcgagcggatcctcgggcctgcaagagagagagattgaggagatggggagggtttagactctagaggcgaggaaggatgggggattcgggggagcaatccacgaggggagatgggcgggcgggcgtacgttgtagtaagcggacatggcggcggcgcggcgtaagaggcgcgggaggcaaggcgcatcgctttggcggcgctcacgacggcgacggcgggcggcggcggcggtggcggcgcggccgcgttcgacggtcgagtcgctgtgggggtttgaggcccgcgtgctgatgacgtaaatagtccttcagtacgggagggtcactttacgccttcggaaagcgatagcgcacatttgctctccgtgttcagatatcgaaggtgaaccatcgtatcggaattaagggctggtttggtttgatgtctaaattaggcttatcaatatttagcaatttcaatagtgtttagtgtctatttggtttgaagctaaattttggcatgcctaagaaaataggccatttcaatagtgaacttaggttattttggcttcaatctaaatataactttgccttaccaaaattagtcatgccaaaacttaccaaaatttagcattgacaaaatttgataaggtctatttaggccacaaaccaaaccaaccctaaacttttttggggttaatttcttgtgtttcaagggagccttgcaaatctctgggcctccctttctggcacacattgaacatggtttgaattctgatggatcctttcaattttccaacatgggatttcatataatatatagaaattcatataaacttttcaggattgttttacacgaatcagctcaattttccgttatagtcgaagaaattaaggtaggtaagaaggaattaaggaagaaactaggggaggttagccgaatagacgataggggaggagtttgtataaatcctccgttctacacgaggcctttcactaggagaggagtttgtagtaggctatcgtagagccggtgaatttaatttgaattgaaatgcagagggattagggaacaactgcacaatccatgtctatagagaattagaatgccaccattctgtgggcaaaatcacttaatactttaacacatcaacacaagcaaaaatatcactcagcatacatgtacgatgcaactaataagtacagtccagctgtagattgctgcaaccgcacaagtacacgcataaacttttgccaagcatggcttgctcgcatctataaacatatcccatggtaacgtatggtttgcttgtatgcctattgatactgcagcgagggtcgcctccttcgaggattgatgtgcctaaacatatcttcgaccatgcagcaattgtatatactaatctggggttctcgagtctcgactatgattactggaaaatgtttgtatcaacagatcctatgtagcatggcaatcctcggcacgcatcaagaggtttgttgcatcctattcgcagaaagtggaagctacatgagctgcaaagtcctcagacgctgctcttgctctggatccatctttggtggtgtataacacccgcgaaggtcctccaccacatattcctgcacatcatcaaacagtggaagtacagagtattaaacgagctgattaacaaatactactatttcactggttcagaggaaatgacaagtgatgacttcaagcagtgtttacctttgtgagctcccttttggtaagtatgtgatagtgtctctgcaagatcctctggacggctacggttgcagcgaagaagccatatgcaactccaagtatagcaaaaacaatgacaaatatcacagccagagcaaggcaagcttctattgaagcgggaaaatccagtatgccccacccatagcaacaattgcggcatccagccaggcatggatcattggtgttgaaagacgaacactgtactatcagtccaatgaatcctaccattacaaagaacaccactactcctgaaaaaaaaatgatttgacacagatatcagtaactagctttctagaagagggtgctaacgccttttacttgaggaagcttgtcagataggagtaataacttcaaaaattgtttatcaaataaaaataagttccaacgacctaaaattttgtgataattgaaatgttgccagaggtagagagtgttactctgggtgacatgtttgacctactatatagaatttctattttcagtgcacaagaaaaacatgagattatggttacagcagggaagcaagattgattttcattaattgtatgcttgtatgacacaatagacaagttgagtcatgagtcatgactacattataaatggtagtaatgagcatttaactgcagcagatcatgtcaaattatcaatcattatacgaactgcaatcagaactgaaggaaaagaattgcataccgacacagtagtaaaagggcacaggatgatttgataggatgtgttcccaaccatcagaaaaactgtttctaaattgtccatctttatccaacagataagccataccaccgatagcagcaatgacctgaaaagcaaggcagataaaaagtatgtcagagcaccataccaaaaacagaacggtgcaaaattgtagtaactcaggttcacagaggtttcaacaaaagaaataatatatgcagtcttttctgtgtttaatagagccagcatacatgtgaatgagaaacaacaacgagcaattagaaagaaaggtgttcttacagtctgtacagccaggaatacaaggaaaacatccctagcaacaaacaatcgaaacatcatcttgcgacacaggttgtcctccagacattcgacacggagatggaattgtgccttacatgttgtgcagtgagaaaaggcagttccttcctgcagaaacaagcgcaataaagcagtattgtaaaacaaggtctacaaggccacataacttgtaagattaagccacataaggggaaaaactatgccatataagctttatatggtggggtgaaagcacaataccttgccataaagtaagttaagtgtaataaagctaaacaatacactagtacattttaagaagccaactctatcaccatcaaaaacatctcactaacaagcatttgaaacagacgaagctttgtacactggacatataataagaataattcatcaaagactatgccttccaccaaggttacatatcatcggttcatcgcgttacaacagcagaggcgacactaggacagactagcagagctttttccggaaattcgtaaatccaatgttgggaatgtaggtactagcaactggcactttaccttaacagacctccaatgatcaaggcagtagcgatgcacgaactgctgcgtccctttgcacatacaaggagaaatcagctcatcacctgaagcagcacacgagcaacaccgatcagttaaacaggccccgcaccgcaccgtatcaaaccctaggagatttctcctcgtatgcattctcaggatcaaaaactcctccgcgtgccggcagtaaatataatctcaaacacctatgcgtcctggagaggtggggtggtgcggcgtacaagccgcgaggcgagggggtttaccgggctcggtctcggactcgaggcagatgcggcagcaggcggcggaggcggcctcgatctcctcgtcctctatctcctcgtcctctatctccgccggcgagcgcggcggcggcgggtgcgcgaggagggggtcggtctcggcggcggcagcgggatagccgccggcgtcgcggtgaatccgctgcggctcctgcatcgccggagcggagaagagaggggaaggattggggattggaaggaaggaattgccgaatgccggagcgcgcggtctgaggaggaaagcggagtagcggacgcaattattttctctttcctcggtcgtttgtgtttttttccccttttctttttcccggccggatactttggctgagctcgaggttcggggcaatttaactatttgccacttttaggtttatcaattattcaaatgtcttttttatatatatatgtttaataatttaccactgaagagaggtgatttcttaactatttgctacttttgcctatgtggggagccgtgcccgcatggaaagcgacgtgatcccacccgtcagcccctcccctctccttcttccccaccttcggccgtcgtatctcctccatcccggctcgcctcgccatgtacagctgctcgtgcgccgacgtcctcctgcggcggcagctggcgacccgcgacgacggtgtgggcggaggtggccacggcggcggggtgcgcggaggcggctgcgggttcttgccgccgtcagagctgacaatggcgcaggacgccggggcagcggcggcgcaggacgtaggaccacggcagcggcagcgctcacagctgagctgggctagctcaggggaaagatgtaggggttgcgacggccagaggtggagaagaagtagaggggaggggttgacgggtggggaccacgtcgctttccatgcgggcacgccacgttggttcgccacgtaggcaaaggtggcaaatagttaagaaatcacctctttctagtggcaaattattaagcacaaacctaagaagggcatttggataattgataaacctaaaagtggcaaatagttaaatttcccgagttcgggagacaggttctcaacttgcctcttgacacgaaaactaagcaaacaattagaacgagattagtttagtattagcctaaaaaacttgaaaataaattaatataattttttaaaataacttttctataaaaaaatacttttagaaaaatacacaccgtttaaccgtttgaaaaggcacacggaaaacgagagaggtgacttggagaaaaaaaaggggaaaaacacaacatttactctgtatccgattgtctcacttatatttatactccctctgtatatccatccactcaaaaaaaatatattatgttttgggacagagagagtatgtttttaagtcaaaatttaatttaaaaaatattttactgcgttttgttgtagtttattttatagtatttgttttcaccgttaaagatacaaatataaatttttcactcatattggaagcattagctttggctttggcttattagggcaaccaatgaggctcttaagccactaatttgctaatcaatatatctgaacggtctgatccaactattcttagctttggctttggttttttagggcaaccgatgagactgttaagccactaattgccaatcagtatgtctaaacggtctgatttgtgtctagaaatttgttccaataatggattgacagtcccaaccgtgaaatattaaaaacgtcaggtggcgtctagtcatcagggtttataaaactgtgggattatcgtggttatcacgtgcgataacctataaccttctcagtttttaaaaccacgatatacctcgagataactgtgcggttaccacgataatcgctaaaccgtagggtgacggtaaccccacccaaaacaatttgacgaacccttctagtcgtacgacttgataacagtgggactagataatatgttccgatccgagtcgtagctgtgttacaagcaaattgtcaatttgatggttgtaaccccgttcgtttctccaactaagagttggatgtcaaactgctaacagtgtgtttcatgtgaaaactcaattaatatgaaagttgttctaaaatataagattaatctatttttcaagtttgtaataattaaaactcaattaatcacatgttattaccacctcattttgcgtgaaacacttaaacttttatcttcatctgaagatcatcttcaggagatttagagagatgtgaggcggtcaacgcaaacgacgaactaagacacgcatgaattgaccagatgagataaaaaaacaaccatttccagcaagtcagcaactaatacaggcctaaaaataatgaacaaacttgctcctcggatttggaatgttaactttagcattcatttattgcaagtaaatggtcctctcaagaatacgcttccatcatgacatacacaaaaccatttcgtccagaggttctcctgtaattaacagacaaatttgttcttacatcagaggttgatatgcttatataaccattgattttcaacaaatagagaatgactgaataaccagcataaatggacgttgttgatcttgaagtaactggtttaccatttaattatgattggaaactaacaaaaaaaataaaattgttggaagctcctgtttcaaatttatgaatcgtgtactgactatatatggagtgcatgcaaatcatcactaacccctagggtgtgttcggagcttctagttccctaagaactcttgaaggcataaacactgagcaaaatccacaaacagggaggaatgcagaaacaatgtaatccaaagaccatagtaacatttaggcatacctcaagtagtaagtgtagcttgtaaatacaatgcccccaatagcaccaagccctagaagaagaataagtgctaccaaccaaccagacattccattcttcctagaatttgtttgctctgccatgtcgacaccacagctctgctcattgcaagcttcctgtcttgcaggctgccaaacaagaaatttaacaagtgagagggaaaaaaattaccagcacaataaagaagaatatatggcatatcgagaataaaggtactctatacttaaatatgatatgaccctgttttcaggagcttagctttgaaacagttattttttttaaaaaaagaaaaaaaatagtacatcaaacagccaattaaccgacaaggtacagcgcaggacaatgatttttttttcttgcaggttcattgcttatgcttcccagttgcctaccaaacaggcagtgcctgtattacagtagaactgtagaaaggtttggtcaatcttcattagatccaatgataaaacattaatttcaaagccacatgtattaatcaacatcagattcatctattctaaaacatcaaatatctgatcccataattgtggagttacaatgatttggttcaacttttgtgattgataacaagcttcaacagttcaacagtaattatcttgacgaaatgcaaggttaagagtaaatcagaaaagagatgataaatcatgcatgaagccaaacattaagagctattccagagaaagtacaaaaggcgatcggaaacattaagttaagaaataaatgtaccatatgtgaaaaagaatgaaagcaaaaaggcaatatgcactactatagaaacattatgaatttgaacagccctcactgaagtaccatttcatctgctgaacagctagcatcatctacaggataatgtttgattgtggcatcagataaatttccataacaagcaacatcacgataccgcacaccaccatcgcatggcgaggagcacttcatccatggtccagcaacccaatgatagatttctgcatatattagtatactaccaatcacttattctccaagtaatgtatcaacaattgacaactgaatcgcctgtgaacaatttcagcacaaattatgaacggtaaagaaaaactgcaaaatggtctccttgggtagtactaaatttgagtgcgactctagtgcaaagaataaaaaggtagaggaaacattttaatggtaaattgagcaagaacaattgaaggacctaagaacatgaaaagaactaggaacagccaaatatctgaaagataaatcacagaatattttgtaaacatcaaattattccatgcaaactgcaggattcacatgttcatgaacagttaaatataccgtgtggttttaactgcattgatagctcagcaccactcttacagtaacccatttttctatgcttgatcagaatggttgggtcagagcaatcagagcagcatacaaattctttgccaaaatccagcttgttcttgcaatgcccacatttgtttgttagctttggggtgcctgtccttcagaatataaacaatgtattagaacaccagagtaattcattacaatgtttctgtaatgtttgaaaaggatggtctagattctgcgcctacttatgctaaggatggatgcagaagactaatgtagaatatagtagatgattgagcaactttccaacaatacatatacccatgcacacacctgttatgcagcaatggaaatgtttgtggaatggaagacatggcgggctttttgactccgtgcaaagaccatcacaatcatctgattgagaatctaagaagtggccagcagaacacactctagaccatttgctttggcacccagtccagtagcaccctgcatgttgaatgttacacttctatcataatgcggtattgctgactttaccatgagtccatgaacatgcatgacacatatatttagcataacttaaaattttccatgccatgaccaagcaacttaaaaattcccaagaaatgccctgaaaggatattttaatagcataactgtcactaaataaagtgaccgttttttgttcaatttaccaatcaagtgagtcatgcagggtttataagtattccaatcatttcgatttcgttagctggacataatctccagtctttggaattctgagttttaggactacgcatcctggtttgcgaactgtgcagttattattagctcatcagtgtcacgtaacaaagtagatcgaagaacaccgctagtccactactcttcaagcaactggacactctaagcaatttggcaaatttaagcagtcgactcgaaacctgggccaattcgtccaggaaccaaattattcatttcctgaaaaataatactactaacgtaaagtcgaatctcgaaaagccccaaatccaaatccaagtgcccaactagagtcctccagtccccctagtcctcctaacaccacatttcgacttctcgagctctccggagcaagccagttcctggctgggcttccgaggcagatgcattcggttaccgtgggacgggacgtcgaggcaggcggcgacggcgaggaaggggagcgccagcgcgcacagccgcggcagcgccgccgccatctccggcggccgccccgccgtcgaggaggatggccaagccacggcctcgtttcgttccggggtggcgcgagaggtggccggtgggggttggtgactcggtgcggtggcgcgtgccggcccgcgccgcggtggggaggggaagggttagcgagtcgctcgttcgctcgctcgccgtgcgccccccgtgtcggtgtcggtgtcggcgccgggcaggcagctgttttcggggggggctacgggtgggttgggcggtcgccgcgtcgcgcggtgatcctcctgcttcgggccttcaacgcgaagccggcgagcttgggcgagtacttcttttgcctgggccagaacagcactgcgacggaaattcggcccatgcttgatgggctgggactggactgagacatacgtgcggcccatgtatattcgggccggaacggtattaccgcgtacgtgaggccgaacaggtttcggaaaagctaattcgtgtgtacgtgttggcggcgcgcacgccggcccactaaggcccatgcacgcacgagctgcgcttctctctttttttttctttcttttttagccgccgtttctttttttttttgctgttttttttcctgccgtacggataggagaaaaaaatcgtaattagtttagattagtttcatatttttactagggattagtttactagtaattttaaatattaactttaaaattttcaaatttagatatgaaaattttcaaatatcgagttgaaagtttttaaatatcaagttaaaagtttcaaaattttcaaatctagacttgaaagtttttgaatcgagttaaaacttttcaaatcttgagttgaaaagtttcaaatctcaagttgaaagttttcaaaattttcaaatatagacctgaaagttttcgaatctgagttgaatctcaaattgaaagttttcaaatctcaagttaaaagttttcaaaactttcaaatctggacttgaaagttttcgaatctgagttgaaagttttcaaatatgagttgaatgtcttcaaaatttgaatttaaaatttaaatctttaatcaaaagtttctaaatctaacttaaaaaatcgaaaagaacacgtaaatgaattaaaacatgccgaggagaagggacgtgaaaataggagaaaaatcaaggaaaaaaagagagaaacgtataagggggaagggcgtgggccgtgcgcacacgcgcaagtcaagaagccccaacaggtttggtccggaacgggaggccgacacgcgtgcggccatgtactatggcctgtgggcgtgtagctggctgtagccggttgcgacaactagctgttaacgaccaaatttggtaatcgtcatcggagatgaagattagactgaagcagaatccaaaacagagatcgtcctggaaacagagcgggaatcagctagatcagaatcggctgcggctttaattggcagagttcgagtcggacaaggttagcgattgagccgaatccgacaatgtgacacggtatacgttgtcaggttgagttaatgtgcttcatgaagattgccgtgcacggattgagtcctgagaaggcaactgtatctattaattaggatattttatgtaatttccttagagatatgtttgggcaaaagtctgccgcaaagacttgtggtatcttagagtttgttagagataagagtcgtgtccgacatggacgtattttgtaatctcgggtataaatagaccccgagccccatttaatcaatcgaacacacgttcaatacaatctcgacgcatcgccaccctttattttcgttttgtttcgacgagttcttactttcgggttgagctacatcggtttcgatcttcaactagaggtaaaacttattatggcggcttgcgttctcgggattagtgcttccatctttatgacactctaatattgtttatgtaattcgtcgaattatcatatatccaatataatctccggcaatattgctatctaacctccaatcggctaacgtctgttactagaaggcaaccgatcaggttaaatactgacgttgacttagattatataggatatctaccactctatgaaacatccaacggcttgattgtctagatattgtccttcttttcatacttatagctgcatcagttgagtttgaccttataagtcgtgattagaatctcaatctctagtctgcttttggttgctgattagggtagcatcggggtttcagccgatcttatctgatttaactacttttatcttatatacttgattgatatattaaatctgccctttatgttaaaatctcgttgcatttaaatatattaggcttttgtttggtatattccacttgctttgatatcttaatatggagtggtatcggagtattagccgatacatgctatatctatctgatcggctatgctatgaacatatataatcttgttgttaatatatatttcgatctaagtgatttatactatctcggcatggcgaccgatctaactcaatcacttgatttaagtatatatcgacataagaattatatattgctaatatctacagccgatcgagtagatttagttctttcttacttattcatgactgccgatcgatctacatatgacatcggctcaaagataaatgatacgtcatcggcaactagccaatcggctatcgtttatgaatttaaccgcggtttctttgtctttgtttattgttgattgcaggatcaaatcaactagcatgctcacacacctaaaggcaagcttttggacctgcattggagttaagcagatctcctaggcctcgtgtttttacatcaacactagcgcacagccaatcaacttcgagcatgtgcaatgggtatccctgatccgtgcccctactcatgccgtcggggttttactccggagctgtctcccagcagaggggcacaacccagctgcgaggcgccacgcgcctccctcctctcttggccccttttcgtcgagccacggaaccgggctccgcgttgggcgcaccgtggctaggggagtagctcgtgggcactgctcccaccctggatttttctcttccacccctcgccctagtagatccggcggtgaagaggagcatcatcggcgacggtgaagagagagaaagaggcagcgacgggcggagggagagaggcaactttgtttgtttagagggtgtttagattcaggggtgtaaagttttggcgtgtcacatcgggtattatatagggtgtcgcagggggtgttcagacactaataaaaaaataattacagtttccgtcagtaaaccgcgagacaaatttattaagcctaattaatccatcattagcataggtttactgtagcacccgtattgtcaaatcatagagcaattatgcttaaaagattcgtctcgcaaagtagtcgcaatctgtgcaattagttaatttttagtctatatttaatacttcatatatgtattcaaacgttcgatatgacagggtgtaaaattttaggttagggtctaaacaggcccttagactgtttgaggtaacttctctttaaacggtgtacttttttaacagaaaattttcaatatcatttggatcgaactaaacctaacgtcgtgtttggcagatcaggttgtgaacttctcttccacgtacgtaaaacggagtgattcattagcgtatgattaattaaatattagcttaaaatttttttaaatagattaatatatttttaaagcaactttgtagaaacttttctaaaaacacgttatttaaataattcaagaaccgtgtgtgtgcggaaaacaagacattaaaagttaggaagttacacttaaaacacagctttttaaactgctaaacggtacgttttttacaaaaagtttatatacgaaagttgcttaaaaaaccatattgatccatttttaaaaataaattagcaaataattaattaatcacgcactaatggattgcttcgttttccgtgccggaaggatgtattcccaacccaaacaaaagaaccgagccttagccatgatcaagacagcagatagggtgttactggttttctccccattcttcccaactgcaaactttcagccgaagaccatataatttgggaattgcaaagtcggttttaggagccagtcctcttccacacaagtctataatttgcatactcgagacacattactttgcatctgggccgcgatacgcgccccttcaacaatcaacatggcgaagctgatcatatctcagcgtcattgtttgactggctcttcgagactctctgtccacgccatgcgagtatgcgacgaggggcgacccggtgagatcgaagcttgagtctgttaccctgtaatgcccgaggcgccaagtgcccgattgagacgaatggtgatatatgggttcttgttctcacatctggtcgccgtaacacgacaccaaccatgcatccactctgccatcggtcgagccgagcatgagttctccctaatagtacattattgcttgtgaccggctccttaattcccaaatcatggctttgttcccgggtaaaaagcaccattccagtaggtaaaaaatattctaaactcttaagggacattcactccttgtttcactccttgtttgtacgtcatctaaatgattataatgaaactttaaaaaaatcaacaaaagatattaatatgtgataaatcactctagaaacatacaatgtcagatttaacttatacaagtaaaaaaccaattttgattgtgaatatgtgttaactagccatagtttaatttttttttcacagcgtgtagaatgaattttatcttgcatgtttgtggagtgatctatcacatattaatttatcttgttgaataattttttataactatttaaattacatataaataacgagtaaatgtttacttgaggtattagaattccctcctcgttcaagtatcgatattcgtttttagcgttattgtacatccgtgttagcttcttttatctcaggccttatttagttcgtgaaaagagaatttttaagtgtcaagtctgacgtttgaccggatgtcggaatgggttttcggacacaaatgaaaaaactaatttcataactcgcgctggaaaccgtgagacaaatttattaagcctaattaatccatcattagcacatgtagattactgtagcacttatggctaatcatgaaataattagactaaaaagattcatctcacgattttcatataaactgtgcaattagtatttttattttatctatatttaatgtttcatggatatgttcaaagattcgatataacgtttttgggaaaaaaaaattaaaaactaaacaaggcatcagtaggtcccccaattggctctattcgtcagatgagaaaaaggctaatcttgagctggcacggccatccatatcggaatcgccctgacctttcaagggcaatcagtagtactacctccatcccaaaataggtgtagccatgagtttctgcgtccaactttaatcatctgtcttatttaaaattttttataattagtatttttgttgttataatatgataaaatatgaatagtactttattcgtgatttatgtttttatttttttttaaaaaaataaataagacgaatgattaaagttaagtaaaaaaactatggctgcacttattttagggcagagggagtacttccagtagactactactcgtagcacaattacatgtaacatggtggatcgatctcggagaggggtccctactttggggtgatgatgacggactctttccatgcatcttcccttctagatctgacagtgacaccggtacactacaggtgcggggagagtgagacaaagacagcgaccggtgacaccgatcaatatctaacacacgcccgtccatcctccagtgccaatgccaacatttgcacacaagaaaaatgcaagtgtccacgcaccgcgtcaccgcgcgatggggcgcgcagagcggacatcagagcaaggataatggtgaactataagcaagctaaatacttacgtggaagagagagataaataaaagtggagagtgttggctctcatgtaagagctagctccacacaagttctaagaaatatatattaaattcatagagagataaagagagaggatgaaaaaataaagctaacctattatatatgttagctttaacattggcttataataagtagtgggctatactactaaacttgctctcagcgcactggcgcgatgatagcccgaccatttcgatccccgcgagtcacgccgcccctcgccaccgccggggctcgctcgctgcttggctcccgtcggtggtgcattggcgcgtgcgtgcgtgttcgtgcttcaaaaacgcaaggcgaagagaggtaggcaccgcgcgacggctttgcactgccttgtgtgtcggttgctgcacgtctcgctcacgctgcatgcgccacgccggatcagatcgcgcgcggggcgggacacggaccgggggggggggggggtgggtttggcgcgcgcggcgcccatcggggtcaggcacacatgcccggtgtcgatcaggcgcctagctaggcccccacctggcagagcaaccgacattgagctggccggcctagcttctcctctctctctctctctctcgccgggggccctcggccaccgcatcacgcacgcggccacacatcgatccgcagccggccggcagggcccgccaggaacgttcctgcactgcaggcgatcgatcatggccctgtacaattcctccctcccatcaccatttttttgaattatgagatgcagcaacaacttgtccatctgcactgcagcagcaacttgtaaaaacaattcgattgcacgcgcgtacagccaaattaagacagcgagtgcgaggtgtgcagcgtttctgttcttccatgccgtaaatccgaagcgagacgtgccgatcgacaaagatacgacgcgctatacacgtaccagcgctatctcttgtcttatgaccggcatacaggcacttcgatggacggacgcatccatccaaaactgacgaaggattcaatcaagtgagcaagtccaaagcacacacagaagacggacagaacagaccacagcatgaaagccggacgacgcgcgcggccttggattttttttttttgttttgcacacgcgtcgatcgacgcatcgaggaacggaaagctttaatccccagacagttctgcatgtgcttcggtttggtcgatgaaacaagcagggctactgcggaattttgcctgtcggtacgttagagcaagtttaataatatagctaactactagcttaaattcatttatagccaatctaactactatcacacttcgtcttagagtccgtgttataactggctacaaatctatagttcgctgtccttctcttttctcatttatctgcttaaaatatatttacagctggcttatagtctgtgctattgtacctgctcttatgcggcgcgcgctcgccaatactcctacatgcgtgatcgcgtggtttttcctggcgcgcgcgcccttcccggtgccgtttttactcgcggcgccgcgggtgatcgatccgccagctccgggcggtcactttcacatcaagaaacggagggggaaatagccagataggagtgcacggacggcagctagcttagcttctcgatcgatcgtcttctcgagcaatgccttatctcgggtgccataccatgtcgacacactcgcatcgcattatcttcgccactgaccgtcactgacatgtgggccaacgcattaagttagaccgccgacagcacatgcaggcgacgacgaccgttttcctgacggttgattgaaacggatcgtccgtttccgttcgttaattggtactactacctacgcgtagcgtgttgctccctaaacaactcccagatcaggcaaaggaagcatcgtctcgtctgcacgtactctaccaagaaaatgatcagcgccatggaggccagaacatgcacacatgcggtgcgacccctcacatggggcaacagggcatgctgcaaactgaagagtcgaagaccacggttccctccccatggataaaagatctggtcttttcagttatcagtgtccggcatatgtatggggatcaagtggtgggggcaaaaaaaaaaaaaaaccagtggcatgatcgggcacagctcgcgtcggaacaaggcatcgtgtcacatggaagaaacccatcgcttgttttatggaccgcgcggcgcgcgcgcgcatgcggaccgcgcggtgactcctgtccctgtgcaggttgacggcgagcacatgcctagctacgtcgtggtagccccctgcaacgtcccacgtacgcgcatgcaaattgcagcatcacgattggtctggaattgtacatttgtactctctgcaccagggaaaaattttgtccagattgcaggggagagatacggttggtgctgtgcgccgtgctgcgaatactgcgtccagtcaggcagactcgagctcggtcggtcacacgaacaggcgtgcatgcatgaggcacgcaggccggtcaatcgccttgcacgcacacacacatcctcgggtcgatctggccatctgggtcgcgtgctggtttgggtggaatcgagtttctagttttgtcttgcgttacgatttcccctgttcgggtgtgttgtaatcttgttgcggactcgcggagtcgcggtatatactcggtacatgtatattgcaatttgcgaggggggtttgggtttcctcgcgcaatcaagtgcgtatatacttaagacgcgcgcacacatgggcgccatgtgtcggttgagtatccttgtcagggtttgatccagatacatgatgctgtccggccttccagcctacaacatgatcctggaaatgatgtgatgacatgatgacacgatctgaacctacgatttccatgattaaactgagcttcacaacctcgggccacaagaattttcacgtgaagccgttcgaattgcatgcgagtatgcaacttactcctacatcacgaaaaatggtccataccgcaaagggaaaaaagaaagttccaagtgccatggtaaccagctcactcagtgacaaaagtggtgaaagattcctaaacaccggcacgccacagcgtccagccggtgcccggttgtgcgactacgatgcttgtcccctcgcaaaatcccatgatgaacgctaaccattaaccaacttgattacatacggcggcatctgtgttatcacgggaaccgcagaggcatacgtaaccgacgaaaaaaacgcggacgagatggcgaaactgcccctcgtcgtgcaccgcctcaccgggccgaaagccagtcgcgtgcgcgtgcagagagacggcgcgccgcacgtactgtacacgagccggtgcgcgcggtaggaaacggaagcggatcagggggccatgtgaccgcacgcagggcgtgtctcctacgaggccacgagggcagagggagcccatcatccgctcagccgaatcgccgatcggggacacgcgtacggcggaagatcccgtggcatttcgtggtagtaatcgaccaaccctaggcccgtttcgccggcagcttggtctataagttgctgctctgccctgctcggcctcatcatcccaagcggcacagcagcctcgagctgaactgaagcaggggaggggaggagaggagaggagagagcaacgcgttcaccgttgagagaagagaaggaagtaagacgagcgcaatgcgtcgcgtcacggtgctcgttctgctcctcgcctgcgcggcggcgcgcgccgccgccgccgtcgtcaccgacggtgagtgcctagcttgctcgctaactctgctcgataatcactgcgcaggctcagctctaatttcacttcaagcatccatttatgtagcatactgttaggaagttactgcggtttctgtataagctgttttgctgttctgatcgatcctatctatcagcggcaatgcggcatgtgccattagtgtctaaaagctcgtaatcaagctaagctgcctgccccgtgatgatttacgatcttggagtcatggagtgaatagtaggatagatcacccgggtccctccattatccatatactgacgaaatgtttcccccggtcgctgtcatagcatgaagccacgaactcgatcatgcgttgatcattggagtaccatatacagggtatactgtagtttggttaaccccacacggccaaatcgcattggggcatgcatgcataatcacaatctacatgttgcatggctggcaaagtaaactgaagtacacgtatagttaatctcctattaaggtgtcgtggtgtgcagcaccagatgccgaccgagcaaaagtagtagtagtacaactatacaagcattaaagcatatgcagctgcagcccatttgcaagaaactattcttgctttttagtactagtcgtgaacgtgttagatgcataatcagatatgttctctggtccagtgttctggactagtagtatgcaataatcagatctggagtatcatcgtctgccagcattaggcaacgtttgatgcgagagtgcttttgtgcgctctcttgatttggtttctcgtttgttttgccggccgcggccctggttgcgttgcatgtggtagatgggatggtagtgaatgcacctgggccctggccgagccagaggaactgacacggtcatacagccctactagctgccggagcccagaacatgcatgttacactaacatggaccctgtcagcttagcagtataccggtcgcagttccattaattaacagaacacgagatcagacagacagcctgcgtgcctgatctgatgctctgaatcgatctctgctaaccgcagcatcacctccaacaactttcttcagttgcaggctcgcagtgcagcggccgatttgaatatctgatttagtggattaatctgattaaattaatggtgactaaaaaaattaacgacgtgtgttgtgcagggctgttgccgaacggcaacttcgaggagggcccacccaagtcggacctggtgaacggcacggtggtgcgcggcgcgaacgccatcccgcggtgggagacgtccgggttcgtggagtacatcgagtccgggcacaagcagggggacatgctgctggtggtgccgcagggcgcgcacgccgtgcgcctcggcaacgaggcgtccatccggcagcggctcgccgtgaccaggggcgcctactacgccgtcacgtttagcgcggcgcgcacctgcgcccaggcggagcagctcaacgtgtcggtgagccccgagtggggggtgctccccatgcagaccatctacggcagcaacgggtgggactcgtacgcgtgggcgttcaaggcgaagatggacgaggtggcgctcgtcatccacaacccgggcgtggaggaggacccggcgtgcggcccgctcatcgacggcgtcgccatcagggcgctgtacccgccgacgctggccaaggggaacatgctcaagaacggcgggttcgaggagggcccctacttcctccccaacgcgtcgtggggggtgctcgtcccgcccaacatcgaggacgaccactcgccgctcccggcgtggatgatcatgtcgtccaaggccgtcaagtacgtcgacgccgcgcacttcgccgtgccgcagggcgcccgcgccgtggagctggtggggggcaaggagtcggcgctggtgcaggaggtgcgcaccgtgcccgggtggacgtaccgcctgtcgttcgccgtgggcgacgcgcgcgacgggtgcgcgggctccatggtcgccgaggcgtacgcggcgagggcctccatcaaggtgccgtacgagtccaagggcaccggcgggtacaagcgcgccgtcctcgagttcgccgccatcgccaaccgcacccgcgtcgtgttccagagcacgttctaccacaccatgaccgacggctcgctctgcgggccggtcatcgacgacgcctccctcgtcggcctccgcaagaagacggccggccggcggctgctcctgtaagacgaacggccgcgtggcatcgaacgccgtcgcattccctccattctatgaatatatgaatacaaggcgcggttaaacttgggggcagttggcacgaccaaagttgggtgctaaaatgggtagtattgctaggctcgtttttttggttttggtgtgtactctggtatatgtacgcgtgtgcgcgcgttgcatggttatactttggagctgcgctcgtttggtgttttgttgtgaagaggagaggtgatacgtggtgcaaggtctgtcacaaggggtttggttgatcaacttaaccggaggtgccaacctaaacgcaccatcagacattatgaatgggaagcattactagtgctcacttttttataagtcaattgtgtatttttaattctgttctaaaaagccagatcctttttgaaagttgagtcatacatttgagctatgctcgaaaatcaatcggaaacgaacttaaacatgtgtaaatgatgtatgaaagtaagagtaagttttatatttagccacattttcttattagaaaagttttaatttggatcgcttgtttagctatacttttacttcggaccagataacattttctttgtttgcatcttggaccaccttcactatacatctatttcatccccacccaaaacccgggtaactggaaacaagaggggacacacgccactggcgccgagtggcttgagttcagactttgcgcaagctccatccatgttgcactgtggtcaagcttggcttgctcggtttggttcggctctgcttggctccatcataagtggtgtcgatttttctatctcttcttatatgtaccggtttatcgtaaaagcaggtacaaatatttactacaccgttttgtcatagattttttttaataaaccggcacctataaagagctacatgtattggtttttaattttaaacccacatgtggtgttaggagttcggggaaggcttataggtgttgggtctagagttcccgacacctatagggccgtcccctatttgttgtttgtagtaatagatacatgaataacagaagtaggctaagtccctgtttgattcagcttaggattattataatctagtttattaggagtaagctgagacaaacaagtagattattataatctataagtcagattattataatctgataagctactctagaggagcttttttcagattattaagtggctaaagacccactacccctacatacttgagaaaaattacccacctatgccatcaaccgaacagatagctgagggcattatagactttagccattcaaacccaataatccatgccttcaataatccagacaaataaacaactcacagcttattctatgccagcttattataatccagcttatagtaatctggcttaataatctagattataataatcataagttgaaacaaacagggcctaagaaactttggattgtattatggagtaccagtttgctaaatttatcacaattgatttggtcctaagattttttttttttacttttgagacaattggtttccttttccgtaaaaaagagaaagaactatgattttctttagagagaatccactcattaccactgagttcggcatagttcaacaatatgccactgactttgtcgacatccataatataccatcgcctttcacttaacctctacactttaccatcaccgtcacacactgttagtttgcaacgaggaaaagacaagtatgcccttaggaacgtgaaaaccattagcactgagactatgccatgtagggcactgagagtgataataactatacaaagaataatctacaacatgaataaacatgtaaaaaatagggatagctcaacatattttaagtatgaattatgtacagcacgtgtgcaatataaaaattgtgcaactaaatcatatgagatctcacatcataggacaaagtagtgtatcagtgaggggtttggaaggaaaatcatccatggaaggtgcatagcacaatttgacagaacagtgcataaaatccaatgtccaagtttggcataaccaagttcgaccacaacatgttccaggacagaaaccaacacatggctaaataaacaagttaagtggcacagcaatcggcacgacctctttcgatgacgacgacggcaacaccagctcttcagaagggaagccgtcccttagttgcgagttgcgacggcggcgctgatgacgacggcagcaccaacggctgctctccacaaggggcgtcttctcccatctgcgacgacggctcttcagcagggggcggcactgctgggaacggtgctgggggcgtcgctggggacagtgggttgtggcgacgctggggatgatggtgggggcgacgctgaggacggaagtcgaggcgctgctgggaatggtgctgggggcgccgctggggacagtggtcggggcgatgctggggatgacagtgggggcggcgctgaggacggcaggggcggcgctgaggaaggctgtcaaggcgacactggcgacgacgaccgcgccgacgatggggacggcggtcggggtgacgctggggacggtggccgcgccgacgatgcggacggtggtcggggcgacgctggggacggcggccgcgccgacgatggggagggaggcggctgtcccgtaggattagggctggccatagcggcgaggggtcggtgggggcagccagcggatggggcgtcgcggtgggcgctgatgcggcatggcggcgggcggagaaaagccgcggcgtcgctgggaagatggcggcgctcgagaatggttgattggggcggcctggtcagtgctagggttagatggctcaaagggtatttcggtcattacgggaaaaaaataacagtacaaacggcgtataactgacagactgtggacggcgatgataaagtgtagaggttaagtgaaaggcaatggtatattatgaatgttgataaaatcagtggcatattgttgaactatgctgaactcagtggtagtgagtggattctctcttttctttatcctactatctctgtttaccttttctcatagatttttattcgcgcatacttagatcattcatagtgcaacaacatgacgagatcctcacaccccatctatgttgtcgctccacataggctaggcccatgtcccttagaggatcctcgcatcttgcagaggacacacgtgcctcatcaggggattaatgagcaacatgatattcacccacatcaaaccatcatccatggaaatttccttagttaccttattattagtggatgtacattagtttgtttatcttttttaagaacttatgtactttatttgatagcaagaagtttaaaataacatattatataagtgatggtaacttctcccatagaaagattagaaagatcgcctaaagtcaggcgactagggaaataacaagcatgcatattagtttagcccgatataatctcttaggtatttcgtatcaccaaaaaaaactatactctctttgtctcattttaagtgcagtcataattaaaaggcaacaaaagtaatgtactcagattattaaaaggcaacaaaaggaaaaacggaattaaaaaaaaggagaaaaaggcctccaaagaaaaaaagggaaaaaaaagaaaaaaaaaagccctttgacgttggaacagtccaaacgtcgagaagctactagccccgctagggttcgccgccgccttcccctcccccataaatcccaccaaccccccctctcctcgtctctcgccttcgccaccttcgaatcgaaactaatcccccacacctccgcgtgcctccccccaatctcgagcgcacggaagccgccgccaatggtgatcgccccgctcccctccatggcctctctcgccctatcaatccttcgatctccccccaatctcaccctcaccgtcgttgcgtttgttttttttttacttttttttaggcgctcccgaatcagcagacggtggactaccccagcttcaagctcgtcatcgtcggcgacggcggcacgggttagcctcgcgatcgccctcccctctcttacgatttttttcgatctgtttggttctaggttgcggtataggtgtggtgatgcttggttgatgcgaccttgataatggttcgctgaaccctagatagattgaacggagagatacagccacggttgttttgatttgtaaattaagatcgttgtagtggttgttttgatttgtaaataaattaagatcgttattatagttagagatagagaaataaggctgtgttattatagttttgatctggcaccgattaatctggcagactcgctcctcttcgagtacatagcattgggactcgggaaggggatggtggggaagggaggactgtgttagatttgatttgtcacggatgaatgtgaactctctggtttttattttcgaaaatttataggattaaaaatttcttgtttcctgtgctcgaaattgccaggctcgaaaatttctgtctgttctgaaaccaggcaatctttttgatttgcaggcaaaaccacctttgtgaagaggcatttgactggcgagttcgagaagaagtatgagcgtgagtatctgctcctattttgcattatcatgtattcttatggtggatcattgtgtttttcgtgttaatttgactgtggttgctgcagctactatcggtgtggaggtccaccccttggatttcttcactaactgcggcaagatccgcttctactgctgggatacagctggtcaggagaaatttggtggactcagggatggttactagtaagtattattacatcgattgaatttgaagtttgtctcattagttatttaggatcttcagccattttgtcattctttgctatgcctagcctagtacattgtaatttgtatgaggaatataagcactgttagaattttactattgtgtgagactatttctgtgattttagttgatcctttccaatcctgtatttaactattgtattctcatgacactttatgtgaatcctggattttgttgatagtgccttagtgggtgaattagaaagatatatatagttctttgtttagttcttgtgttctataacaatttgtgatgcacacgatgctgatatatgcttatggagagaattcagtttagctttgactcataatatgcatgaatgctggatttgagcatcatatgccatgcattttatacaactttagtactactaaatttgtgagaagacttcttatcttgtggcattctgctgtttgattgcactcatgggtaaagttactgtatgctgtgtgtaacaaagctctgaaattctatttattttgtactaactgtaatcatgtattccgcattgtagtatccatgggcagtgtgctatcataatgttcgatgttacttctcggctgacgtacaagaatgtcccaacttggcaccgtgatttatgcaggtatatcagtggaactgagcaaatacatttaccacaaactgatggttgaaactaataggtcttgattaattacagggtctgtgaaaacatcccaattgtgctctgtggtaacaaggttgatgtgaagaacaggcaggttaaagcaaagcaggttaccttccataggaagaagaacttgcagtactatgaggtgtcagctaagagcaactacaactttgagaagccattcctgtaccttgccaggaaacttgctgggtaacgacctcagttatcatcaatctttaattattcagcaacccaattactggattaaaccaactctgttctctgtctttgtcagcgatggtaacctccactttgtggaaacacctgctcttgctcctccagatgtcacaattgatctagcagcccagcaacagtgagtgttcttacgaaattgctctaccaggggtgtttaatttatgccttcaaattgttgaacgatttctgattgctctgtaatgtgcaggcacgaggctgaactggcagcggctgcagcccaaccactgccagatgatgacgatgacctgatcgagtagatttgcaatgtgctactttacatcgtcttgcgaggagccctgtttttaagcacagttatatcctaagagatcttttttgcctcggagaaattttcgtggtgtccaaggttaaatatgggagttttgtcggatatttgaccagttcagacaagttttggttatcgttgattgatgctataaggttacttcgggttaacatatttgcgcttatagctgtcgtatgatcaatgtgtatgatccgctctcgatatttggaggaaggtctgcgtgatgcgttagttttgagcaaatatttatcttcctttgccttcgaagcaaatattttatcctgtaaattcgggcgtcgcttatttatgctgtatggatcgcgcttaatctctgaagtataatcaaattctacgtggatagacggcacgattactgctagtctgctactactaattctgttcgaaggagttaacctgatgagaaactaatttgggatttctttacaaccgcacgtgtttgatgagtttgggggattcccttgcaatataggcgggagatgatcgatatcgagtgagaggtgtgtggactctggacgggagcccaacttggcaaaaccttttgggctttcaaagctgctcgacgggccactgccatcctctacaagtgatgaagtgaacacgataagagagaaaaaaaacatgataaccccccttaattaagtctcaaaacgtttatgcaatgaagtgcgatacgggcttcagcgagcttctcctccaaacccaataaccttgatatcttcgataatgctatcccaataagttaagtgttcggggtggggatggggggagtaagagggtaagatagtgttcggggatgaggagcttagaggtgagcacctgagcaaaggtattgtggggatagtagacagagaaggatggtggggtgagaggcacctcgtctgacgagtggttaggtggcaacaggtggtggtgacgaatccaggtataggaatcgttggagaatggaaaagagcctagaggtgagcacctgagcgaaggtgttgtggggatagtagacagagaaggatggcggggtgagaggcacctcgtctaacgagtggttaggtggcaacatgtggtggtgacgaatccaggtatgggaatcgttggagaatggaaaagagcgtagaggtgagcacctgagcgaaggtgttgtggggatagtagacagagaaggatggcagggtgagagggacctcgtctgacgagtggttaggtggcaacaggtggtggtgacgaatccgggtatgggaatcgttggagaatggaaagatggtagtgaatgggcatgagaagtgatagtggcacgcggaaaagctgctgctggaaggataatacggaatgggctggcggtagagatcgttgaaggaaggataataggaaaagggatggcggtggatgtgcccatcagcagggcggtggctagggttggctctttacatagcaaggtggagatgaaatctgggcggtggctagggttggctctttacatagcaaggtggagatgaaatctaggtttagatggttgatccaacggtcaagaatttgcaagatttgattgggcattttcatgtaaatgtactaaagcgtaaaacactatcgtaccccctttgtttttttaaatgtacgacgctattgatttttggtgcgacgtttaaccattcgtcttattaaaaaattatataaatgttatcggttttgttgcggtttgttttatcaataaaagaactataactttaacttatatttctacatatttaacttatatttctacatatttgtactatatttttaataagacgaacaatcaaacgttacgtgaaaaaccttcgagtcttatattaaaaatcggatctagtatatattatcatcactattctcaaaacttttcagagttaatcacaaatgaacccaacactatttacatgatgttcggggacatccccactccctgtcagcatgtagaaaatagatgggagagaattcatatagacatctatacacagaatctgcaatgcgaaactgctgataatggcagcttcaaacaagcaagcagcagcgttaattctcaggctttggaagccgcctcctgccaccgttgagggcccgtatcagctgcaggtgctcatcgctggacacgtggagctgcagccggagctgcgtcagcagctcctccttctcccacgtcagcgcgccggtggcgtggaacaccctcatcagcgcgccgtacgcgtccacctccaggcggtggatttgctcgcctaccgccgccgccgccgccgccagcggcggcggaggttgctcgttggccaggcgccgctgcattattggcgcaacggccggtcgcggcttcattgcggtggcggcgcgcgacttcgtcctgacgtcgtcgtcgtcggcgcgctcttctttgatgtgtggttggcattgcggctgcaatggcggcggcggcggctggttcgccgccacttgggcgtcccccggtgggctcctcggcgcggcgcggtcgccgttgtcgctctcgctgctgctgccgtcgctgctgctctcgctgttgctgctgctgccgctgccggccgacgagacggacttggcgtcgtcgtcggtctcctcgtcgctcatctcctgctgcttgttgacgaacacggcggtgggtggtggttcgttcgcgcgcaccacctccacgttgcgtatcctacgagcagctccccctcctcttcttccatggcgcggatccgcttcgagttggcctcgaccctccggacctcgccggcggcgtcgtggtccgtcgcgtggcggctcctcttgatcttggcccattggtgggagggggccggcggcggggcgaactgatcggcggcggggcggtgcttcgcggcggcggcgggggcgcggcggtttgcggcggcgttggggcgcgccgtcggctccctggcgcccgggatctcctcgccctgcagggaagaaggcgcggcgaggtgtcaggctacggaagcaagattccaagaagagaagaagagggttgggtggcggcggcggccatggataccttgtaggtggcgacccagatgtcgccgtcagtcagcacctggcggacgcggaccatgctcgggggcaccgtgatggcgctgggcgagccgacgatcttgacggtgaactcgccctcgccgtcgccgtcgccggcgcgcacgagctcggccagcttccacatgcggtcgtcgagcgcctccaccaggtcgccggcctcgaggtcggtggggatctcgaggtgcggcggcggcgggcgcaccgagacccgccgtatgcggccggagacgacgtcgccgccgtcccaccggatgttgtactggtggccgttcccccacaccaccacgccgaggcgccacccgcccatcgacgggtccccgcaccacgcctccaccttgttccccaggttgatcctcatggccgccgcctccgcctcctccgccgccgccgctccaccaccggcttggttgggatcaagaagaagaagaagaagcccttgtcccttaccaacgcaagaacacgagaagaatcgatctcacgacgagtcgacgacgtccgactagtatataacgacgaatcggcgaggagacgggcgcggctcgatccgtcgagttcatcggcgagtcggattcgcgcccgcgtcgagtgcgtagatggaaacagattcgtgttcgagttcacggactagaactcgatcagggcacgacgaccgatcggtcgaggcggattcggcggcatcagcacagcatgaatccgagccgaggccaccccccgtctctcacatgttttttctttttttttccttcttttctttctgggccctaagcccaactagcagcgtgttgggccggtccaaaatttgttatgcacacaaaaaaaacttagggatacgtatgtacaaattttatagtgcaaactagcaaaattcccgtgcattgtaatggttattgtaatgggtgaagaaaattgtttcaatgagcatggtggctacgatagcgcaaatttcttgggagtatacattgtatattttgtaatattcatagtgtaggtggaattagagctaaaaatggttaagagcatgtccattcgataatcctctccagtctataataaaaatgtcatccgtatggtcaatatgataagcgtaacgttggggagagcagccaaccagccacgcctcgctctcgactcttgtggctcatgtagtaacggagctcgaagatcgggtcgcgggtcgatttacatggatgattataagaaaactattaataccactttaaaataaaattatttatcatagactaaagtttgaaaccatatatagtatttaattttatcatgtattattatgagtcggttgtaatgcatggttatttttttaattgatattaataaacagttttttcatatcgtaaagagtagccatagtagaagaaatgtttttcgctagctatcacagcaagctcactgcactcaaatagcagaatcgctttcactaaaaaaaatcagaagtaaattgtatgatgaatagaaaaaaaaggtgatcaggttaggtgtcctacgacaaatgagaaattgacgaggaaaacaatcttgatgcaaacacaattcgttttgttgatgattgtatttttctttaaaaaagaaaagcatgcttgttttattttttgaaaaagtaattcattttgtcggtgaatagcgtctacttttatctgatccctgtatgtgacctcctatttaagctttagtctataataaaaatgtcatctatgttgagtaaaccatttcgcatgcatgtataagaaccaacacgtgtatacagtatacgtgtagagtttgactggtcgtgtgatgtgtggacaatatatagcgtgcggactctaatataacatgtctcgtgaaaaaaatctattttttttcacaattattattctttatttcaaataaatattaaagtagaagtttaggctattttgatgccaacaataaaaagtcttaataaaagaaaatatttttgagcggaactgaatcccattgattagcacattctagatcacagtggcacttgacagtaattaattccagtctgaagctcctatttttttttttcaaaaaagaaacaaaaaagattgtactgttgtacattacgggacctatgtggtggttgagatccttatcctctcgctctcacggtctctctcccattttatccgtttacggggaatttaactatttgccactattagatttgttaattatttaaataacttcttatattttcgtagagagaacttctccactttttaccacttttgtatacgtggtgcactaactaggctgccccgtcatcttcttcctcccgacgatgatgaaccggatggtgctctgcgttggcggtgggctctgtgtgcgggttcctgatgatgacgctcgtcggtgttgtgtaggtcaagctcgtctacatcggctgcggcgccggcaacgccaccgcgtggggcgccgtcgtgcctctctttacgctcgtgcccaccgccatgttgatctacatcagcattgtcttatacgccttcacccactagctcaaccaccggatcttcaacaagcacaccaatgctagtagtctatactaatataaaaaacatcagttgtttcttttctacatccacccagaaaagtgtacccagaagtttcctaaccattggatccctcgatctaacgtctcacattgtaagttggattagcacttggattaatagatagattggattagcgcacgccgtcccccacacccatgtcccaatctcccacggtccaggcaagttcgatattttttggggccactccttttccatcgcgctaactcccgtcggctccccatcgccgccgcggaacaatcgcatcgctaccgccgtctccaccgcaccctcgccctcaccgccggctcaaacctccgcctcgtcgcccgcttcgcccatcgccatcgcgccgccgcctctcccctccaccccctaaccctaaccgcacctcaaattgcgtgaatattgcccgtctcgctgcagaatgatcctcttgaacgttgtcgcccgccgtttcccgccgctgtctcccgccggagccgcccctgcttccctgctcgcgccgcgatgaacaggaaggagagctggggtcggctcacaccgccaccacctctccctacggtgagcatactgtcacttttagtttttcattcattcatcagattcatttttcatccatctcatttagtttctccatctatatcagtccatgttcagctggtcacattcaacattgacacaaacaccttaactgatcgacatagtaatatagtatggatcaagacagtgttattttcaggaaattggtatgtcgagaggtggttctctcacctgaccatgcagacatgcagtacacattgaatccttcctctaaattatacgctgtgtgattctgatctgttaactttatacaggtcaattattcctgacagcagttgcttgaatgcttcaaagacttctggatccaacctgaagcccttattgtttgaggtcaacaagttcagggaacaatgaagaatcgttaaatacttcttttcaaaaagaatagttaaatactaaaagcaggaaggtttcatgaaaggtttcaacgagaggggaaccatgaatgagctttggttgcttatatcagattgctccttctgacgtaaattttgttacagcctttccacaacgtattatgcagctatcaaatttgtagctataaattcgatgttgtattatatacaagtattgaaatgaggtatgccctcatcttgtttcttggggaggaatagaggcaaatggcaaagggcgaaaaattggccatcagtacgtcaaatatcattaatttgattcttttcataaggaaagttgttgcttcagttgaaagtttatgattggccgttatggcctccacactagactgcttgttggatcttttctataggtttttcatattctggtttactgcacatgctacgagaaaacccaataagtatagctatccatatgtttcttgacgaattcagccaatagtaataactcagtcttaactggataaaactatgttctcactcttgcatgataactatagggctaactgaataacctgaaattttcagggcataatagtatgttgcatgccggtaaccctaaagtagcaatgaagaaactcatatgttacatactacaaatcccaaattcacgaatacgacaactttgggtaactttgagaatttaatcaagaataagtaccgttaatgctatcctgtgtttgtcaacgacaattatatttctgaatattttttaacctctgagtatatatacaggttatgtaaaaccctctgctactctgcttttttaggatttatttgtggcttgttttccccattgcccacaaagatcctgatttcactgttgaaaaaccatggccctgtttagattctaactgttttcttcaaacttctaacttttccgtcacatcgaactttcttacacacacaaacctccaacttttccgtcacatcgtttcaattttgacgtggaactaaggctgtgtttagatccaaagtttggatccaaacttcagtccttttccatcacatcaacctgtcatacacacacaacttttcaatcacatcatcttcaatttcaaccaaaatccaaactttggatctaactaaacatagcctaaacacagcccatgttttccagccttacacctgcatgatctggctagaatggaaaaaaacgaaaaagggttaattggaatgataaattaacatggatctatgggcctcgttgacatcgggcctggtcacgcataacctcgctctccctgaccgttaaactgaccgttactctcgctcgcacccgcccttgcttctcgggcggatccggcggcctccagtctagtccagaccacgcctccctcctcgagttggaacgccgccgccgactcccctctctccaagccagcacgtggcagccggcgaggagggccacgggcggagcgaagcggcggcgacctcctcccctcccgcacgcatatccttcaccaaaacttttgcaaaatcaatgtaatttgaaaactatcacttggaaaatgtttcaaaaggtttcctatatgttttccaagcctcacattgcaagaaaaatgatatttttgaatgaaaatgcccttttggctctcttttgaagaaactagattcttagttttggccaaaatgagattgagaaggaatttgagaaatgtttcaaaacaaagttggtagagaagaaagtttgtaatgtttttggtattcaaacctatttcaaaaatcaaatatttcaaaagttgtttgaaaatcaaattcgaccaaaaacccctatagaccataaaaggtcacctcctagcacttgagtgagttttgttgcaaatcatcataatcttcaaatattatgggtggttagcaatatttaaaaactcacacatttcaaaaattgctccaaaaatcaagtttttattgaattttattgtgtgggttgccggcttgtgcaaggactgtgcacagccagcagggggcctggcggtctgaccggcgctatatgcgcggtctgaccgaccaggtacggcggtctgaccggccacatagggccggtctgaccggccgaggtgggcctaggcagcttttgtcctttttcttgtcctttttcttctcccttcttcccctacccgactccatctcctcccattcagttttttccttccccaactcgaaaactctctctctcacctcccctcaaaccctaactccttcctccaccaaatcccctcggtttgaccgtggatttctcttcggttacaccgtaagtgattctcctccgcttcctctctctattccatggattggtttgtgtttttgttgagtttttgatccatggcttggaaccctaggtgaagcacgaggtgttcttccatttgcaccaatagatggtagtttcttggtgtgattcatctcctccaaccggtaaatcactctccctcttgtgcattcactcaaatcgatctatttcaccctagggctatgggtagttgttccaatcttgatgaaataggttcaaccctttgatgttcatgttccaatcctgtgctatattgttctagcaaattttagactcaaatgtgtagatgtgaaaatttttggatgcttgaacttatgggaggaggtttgcccggagccacaggccttctgaccgtgggtcagccgccggtctgaccggccggcaaccgtcggtctgaccggccaccagtgggcggtctaacttggctgatgccgtcggtctgtccggccaccatgggtggtctgaccggcctgatgccgtcggtctgaccggccaccatgggtggtctgacttactggctgcggtctaaccacccctccactggatataggcaaattttcacctctccaaattgtttctagaattattgctaatatcctatcatcctttgctctttttacaatgatgcctccccgcacttgccatggtcgtcgtgcgcccactccggatcccgtgagtgagcctaaggaatcgagcggagaggattacgctcacaatgatgaagaggttgaggcaaatgttgagggggctagtgaggtggcaagtggagatgatgtcagtcgtagtggggaggatgaggatgaagaaagtgatgatatgcactttgatcccttcatccagtttgtggtgaacatgaggaatccagtacagtataccatcttgaggcatcatgatcagttcttgaggcttcgggacactccggatccccgttttcacaccgctttccagaagactgtgtatgagcaggtttatgcagggaaagcatttgcagagcataagtggatttcttggagagacatcaatgagactccagagtttgagagcttgcattatctcttcaagactgttggcattgaccggattgtgacccttaagcaagactacaatgaagaattgattcgacagttttatgctacagtgtgggtggctggagactatagtgagatgaagtggatgtctgacaccctctagtgttctatctctcggaggtagttccggcggctcctcaatattcgcttggattttggagatgatttgcatgaggagcacactcacaattcattctccatagactatctctctcagttctatgaagatggagcacggtacacacatgggaaggttgccggcttgaggactatccccagtgtggttaacatgattgtgagagccattatcctccctcgcattggcaacaatgatgacattaggggggtggcttggcacgtcatcgatgcaatcattcagggtcgtcagttcgacattgtgtctctcatgatgcgagagattgctatctccaaagggacattcactcagggaatgtattatgccccttacatcatgaggttgattcaagacaagcttggggctacttggcaaaatttgaagaagcacaagcagtacaagccctatcttcatcttggagctccccgtgctcctagggagctagctcaagctcagcacctcctcctcctcatgggtatgatccaaatgctttcttccatccatagtatgcttactttggaatgcaacccaatgaatacttctacccggtacttggggctattaataccctaagtgaaagcattcaacgcttgtctaccgggcatgaagcattgcatgaggatgttcgtggcttgcgcaccgatgttagagacttgaatgctttcgtgggaagattgcacactagagtgggtgcattggattctcgactacaaatgttggagagcacccaagcttttgtatatcatcgtcttcagctcgtcctccttctcctccataagaatgaagacctttttggtacttgatgccaaaaggggaagaaaaatgtccttaggtgtgctttatgtcttgtcggttgggactagtagtagtgaggttagtgtcctcatatctaataggttaaggtggtttgggctatattttgtatgggtatgggctattactctatattgtgtgttctttatcgttttgttggactctgtgtcatttggacccttcgtggtcttgtaatagcctatgtttattagtgagcccttttaggatgatttgtgacttatgtgatttgaatggttaagtgatgtgaacttgtgcgatgatggatggtgtatgtgatattgatatatgtgaccatcttatgcttatggatgaatatttcttgaagttcacattgaaatattgcttatgtgtttgtgcttgttgaaatgtgaaattgaaatttgcattggctccatatttgttgtctatgattgatatgcacatgtttaggggagcttttgatttcctttgcaatatatgtccatatgttccttctttgtttatatatatttgttgtgtttgtcatcaattaccaaaaagggggagattgaagcatctaggcccccgttgttaattttggtaattaatgacaaacgctaattgtggactaactgttgctattgagatatattttaagttaggaccatgtcatgtatgcgcatggatgactatcaatggattaaaatttgatggcgcgaagcgaaaaaaagaaaacggtaaaactagtgctttagttttaaaattgatcgaggtgaagggcgatcaaatttgctagtttattttttagtttcgccgtactatcaagggggtaatgacctagcaatgagatgattttaattgccacattaggtcattatgcatttagacttgtgctcacattttatctcacacacacaatcactttgtatttcactgggttcggcctgaccaggggcggtcagaccggccgctgtctaaccacatagtggcggtctgaccggcgtgccccggccggtctgactggccacaaaacggtggtctgaccggcgcataaggccggtctgaccggcggcacatgcgcgatcagaccggccccttggaggccgggatggtgctgctcggggtggccgatacagagccgacggagccgtattcggtcagaccgagctgatggcggtctgaccgagccgaggccggtctgacccgccactcaacgtcggtctgaccggtcaggcctatggggccctctgacagagttacaatggctagttttctagccgttgcagagtagcacggtctgactgcccacatacctccggtcagaccggcagagcacagaggtgggggatttcgccctccatcagcaagggggctctcttggcacccaattcaattgcatacaccccttgcacctctctcacacccacttgagctttgtgttcatccatctagtgtgttagagggttaattagccaagagtcaagtgcattgcttccatttgtagagctagtgtggcacttgattgatcatctccacgccgggtcattgcttgttactcttggaggttgccgcctcctagatggcttgtggagaagttgcccagtgacctctccgagaagattgtggaggagggccggcgctggttgtgagtggtttggagttcaccaccttcggagtgaaggaagaactaccctagtgatcgaggcttgggtagtcctctccgtgggccggctcccgccttgcccaccccttgacgaagggggcgtgcggtggcttcgtggttgagcggtggagttgggctcgcctcaacggggagtaggaaaccggcgagtttccgaacctcggtgaaaaatctcttgtctccttgtctcatttacttgttgcatctacatttgtgcaatttacatttctagagacatactagagatcatttcaccctaggattgctaaacattgacataggagtgtgatttactttcttagagatataattgagccactatcaccctaggtttgcaaaacataacttagttgcttagttagagttgaccctcaccaagcctagcaacttaggttagttttgattaggtgtcatttagttttaaatcgtctattcatcccccctctagtcgacatctcgattctacagagttgctcggtgacctctccgagaagattgtggaggaggcctggtaccggttgtgagtggtttggagttcaccacgttcggagtgaaggaagaactaccccgagtgatcgaggcttgggtagtcctctccgtgggcggcttctgccttgcccaccccttgacgaagggtgcgtgcggtggcttcgtggttgagcggtggagttgggctcgcctcaacggggagtagaaaactggcgagttttccgaacctcggtgaaaaatcttttgtctccttgtcttatttatttgtcgcatttacatttgtgcaatttacattcctagagacatacttgagaccctttcaccataggattgcaaaatataactgagttgcttagttagacttgtccctcaccgagcctagcaacttagattagttttgattttgtgttatttaattttaaatcgcctattcaccccctctagtcgacatttcgatcctacaagtagtaccatagcttggtctctcttgattgggcttcaccgcctagagagaagatat

SEQ ID NO: 9661 - DNA, 83139 bp, Oryza sativa
aaaatgctagaatgacttacattatgaaacggagggagtatattttaggacagatggaataggtgggactaatagaaaaatgttgtgattagttggtaagagaaagtagaggggaaatatgaatggcaaatggttgttattgattaagaagagaaagtagataagaaattactatattttgaaacaaattttaaatgctggagttgtttatatattgggacagagtgagtatttgttagtcgtgcgtttttaatatgttactgttccctctaaccatgaataagcacaaagtttgaaatttgtttgacaattctttatctattttctaatcttaaccaatcacaaccttcttttatttatttttctttcttatcgacttccacattttaatcattgtaagcatccctcatctcaacctaatggtttatctggataacggcacaagaggagtgagattggggtagaggaatcagggaatgggttgagggttaccatgaaatgagagagggataatggatgactacgatttaaacatactctttgatcagcgcaaaatcatttccctaatccattaataaacctatgtgcttcctatgtgcttcccctgtgcaatggattctgttggcccttcttcagacggcgacgtgccctacctccactccatcgagggtgatgctttccatcatagtctcatcactccaaacggtgcctatatgttgttgaaacacgcagaattttatttaaatcttttttgggcatttctatctaaaccatttgtgcaatatcgccattagattgtgtttagtccacgccaaaattaaaaatttgtttaaaattaaaatgatgttatggaaaagttgaaagtttgtgtgtaagaaaattttgatgtgatgaaaaaattggaagtttaaaaaaaaattggaactaaacacggtctagaacgctcttcaagtttttattcttcaagtttttaatgatgcccgtgagattctttgttccctagactccaggagcctcgttgcacacatcatgcacgtgctggcaccaattcggctttcacttcgtcgtctctgaaggtcgacttctgtgtctcttactggggtggaaagatgcaaatgttcctccggcgcaccattttctcgacgaaggggaaaaaaaaagtccgaatgccacaagcagaagatccgactaacctgacgccatgaaaagagaggcaaaataaagataagactttgggatcacaggagctgatctttctttttcttctcaattatgggggttcctttcaagccttgggatagtgaagggtgcagtccatttgttgttctcttcagtcttcagctagtgacaggaacttggccacctcatggaggaggtaggagagcctgtctccctaaacaatactagtagtagtagtacctaccactaccaatggcgatgctccttgccatatctcacaaggaattgaaaatgctggcctgttccctttcctctagcttagtttatggggttcacagggcaagtagataaaaaagaagagaagaggaactttctgcaactgcaaaccacattcggttgagatcaggtgtacttatttaaacggcatggtccttgtttcaaaattataatacttaaaggatagaaaaactatggcagtttggggaaatgatgagatatgcacatttggcagatgctaacatagttgactgacgattcttatgaggttatatccaatgatcattgtgtttgcttgcaaagatagggcaacttgtggcaatatcatacaagatgttggggggggggggggggcgcaataattaggaggttaaaatgaacaagcaaagcataagttttcgtgtcattagttgttaggtcaactgcttaattgaactatacagatccctactacccaacttaagttaataaaactgtatatgattgaataagtcaaagcaagtgccgaactatatcagcgtgtacatattggtgccctttatgcacacgcgattttctgcacatacagaaaggacgaaatcatcaaaatatatacctcaggaataaagaataatgtgtgttaaaaattaccttcgctgatctgaacacgatttttccaatgacaaagaccaaaacaaaagctaaaatgtgtttataacccttccagcattcttagagtagattatcactacacaacatccacagttgtttaacaattactccctccgtttcatattgtaagattttttggacttacctagattcatccattgattaatatatatgttttctacatgtgtctagattcattaacatttatataaatttgggtaatgctagaaagtcttacattgtggaacgaaggaagtatataagaaacaaacatatttcatagtcgtaagaggtcatctctcactattgtcatacatactttgaaagttacagattagaggctgatgtgatttttcctgtgacaacgctgaaatttgcctcaaatggctgtcaaataataaagaaaagcgagggggggggggggcaataacagattgatttattgacctctatgtttatttgctcaaggttcatggcataattatacacgaccgtgattttgttatattatactccttgtgtcccaaaataagctcatttttcacccatcccacacataccaatacaaaatcagaaatactataatacccacactttataaaataccaatgcaattattcatctccttatctactcccaatgcatttatcccttttcaaactccgatgcaatgattgcttaaaaatgaacttattttgggacaaacggcaggggcaaaaaataatcttacgtagacagctatgttcaaaaaccaacacattactgtctatacctaaaagtccaagattttcaaaacttgagaacatggtaattaaagtattagtggtagttggatgactgtagagaattttttttactttcaccctgccagttataattatgatatactatctatttcagggatggggcccttaaggattcacatcagaacacagacttaagtgactaatttgttacaccatcagacctttttttatgtgaatggaagtagtcatgacacagtgcagtttttatttcatcaactagatgactgttgagccgataagagtgaacgatgaccattcttgtcctcacaggctcacagccacatgatctggggctcaaaacatttaatggagtgatccttctcaaaccaaatactggactcatgttaaaggttttaaggggtttctatcatgtttttgattgttagttgagcaacactactacctaaaataatatgctgagaaattagctgtcatgacagttgatactgaaaagcaaaaacaactaatacttagccattcttgtagcaaaacctcattacatatttacaagaaaacccaatggatcaaaagagaatctcaagcatcttatgtctatcatctgaatattctgcatacattcagaaagcataattatatttcttctatacaaacaaaaatggtagggaaaatcaaagtcacattttattatacacgttggtctttggttttagtttttggccagaaattcctccttacaagcctaatttctcaacttcccctaaaaaggcctaattcctcgacacaaaccatccaattcaatcacctatcatttgcatttcatcagcacaagaccaagccacatctgtaaacacttgaaacgtcctcaccaaactttagcaagaacagagactgaccgtgcggaaatcccagtggccaacgataagccaaacgcaaggacgcattgccccttcaagcgtagccttttccaaggcagttcaagcagcgctgcaccctgaaaacatgtttaaaaaaaaatcaacaaacatccatagcagcatggtcacagcagcacagcaattcaaaggggcgtgaccaaaggtcaaggaaatctccgcaaaggacggccaacctagtcccgtcacaggtagggcagaggcacgggttgacgaacaccgggtcgtggagcggagaccactcgatcgtcgagctgcccctgcagagcctgcacgcgtaggtccccttcccctcgcaggcgccacacggcgccgcgaatttcctctgcgcgcaacagcagcgcagcccagttcaggtcagggcagcgacggcggcggaggcggaggcggcaaactgagcgacaagggtttgggtgtgttgtagtgtggtacctggttggcgtcggagagggagcggagggagcggacggcggcggaggacgcggcggagaggaggaggaagccgccgccgaggtacgccgcggcgcgcccggccgcctgcagctgccgccgcgcgcgggcgtcgcgtccgccgctgccgaactccatgggcgagccgagagggggtctccgctcgctcgctcgcttcccggccgcacgtcgtcgggacgagacgtgagccttcgttttccttagccgattgcgcaatcggcccatttagttaggcacagtaaagaattcggcccacatgttgagaactgaggagccatagtcttctcaatctaattctctgattaccgattttatcttggtttgtgttagcaagtttttcaagctgctaaactgatggaggttgctttaaaatatcatataaatctattttcttaagtttgaaataattaaaactcaattaattatgctcgcatggttttcgcgtttagctagagtatgcgataaactactttgttttatgctaaactaaaaaaagcttaaccgaggacaaaattactgtttagatgagattttaccttaatatcaagtcagaaactgagggttgtgcccatttgcaggaatcaaataaaatatcaaattgttctagagagagctttggttaagctgaaactttccattatccacattgagtatatttccagatgttttcaaaaaaaatttcgcagctcaattcttgcccataccacagaccggactctgaaactaagtctgagcaatccctgcaaaagtgtctacagcaatgatggcctaaagcacgattagcagcatggctaattctcaagcctcaacacgtcagggggcaacatgatggtcaccgcgaaagaaccatctgaaaactactctgttatcattcatatgacatacgcatatcacctccagattgaatcgaactatttttcttttattttccctttcaaaggagatctagtcgtactaacaaggtcacctttcctgtctacatcaatgaaaaaaaaaacgctatctttgtacactttggcttgtccataccatcttgaactttcatgcccacacctcatgacgaagggcgaacattctgttcctttcatccacattagcatttgaagctttcttggaatccgatgggtacatgggaccagaactgatcaggcttcagctagccctgatgagttagttcttgtgggttgctcgattgataaccgacggcgaacattccgctcctggaacaaaaggaacaaagaattgaaggagatcaatgtattggcaaatagctgaacaattatgcactgcaacgacagtctaagtatcaagaaatctactgaatgaaagcgtgggaacagcaaaggattgcaggcaaccaaagctgaaggcatcaaagtggagtcacagtcaaagacagttcgtagtgcttcagatctatcatagtgcacggcatgattatctgagacaaggaggaagataaaagcttcatgtgttgactgggattcagataaagcaaaccatgtctattatatatgaagcacctgagccacgacattttattaaaggagcatattgagtcatgctcagaacatgcttcagacttcagatccctcctttccatctaccatatatctatctggttaacctccctccctctatctgattaatatggggatttctagccttttagagcaaatattgaagtttatgtagtatcaccttaatatttgataaacaataggtctcagtacaacatgcttacatagcaaataatgcctgtcaggattagtgatttagctcatatagccaaccggatgcatgggaaatctagaatctaaggcagtcatattcattagaaagtaaaccaactcgaccaacatgcacagtacataatcagttctctctctctttttttcaatgtagcattaccttctttttcaacatatttatcacaaataagcacatatagcaagtaaatttatcacaagccatagttcacttactccaatttcagtgacaaagaggcacaacgagcacttaacagcaggcgcaccaaaaggatacatcaataatgtcgcacagtgtccacaatgcaccttaccaacttcatgagctgcaacaaacatagggggaaaacccatgcaagggtaagaagatgcatatatacacacatcggtacatcagtatttggtaaaagctataatacatggaaatattaaggacagccgtgcttcaaaaggaaagacaaagacgagataaattttgcgcaaatggcatccatattttgcagaagtgttgcatgaaaaagctttagagggtgtgcatgaacaaatagtattataaaggcaagggcaaaattctccagttctctattgagtggtccaatgttgaaatatgtaaccaaccatacttcttacacataatttagacagtagcagaaggcaaatttttgagaaaaagcatgttcagtattcagtaagtatttccacagaagtaagatacaagatggctgatatctataggtgttgaaagacaaaataaaaattatatggggcataacaaaagtaaaacactgttgggcaaatgagaaatagtacgcaccttccaatacatagttcattgtctggcaacaagtacagtgaacataaccagcacctctaaaataagcaagaagaatacggcagcttccacataccatttgacctacttctgtacaagttagcaacagaggttacttatgctcagagagagagagagagaattacaccggattacttatatactagccccagatttatttatgggtgaaaagctgacttctttggttcacaactatgtatgaattgatattgagggattggataacatccaaagagaaggtacacagaagcatagtatattcctttcatctattgctctaaaaaaaagttagtactatatttcacaattgcaatcaaacttcatcattttggctgaaactgtcttaagagggaccaggtatacacaaataggggatcaatggagatataagtgagcatattacatgcttttttgaatgaatgaaagcacattacatgcttggtaaactttaaggacttaatgctgattcccgcaactagttcattaaatttatatctgctagccacagtttgcatgagcattcttctttcaaaatcatatcaaagactgagaatcacaaaaaacaagccaacttttttcacaaattataggaaacttatatagtctaagatgggcatatgattggtacatgattaatcaatggaaagaaaactgttcgtagaactccaaacacgacccagtagcatgagcacgcaaggctggccaggttgtccagttgtccttgaacatcaaggaagccaagttaagaggttagaatagataagatagaaatgtgtttcctgttagtggtaagagaatcatatttaggataagatgtttctttagcttagtgagccatgtacgtggacgtcctatgtactcaagtcagggtatcaatgaaatagaccttcctgagaaacttggtcatctcagagcctctgcatggtgtttgatccaatctcacactgactcattttcaccttccaaagacccccaaactcatcacaaatactaagtcaacacaaacaatagcagttatatagacatggaattagaggaagtgagatgcaatatactaacctttatttaggtaaggggaaggtggtggtggcaccaatggcacagagtcctgtaaacaaggtgaatcatgtgcggtagaagagggtggatgctgaggctgcaatgactcatccactataccctcagattgtggctgcattgcagttgtactgacaaggtctgtagtagttgcctgcgatgcaagtggtagctgagacatctcctctgaggccacagccacagactttgagtcagatgcatctagtaagctatctgcagcctgtgatgtaggagaatgtgactctgattctagttgtggcagtgacccctcagaaatattcttcagtggtgatgaccgaatgggcactgtgccagcttccatttcccctgatacaagcggtcgctgaggcgattcttccaatgccactgcaaccctgtcaatggcaggaacatcagccaagccatctggggtctgaactggagaaataacagcaggcagtgacagaagctgagagggctctgaattgtcacatcctgaatgcaccatatctggcaaacaggttgttgtatccttttctgcaggaggaggttgcgcgaattgctgcggagatagcccatctgctccactttcagatgatggtagcaatggaggtactgcatccatatgtacacccattacctccactgagtgcagtagctgaggggcttcctctatcacagacacaggttcagttaccgattgatcttgtcgcacatttgtggtttgtgccagagatggagatggtagcagtaactgtgatgacttataggtttcaaaccctggcggtgccctatctggtgaacagggcgcttcttgcattatgggagaaggtgctcttggcagtggcttttgcaatgactccactccactgtcaaaaggcagcggtggtggatgtatggcatccatgtccacatccattgcctccaactccaatgcaggtggtggcccagctgcttcttccactgttgctgccaaagcatccgctgcggctgcatctggtacagtttggggcagagtgggaagtggtggccatgatgacttaaaattctcaaaccctggaggtgccatctcctcttgtgaacatggttcagatgatgacttaaaattttcaaaccctggaggtgccatctcctctggtaaacatggttcagatgatgatttgaaattatcggaccctggaggtgctatctcctctgctgaacatggttcagatgatgacttaaaattctcgaaccctggaggtgccatctcattttgcaaacatggttcagattgcaccactggagaagggggtctcaatagtggttgttgcagtagtccctcagtcccttctgttggcaagactgttgtgggcaagatactgaggacagtgtctgactccatgtttgtcacctccaaagctggcaatggcctagacacttcctcaatgggtgcttccactgccttggtaaccaccacatctggcaagacatcagtggtttcaactgggggaggagtcgtgggtagcggcaaccatgacgacttaaaattctcaaatcctggcggtggcgtattaggtgagctgggctcagcctgtgtgatggaggcaggtttttcaacatccagagcttccgatgaagggactgactcaaccgcttcctccggcatcaccaataaaaccttgggggcagctgcgactggcaaggagggcattgattcgccaagtggtgtaggagggggcaacggcaaccatgatactttacagttctcagatccagcaggagccatctctggcgaacttgtctcagtgccaattgtgggagaaaatggtctctgcattgactcttgctcaatgttcattgtgggagaagatggtctctgcattgattcttgaagtgacccctcttccctactctccaataccagaggcacactgactgctgcggtaccagtctccccgtacattacctccatggcaagctttgaaccaggagcttcttcttgcatccttgctactacatcgatcttggctgcatctggctccacactctccaataccggagacacactgactgttgcagcatcaacctccctgtacgttacctccatggccaacattgaaccaggagcttcttcttgcatccctgctactacatcaatctgggctgcatctggctccccactctccagtactggagatacactgactgctgaggtatcagtctccccgtaagttaccaacatggcaagcgctgaaccagcagcttgttcttgcatccctactactacatcaacctcagctgcatctggatccccactgtccaatactggagacacactggctgctgtggcatcagtctccctgtacgttacttccatggcaagcgttgaaccaggagcttcttcttgcatccctgctactacatctatctcggctgcatctggatccacaccctccaataccggagacacactaactgctgccgtatcagtctccccagacgttacctctatggcaagcgttgaatcaggtgcttcttcttcttgcatccctgctactacatttttctcagctgcatctggatccccaccatccaataccggaaacgcgctaactgctgcggtatcagtctctccagacgttacctccatggcaagcgttgaatcaggagcttcttcttgtatctctgatactacatcaatctcagttacatctggctccacactctccaatactggagacacactaactgctgaggcatcaggctccccgtacgttgcctccatggcaaaccttgaaccatgagcttcttcttgcatctcttctactgcatcgttctcggctttatctggttccccactctccaatacaggagacacactgactgctgcggcatcagtttccctgtacattacttccatggaaaactttgaaccatgagcttcttgcacacctgatactacatcgccctcggccacatctggttccctactctccaataccggagacacgctgactgctgcggtatcattctccctgtacataacctccattgcaaccgttgaaccaggagcttcttcttgcatccctgctattacatcgatctcggctgcatctgtctccgcactccccaataccggagacacactgacagctgaggtatcagtctccccgtacattacctccattgcaaccgttgaaccaggagcttcctctggcgacaccgctactacatcgacctcgactgaatctggcgatgtgtatgcgatttcagccggactagtgggaggaagcggcagctccgcaggctccgagctatcacactccggatgagttgtaggcggtggatgcggctgctgctgctgaaacccctcctgcccgctctccaatggcggcgtcggcggttcaggtgcggtgcgcgagcccatgggttcgcgcgcacgggacgccattgccgcgggctcggcggaggatgcatctggcccgccctccaatggcgtcggcggcggcggcggctcgggcgcggcgtgcgagccctcctcgtcgccgaagcgatcgcgcgtaggggaggactcggtgtaggatgaatccggcgaggcgcataagaccagtggcggaggagtgggcggcggcgacgccggcgagtcatcctccgcggtttcgtacgaggaggaagaaggggatgacgccgccgacccggggtagaactcggccgccggctcagcgggaggacacggcgaaggggagccgggctgccccgcccccgccgccgcggcttcgagcgcaggtggcgccgccgaggtacccagctccagcgaggggaagaacgaaggcggcgccggcgggcccgccgcaccgggggtcccaccgatcggaggttgcggttcttccgccctgggccacccctcggtggcctgacctggagacggcggcgggatcggggtggcatggtggggttggggggatggctccggtggaggagcgtcggttggtagggaggggtctccttggagaggaggaggagaaggggaatgggatggcgggggtgaacccatgcgtgcgctctccggtggtacgggtgcctccggcaagctcgccatgggtgagggggtggcgccgcgacggcggcggtcaccgggaaagggaaaacggtagcggagcaaagagagaagcaataaaatgggggtgtttctactggggtttagcccaagtcaaatctcggccgttcatcctttgcgctgaagtttttttttttttttgttgctcacatggacaggacggctgatctttttaataaaaaaaatagatatgtcatataacttttaaaatctatgctattcacataattaaaaccgtaccaccgtgacaaatctaaaattagatccacgtcacattatacgtatgagatatgctttgaatcgtcttttctaccgtatatttttatggattaaaatacccctaatcatgatccccatttctttagacgttctcctcttcagtagcagtagctaagctagccaccaccatgatgaagatgactcggatcacttggatatggcctccatggtgacagaccatgggaggtcgacaacaccggcgcttccatcgccagggttataggcaaagtggatagataatggaatttgtcgcagaaagatcacctcgagcacggaatcgatagaccctcctctcctctccatgtaagttcgggctagggagcgagggtgcagaacaagagtaatcacgtgagtaaatgaggtgaaaagcagttatacatgtccgggtcatactgagcgtaataccctactcctatggggttctttcattgctcagcggtttagaagctaagttactatggagttgcgaatgtgtttaaaagtttctaaggttggatctgatccctcttttcggtggctttggatcttctcttgtagtcaatggaggaataccacagtgatcgagttctttaaaaaaaggccttagtacacaggggttaggtatgggaagttttgtcacttaccgacatgtcgatgtaggccatccaatcttgatagcgtgttgatgggcgtcccgagcagcagatattggggatcatgctttgtaattcaccaatagaatccattccggtctttacttcaaagaagttacaactaattattatagatgttgcagttcaaactactatgaattacaaaatcataactcgattgaaaccaacaaaactacttagaccaatagcctgaaggtagagatggcacatattgctaaacttccaactatagttaacgaaaatatgcataactgttgtttctacgcaacggtttgcaagttgtatgtaatcattgtcctcctcgagccaggaagcaaactctccgaagaaacaaaatctctgaaagcagcgattgtgtcgcttattttttgcgcacatcatcattggcgacttacatcgaactaaagtggaagatgatgtcaaagagtaactaagttgtaataaatctgtcatttccctaatctttccactctcattgaatccaattcattagggacaccatcaccaaccgacggtggccatgagcagtgctaacgaccgagaagtttgttgactggcctgtggtgcatggaggaaaaggttcagcggcacgccaaagtctcaacatcatggaaggcttgcaatactcttgggaactaatgcacatcctcgtcaaccccaccattaccatgtgcatcactaaccccttggcgtaagcggccacctcatcgtcgccatggtttacgataaaatccgtctgtactctcactcaatgctggtgagatgtgcctcctcgagtgctcccataggcccatggcagttggtggcagcaaaagataaaggagaggatgtgttggtggacattttttgagtttcgacactatctccctttggtggcggcaaggaaaaaatcagtttctcattcgcttattatgatatcctcttttctcgctctatcctcattaggttagtagtattttttttcagcttaaaagaagtgtctttgatacttgtcacccatgtcttcgtttcaatagtaaaaatgtaaaaaaggtcatgtttccttccacaacaaattgccagggccgtccctaggccggtgcggggcatgcaaccatataaggcccctaaatccaaggggccccaagtggtattaaataccctaagtatataatgttatagtgggctttgtttttattattcttgttgttcaaatgagttttttagctcatagttggcacaatctctcttcaactctccgtatctcctaatttgtgggttctcctgtctcactcgcttgtagttgtctctagggtcgcttcacatttgctctttgtgtcatgccaatcagtatcgcatcatggaaaggatgcagtggcagcaacaacactgagcgctcatggtcgccgtcattgctcttaattattttgtggccgtaggagatggttacggcgattgacaacgacaagctccagccttccggtatactccctccatcgtaaacaatgctaggttggtttttattgggatggagggagtaaattccaagtccaagccttatttttcctcttttcttttttttctatattttgtatatacaaatcagttgatttggtgtttcattgtttcaacttacaagccaacttaagtttaggtcccatttagcgttccatatagggccaatgaatttttctgggatggccctgcaaattgtacatgttctactactacaatggcgcaaaaatatttatatttttttgtctacaatattgtactcagtaaaaaaaagacattaatgaattttgtagagaggtgaggatgatattgggtactgaatagaggttatgatataccgttacactcactatatggaaagatagctgacggcgggaaccccccatgataaaataagcacaaaagggtatagtttttgttgtcgagacaattgtggtctatgtaatcattccatcccatatacggacaatatacatataactcataaaataggttgtccgtagtataattaattatttatttagttttgtagatggtatataaaacatatatatggtattaagttgtctattaggcttctttatctcacctccccttattaaaaaaaaaatctacgtgacatctactctagacactgacatcgcgctagtattcgtgccttaaggataaagtaagaatgtgtggtatgccgatttttgtttaaatacaagaaagaagcatgtaccttatggcagaaataaaaatagagaatgctgatatatttcaaagatatatataccttatgtaccttatgtacttctttaaaagactccaatgataatggtgaatctgccaccacttcatcgactgcaatcttacagataggaccactatccttcatccattttcatactgactagttaattaacacatgagagagttgcagatgagagcatatagtagtcggaaattcggaatggcatgggtagattagatggtgacattggcattatcgtatgctgtgtgctccaaacccataacagaagtacgtgtattctgctagtagaaaatgatgttgacaagagcccatagaagagatgaaaagcccaaggtacatactatcagtacggacaaaactcacttgatgttcctctttgtattttttctatttcttctagcttttatatcatctaactattttttgttagagaagaaaatgtatttttccatcacttggcggttgcattctcattctatcatttcgatacgacttatcccacatctagtcaaagctgtcctaaagtttcatctcacattcatccataattaaatagaaatgttattttcttcagagaacaacattcaaaacaaccctcctccgaaaatactacaatgccagagaaacgcccaggggctccacaaggtgtgagctggacgatgtgggtttgaagtttcgctccttctaattatttgatattagatcattgcctaatattcgcatctttattgacatggtatttgggcagtaaaaccttcatcctaaatcaaacaagaacagagggcacacttggcaactctatgggggaaaatgatatttacacatgtacaataacaatgaacgaaagcaacttacaggctacagcatggaaattcatcagcaccagctgtccggtgaagcatgattacagtataggaaaaactgaaaagatttcctttaaaaacaagaaaccaaaaacacaattaaagaaagaaggaaagcccattggatggttgcaagttgctgtcaactggcagtgactctgtacttatagtgtcctttcattgcttaatgaatgcttgttatagtcaagccagattaagcaaagcgagcttaaataccaagatattattttcaatggagtaactaagaactttttaaaattttaattgcaagagaatgcttgtgccgtatgaaagtcccaagaattttacgtcacacctgtataaaaattccagctctctataccttctatatatatatatgcaacccactaaacacctaaacctcaacatataaccatagtaattattagtacaccctaatgcctaacatataatcatgttatatccaccagtaaacacccaaaacttaacatacaaatatagtaatatatgatttttatgacattctaaaactcaacataaatgcatgctaaatcatcattttgatgcatgatgagaatagtctcatgtttgtctggtttccatggttcttccaaatcggattatcctctagtatttcatagtaggaaggatagaggacaaacgttacaacatgttgatcatgcagttaagttaattttacattatatgctttcatatgtgcagctatagtattcttacaatagccacaaattttagaattgtacccatcaattcaccgtatacacaacacggagttgaagtttctagcattgtcaggtaaaaattggatggaacatcccgaacaactcatacaaatttgatcctccatattcccatttggaagaccatacaaaaaaatattccctcttcgtatcccttttcgctctaatagattatccaaattacatcctccatattacaccattctatattttagtaatatattccaatattatttttattagctatattttaaatgattaaattctaacgctattatttgtaacggatagattttttaaattattatgtttgaatgtatatatttgtaatggactagtgggtatttttttaatggctatatctccaacggatggatatttttttagcggctagttgtaacggctactatattagaattgatagctttccaacggctagatttcaacactacatataccattacattgtttgctatctttttcctccatccacattgttgtgcatcctctttcatcactcaatgagctacattttgaggcatcttctcttggatgattcattgttggacgatgaactcatcgttgctgtagcaatagtcgcacaagataaatatgagcagtcggatcctccactacgatgtggttctgttcctgttcaaatgctccacagcggggtgcgagtgtgggcacggggcgacgcttggctgccgtagcagcctagggaatcggtggcgcagcgggtgccaacccaaaacccatccccacctcctaatctggtacactccttcctctctacctccactcctccacggctccaccagccaatgtcccgctactgccaccatcattgtaaaaaaagaatgacaacaatgacaataatggacaaggggttgctccgtcaatctgaatcgggatagctcggtctagaggtggcggttgcgatatggcgtgaggggagaggaacgctaaaatttaacgtttctctttgggatagcacacacgtgcccacatagcgtatctgctggagctggttttttttccctatgctatttcatcgatgaaggactggatatagtatccgttcgaattgctcttaggcccagttctattcaacaactgaaactaacttacttgttatccgatacgacgcttttcaaactattaaatgatgcgatttttgtaaaaaaaattatatatagaagttgtttaaaaaatttaaataaatatatttttcacctttataattattaatatttaattaattatgtgctaatgagattcctcgttttacgtgtggtacaaatcttcctcctccacctgcaatcgaacgaagccttactttcctagatattctagtgtaaatcaagtatgttgacttggaaggaagttccaacactttttcgtaagaaataacatgatctctccgacggaaaggaaatgtctttgcatccaataaattctaatgagctaaaactttcctgtagtcgaaccatccaatttttcatcattccttttatgcattttttaaagttttttttcatttacagttcatctcattcatgtgtttgttttccatttctgtactttccatccctgtgcggcctaattctgcccaaattaatggcaatgccttttttttccctactgagagagatttttttttccgtggaataagggagctctatttttcaatgccattttcttttcaatgtcaaattaatggtattgaaaaaaaaatgctggatcctcgagcaatcactgctccgtgccaagtccaagcttagtttttgccccatacctcgtgcgcgattcgaaactttttgaattttgaattttgaaccttgaaggcgagtagagttcaaattccaacgtagtactactagtagtatccgccgcggtacacagcacgaggacgaggggggggggggttaaagctcaaatcaaatgagcatccaaagaaccacaccaggggggagcactatggccgtgggccccacctacgcgctcccggccctatggcccacccgaatacatcgcactcgggcggggggacacgccaggacgagtccacaccgcaccggggccccacctgtcactgaccagcagctcgtgctgggggggagcagcctcccgctgacgtggcgtccgggtttaccataccactcgcaccaacaggaaggctggctggtggtccccacccgtcatcccaccgacagggcggtgcaccggggagacaccgacatgcgggccccactgaccggccgtggtgtccggctcacggcgaggtcggtccacgcgggtgcgggccgggccgcgggcgagagaaccctagccaaccacgtcactgtccacgtcacgccgaccaaataatataaagcggcacccatcgcctcagcgcctccctctctctcgagtctcccgtctcctttcccctccttcctcctcccctttcgtcttagcctcagctcgccgcgagacgaatcctcccctcgccgccgccgggtccgatcgacggcggtatcgagggacggagggggcgcgcccgttctctcgccgtacaccgtcgtcgccgaccggctccctcgacggcacggtaaaataaaaaataaaaagcctcctcctcctcctcctcccctatgatggcggatgcggcggcgggggggcgggccgatctggacgccgttgacccgcccgattcggctcggtcgcatccccccgtgcgcgcgtttactgggaggatctgttgtatttggacgttttagactggatcgagtgagggggattttgcggtgttcttgctgtgacgggattcagctatgtaggtgtaggaatcttatgttaacttgttgggtggctctgctgcttctgattctttctgtgaatctggagtaacaaattctttctgtgaatctggagtaacaaggacttgtgctatggccgatctctacttttagtacttcgttatgttctatacggcataggagtccatctctcgatagataagagttctctgattttggatggggatttgcttgatggatccggagtcatataacatgtttgcaaaaaaagaaaaaggaggagtccatctctcgatagataagagttctctgattttggatggggatttgcttgatggatccggagtcatataacatgtttgcaaaaaaagaaaaaggaaaaatgatttagtttgtgttctgtcatgtataacccttgtttctacaaagatgtactagtttgcgatctgattaagcatctcatgctttctcgctttgattctctttcagagtttgaagttggaaatcaaccttgttgttctctgtagcgctttcctttggattgcggagaatttcaaacaaaaccaacaaacctttgcatctgactgacttgaggtaactatgccaaaggacaggagcacccgtgccgtgtcatacgagcgccgccggtctcgtgtttcgccgtacccctccaatgggaagggctgtgctcgcaggtcagaggagtctgctgctgctgccgctgccgctgccgcgaagcaggctgcggaatgggaggatgtccgctgcccggtctgcatggatcacccacacaacgctgttctgctcgtctgctcgtcgcatgagaagggctgccgccctttcatgtgcgacacaagctaccgacactccaattgctttgatcagtaccgcaaggcctctaaggagtcctcaaaggattctggtgccagtgctgctgctgcgccagaatgcagcgagtgccagcagcccataaaactgtcttgcccgttgtgtcgtgggccagtcagccattggacaaaggattatgatgcacggaagtacttgaacgtgaaggttcgagcatgtactaaagagtcctgcgagttcaggggggcatacggtcaactgaggagacacgccagggagaaccatcctactgttagaccaactcaggtggatcctgaacggcagcgagactggcacagaatggagcagcagcgtgatcttggggacttgttcagcatgcttcgttcaggcttaagtgccagggaggacgggatcggagtcagtgaaggggaagaggatatcagcgagagggctctacatagcccatctataacaatggtcttcattgtgcgcactggcaggtcgatactccactacagggaagcattcccaggccaccacagaagaagaacaattcttctgcttggggaggcttttggtcgtgaatcctccccattagggggagcaagtggcagtggtgatggtgacaccacagctcgcgaaaatgatgaaggtgatgacgacgtcacgctatcaacagaggcatcggctggttctcagcatgatggtgaagtcgatggtgatcctgcacattgatgcagctggtagggagtgccaaggcgtgcacctggactgaaaagctctacaagcaagcaatctttcgggttcaccaggcatccaagaccacatgttgggaagaaacatgggggtgttccatttggctttaggcgtagtcaggacatcctgcctacgtgcaagaagaactgagatgaaattgcaatgcagggataggctcaaaaccgctgtggagttgtcttagtttcatttttaatatatttgctggaaggtctgtagcaaacagaaacatcaatggtggtggtgtatttatcatgtccacggctaggacttgggtgaattcaattcactgcgttgtaatttgatctctgaaatatattctttctgcgttgatgaatctgatcatgttaaagcagaaatttgatgtatatttatgtatataggtgcactttggttccttctacattgaagaattcggtcatatgctcctgaaagttgtgctgtgttcgtcagaccatattgtttggacatgagctgctctttgtgggcttaggcgcgtagccttaacttgtcttcttgttgattagaaaaattggatggacacttctatcatatgtataatacaatcgatagactctactttgtgcattaatagacatacagcaaaaaacaatatttgaagctgtgtcagtttctgtattcgatggcaggctgcatctgcgtctaatcctcttcaacggttcagtatgggccaagaggaaccgccatctctgccgttgcaacaagagtagttactgcctccaatggtatggaaggaaactgacgcccattgatccaccatctgagcacactgaatttcatttccttctttttctgtgaaaaatcctacgaatagaattaactctctaaaaactactgaaaatatttctatgtttgacctgtaggcatacagctttctcttcttctccccccatttcttgaactgcagatactgtgagtgcttcagcaacatgtggttttgctccaagctgatactgaagaagccttaggcattcagaccaaagatcgtcgatgtcagtgcaaatggcttagccgattcggctgtggtaagtgccaatacctgattctacactgtgttttcttgttcagttaggctcaggttattgttctgaatctttggatgaacaggatggtggcgagcgtgaggaaccaagtgaagggatgcgcttgctgtaagtctggatgcaggaagctttactgtgagtgccttcaaggtaaacggaattacgtacggatgcgctactgtcctttgatgcttattttgtgatgatcgtgtcgtgcaaatcttacgttcgctttgtgatttgaaaaacaaagttgcgtgtaccgcgagatgccattgcagagggtgtggcagaatgcaaaagatggtgagtgctgcatcagacgtttattcatgttccttagcatattttctttctttctttcttagtttctttctcttttttttttgggttttctaatggttaagttttttctttaatgtcagtgactgacacagatatacaacgatttgatgacaatggcgattctagtgggacatctggctattccagtggaacaataatgggacagtacaaattgtagacgacaagaggcattggccaacacaatcaagtatgatggaaaaaaatattatagttggctgtccttggaatgttgatccatataattcgtaactgtccttgtgtgttgaacttcaactagtaaagtttgataactagaaaaggcggtggtttgattctttgatgtgataatcatcttggtgatctatttatgcacctgttctactgtttagcctattttcatttagttgcttgaaattctatggttgtacgatatacagtatttttatgatgtgtaatgtgttcacgattagtcaatatttttatgatttgttcctttgtgcagtgatgatggccttgagatcagaaggtttctcaaacatattggtgatggagattactttcagcaaaatggtcaccccctaaacaaaccaccttcaagaacataggtatgtctgctgctgaaagattatctatactttagacagctcatagtaacaccttatcatcttatcttgttatgatttatgaattatgataccttgaaattgtgataaaatcgtacggttaatttttaaatctctcatcttttgttggtccaggggactatgatatcatgtaacgaagtacactaacatgatctagagcacaaatatattatgactgcaagattagtgaggctcgatagcattagtaacgaaagtatcaaacaagcaatacaatactacattatacgcatccctctttagcggtaacaaagtacatcagtagaaaactacaactgtaacgtggtatgcagttgtttggaaaacacatagtgttacatatgctaccaaagccatgactgtcacaattcacatatcctaatcaaccttctcctgtatattgtcaataccttcttctcttatacatcactaccaaagccactgaaccgggttcatattttcgaattagccgcgggatcggtcaagtcccagccttgaactgagccacttgcagacatcgtccatttcttcagggatggtataatgccccaggctgtgtaaatggcatcatgttagttattctagttttcagagaaaaaaatgaagatggggaaaattaagtaagtgtgtctatacccgttgtagggtttaaaattcagatactgaaaacccgagcctcgcaggaaatcggctgatttctcaccatttctgtaggtgacaacctcatcagctgcaaaggcaaaaataagtagaacatttttagcatcattacattttatacacatctagttcaaaacgattgcattgctcacctcttccatggctgagcaggattggtaaggcaccagcccttctcagtgcagtctgagagctgtccatcttgctcttcagagtcctaaataagaacacatgaagaacatcacttgtaaggaaatcattgcaaattaaattattattatcattttccaaaacgatcgaagaatagaatcagaccttgaacagggaagccaaccgctcaaaccgatgacggcgctgagggtgaccgggtaggcaacgccgtttgtgaatcttccatgagcatagcatgcagcagagtggagggcagcggcagcacccatgctgaaaccacctatcccaagcttcactgaaatttgaaattccaccaaagatcagtaagacaaatacagagtattctaaagcttatttaatattttcacattttttttccttttgttctgtaattatggtacaattctgaaaatgtaccatcagatggctcggatgacagtaggtttgcaacgtgtgcagctgaagcatcaagcccttcaatatcatcacggccatccacggaagtgtcctccacatcaaaccctgtttcaatttcagtaaaaaggagaacggcaatatcagaatctgtagccaggttgcagcaaaagaaatggcctagaaaattaggaaagcaaagctgcatgcttctttttttcttttttttttctttttttttctttttggccaagtcataaatggttcagaaacccacatgctgtgcaagggaatccaccgaaagcagcaacagggcgtgttggtgcagtagggcaaatccatttgatctgcataaggatggtataagcttgagagttaataaacttagaactagcatgaacaatgctattgctaaaaatctttttaaaaaattgctatggctaacctagtgattcagataagttacattaatttgaagagataacagaatgaacaagtctatacatgcattattgtgcccatttggaatagggataggaatagaaataagattgtaggtgaagatggttgtgtgcatgattgattcaactgcaaagtgagagtgcagtatggtatcttacattaggcagaggaagagaatccagtagctgggaccagctgcagaagataaaattatgaaaaagaaacaagaaacaagattaggccagtgtttcaagaaaaagtacatgttacagctagtcagcaacttgtgtagagatatttcagtgctgtgctggctttctatcaaaactatagcttcatctaatgacattaacatgtcaacaaaagaagggttatcagaaagtaatggagaataaaagaagtaaagagtgaggaaagaataaaacatgacatagcacaacactggatcaaactaaggcagctaatgagctggctagagcacatatgtatatataattaagttttttcttgtgttctcctgaaagttccaggtagtagtacaatcgtcttattaatgaaatatgccattgtaattcagtactgatgggaaaagcaaagaagtgggaagagaacatttgaagcagacacttgacagttgacacatgcatattgaactcagaaaaagaaaattaatggctagcatattctatgcttttgctgccaaaacccatagaagagaaacaatgccaaaaaaacttatgttatttaatgcaacatcacaaaactgaggtgctccatgcatccttgttggcagacagaaccttgcatgaagcatgaggtaattaatccacatctatctcttctatatttaatcaacatattggtccttcaacaatggattcttgcattcgtgtttctacaccctttcgtggtaagagaaaccaaagaaactattttaatccctcaaggttatatgctattattattttttgcatgtggttcagatagaaacaagatattttgaaataaaaaaaaagagagaatataaccgatcatcttacacacccttcacaaacatgcaagttcaaatgtttatatctacatcgtttaattttctaaagaatacaatgtttcataactgttaatttgaacggtgtgtaccacccccttgagggattaattaaaaacaagcctcttaacgaaccacacaaataataactcacactccaactacagttatagttttgtgtttaatttaagatacgtggattatttgtcataagacacatagatggcaattaaaaccatcaagtgtaactctaaacaagtagtgagtggcagatggccaatatatattccaactggttaattttcttttcgcaaacatcggcatcgtctagctacctccatccttctcgatctacaggaaatttttgtgaggtcggggagcagagacagagagagaataggacaattggagatgatgcatgatcaggctttaattcggaggtaaaaagcaatcctaggaatatatgcatggacagaaatggcgaggccgaatccatcgtttctagcaaaaaaataaaggggcatcgatcgagttacagtacaacgtcgggggagagagaataaagcgattaattgggtgcagatatcaacatcttgacagcctaacctaagctagttcattcgttcgtgttccccatgtcaatctagatcgtcccatccatctctgtttgttgcattcatactaaacacttgcagctatagctagtgaagctaccaccaatctttctgaaccactccctcctttttacttttataatatacatgtatatgacctttggtgaattcaggtcatatataagtatataaaaaaggagtgagtatagtagtagttgtgataaaatctgtgtactactaggacatttaaaaattaaaaactgggagcgtgtagtagtagtacaagtttgcatatttttggtcgtgtgtaatataattattaagctgtggaagaaagaagtcatcatctcgagatcgagagagagaactctagagaagtgatgatgggttaccttgcgccattgtcgccgaggccatggagccacacaatggtggcctggtgcctccccttgggcctcaccacgtacgtcctcccgtactccacccgccgcccgcctcgcccccctgcacgcattccattcgatcgttcgtcagcacacgccggcggcggagaaagaagacacgaagaagcaaagaaagaaaaaagagaggaagtgagagagagaccagaagagctgctcccgtagctcatggccggcgaccaagaagcttgagagaactagtactgcaggtgatcgatcgatcgctggaggatggtgaatttggctgctgctgctgctgatggatatgtatagctctggatcgaggagaaagcggtggaagtacgaagagcacaggcggcccgtatttatagagcggcgacgacgaggaagacgacgtggtgaatatgtgaatcgcgcgggcgcgcacccggtaatcaacagttggcggcggctggtaggttggctcgctagctgtctgtcgctgggagaggggggaataataatccatgacctctagcatacgtaatgcgtgccggaatgagataaacgttcattcagttatttgccaacttaggatggagattttacaaatatacctgaataaaatgtcttttctaacttgtgttggtattagtattagttattgtctagtcatttcctggtttttatgcgctgtctattgagcgcatcataagtggtagtagcttctttgaagtaaaggccgggattctttgcattattaaagggagtagatatatttatggcgccatatttttcaacaaaaaatagtcggcatgtatttacattgtaagtatctaaattatatatgtaattttattgtatttagtatgtaagtctcaaaattacctatgtaagtgtttaaattacatatgtaattttagtgtatttaggatgtaagtcccaaaattacatatgtaagtgcctaaattacatatgtaattttagtgtatttaggatgtaagtcccaaaattacatatgtaagtgtctaaataacatatgcaatataatcgcaacaaaaagaagagggaagctcacaaatcataggtccgtttggagaaaagaaagaagctagcaaagtagaaaataattactcacaaaatcacatgtccctttgagtatttgtaacaaagtaatcaagtgatgaagtcatccttgatatacacctcgacaaaatcaatcagcgtgggaagctaagcacggacatcaagggagatcctaccactagaaaaaacgactgttttttcctcaaaaaacatgcgccataaatatagcaataccgttattaaaaagttagcacacgtacacacgagggagggcaaaaaaattttaaaaaagaaagatcaggggcttttgccttttgctacctcaggatggggatgggggaggtggcagcctgcaggcattggcagtggagggtctcttaatgtatgtaaattcattggtgtaatggtgtgtgggtggcgtgtaagtagggatgaaaaacggtgccggaaattcccgactgagcggctattattcccaattttgttttgctgatcaaaccatcttgaaatcaaatggctaccaatcaacaaaaatagaaaagcaagtggtaaaaatgaaatgtgcaaactgaaatggttttgatgtttgaccaaccatttacttggtttaccgtatttttcacagatattgttaccgtgtttataatatggaaattgtcatatttctaaataaatcagttcatgtagttcaaggcctataggttttactctaactcccccactaaaccctatatatttttagcacacggttaaaagcgaggcaactcacaattagtgttgtaagcatgaactaacgtggtatatagtcattctaaattacatatgtgattttgtacttcagaatttcttctgattgattttccgtttttgatttcctgatttttctatatcattttcatttctagctctactgttttcaattatgtttctaagaagaaaatgttacggaaatgggtaaggctgtttttcaactattttcatccctgagtgtaaggattgtaaaagcacaagaattaacagaaaaataaggaacaatccttaggaacaaaatggcctcatgggatttcaagacacacaagttaagtttagggccggtatgtttttggaaatcaatgtttctccgaagggtctttctaaaaatatagtgatagattttttaggtaaaaatatgtcaaatgtaattatagtataaatctaatgtaattacatatgtgaattagtgtaattacatatgtaattttgaaacttacattgtaaatacactaaatacatgctgattattttttcatgaaaaatatggcgacacatttatagcaaatccgttctccgaaatagggtgtgagagagaaacataactcatgtttcttttgagcataggaatacacaacatatgaatttgacaacacattcatacgtttcaaactttcttgtgggaaaagaaatccaaaattcccaacaaaaaccttacaaatctgggcctcgtttggaatgcagattttttttctcgaatcatgttagattcaaaaagattcttgtggaaaccctgtgaatttcctataaagtccctacaaattcttatgtccaaaggtggcccaaagagaccctggggtgagctttctcctgtgcaaaggataagcatgggaaaatagtcctgtagttcatgggtcctatgcacaaaatggttaggaggttaattgtcagcaccacactatgcagcccatctgagtaggccccaaaccctgcaagattattttccatgagcatggcatgtatttaggcagggagaatagattcaatccttggcagtggagagagaaccgaaatatataaatactacttagtaccccttttataaccacccaatttctcatcttggtgtcttgataagatactaatgcccactaatttagcatcacaagtcctaaatagtattatatacaacataaatacaaatgctaaggaataagcataagtgttttttttctatccctttgtctctctagagaaagaaaaagaaaataaaggtacatagtgaatgtctcactctcagtacctaaggaaggttcttgttaacacaaatgctccatatctagtaggaaaaggcatcttttgttgtagaatgtttgtgcacaggaggaagcttgttgttcatgctccttcctagttcctatcataatgtgataaaaaaattcaaaattactgctgcacatggaagcaagtactgtgcaggtaaaaatacagaacaactgtagattttcagaagcaatttcggtaatatatatatatacagaactccctgtagagtttcaggagcaattttcagtagagtactccacatagagtttcaggagtactagacagataaagtgaagattgccatagcaaggaagattccagaaatatctcgaatgtgtcgacactaaaacagcacttatatgatatatcacccccaacttggcacaattgcaggcataatcatatcattgacatggcggcgctgatcctcaaggtattgatactgaacgaagaacagcaaaatgaactgctcaccacaaagcatgcacaggtatgtgataactgacaggaacacttaactgtaaattgcccatcaagagaaactacaaggacctattctttcgttataaatctcatcaagttttacatcgacgatctgccaaaaaaatattcctcagcagcatacctgcttctcctttgaggcaagcttttctaacaaactgctattcttaggttcggcttgcgaaaaaagtgacgtaactttggccagggttgctttcagtgtagagaggtaggcagtaggctttgatcccctctcgacgatggaaatttaaaagggattaaacaaagagctaagtcaaatctaaacaaaacccctggggaatttgtgatagaagaatgatgcaaagctctgcacatttgcacctagtttttccctcccgtgtaagctccactacacacaggaagaatcatatgcacttcacctctgtattttctatgcattgagattagcagtgtgggaggcagcttgaggctaaactatgtgggctatgtgagatttttgtccctatatgttattttttttattctttttagtgtagtccctatctgagcttgagagattagagtctacatagattagggactaggtgaagtttctcactgaaacacttgcttattaactacctaatcctttctccatgctagagattataggccatgattgtgttctgtcagaaggcttggggcctgcatattccatatgtagcatacctttcttctaattgcatatgctcctatgaaacgtgaggcatccataaagtttaatacaattatattctgaaaaggtcgtagctagcacagaaatttcagacaattgtcgttgctgaaaatattacagtttgtcggttacggggaacagcatacgcaactagcacaaatattctataattatctcttttcttgtaaacatttcatggatggttaagtacatgagatccatgattttactctatataaaaaaaatcccccctttcagtaaaacctaattcatatgtagaaaacgagggccagaggttccttgagaaaaagaagaagaatccaacgttgtatttagatgtcatgtcatagctagctccggtttacttttcaagcatcccctttgttacagaaatacagtattgttatgtactatatgtttctttcaaaatattactttcacatattttaacaagattcgaagtaacgcacacactgttttgcattttctgctgaaaccaggatggtctgactctgaagattctgtcctaagcacgtaaatactgaaggttattttttttccccaacggggccgtgttcttacagttgtcaaaatgggtttgaaatgaatggtcgtgctcatacataaaacacggtttcatgtaaagaaatgctcatgtccgtctcatcagaaatacttttgaaatctgacagcaatattctctgggttctgattgcctgtgtcgttaggtacggttccctggttcatcatctcgcactgaacaacacaacggaaagataatttactgtatgaattgagtccacgtcaagggcctaattaacacaagtcagcggccagaacgcaacttggaatgatgcagaaataaagagagatatttgaggccagcattgtgtcaagaaggaataatgccaccagaaaagactccaaatcttcctgccggttgcaattgcacgatcacacctgaaaaactcgagagaaaaaactttgcttccgtactctcttccacttattaatcatatatgtgatttttattttatgtgtacaatttgtcctcttttattcagtttatgcaccttgaggctaatgaaaaaaaaaggtttttttgaaggaaaaggtatttaaaggtgaagtttagtgcagaacctatcctctgatcaacatttaatatataatccagaacaaagacaattctgtttatcttggcgcttctgagttgtttaataaatgttcgtgcttgtgaaggaggggaaaagaaatatgagatgaaaagttacaacaatagtagcatttgtcaactttaatccatcttttcacatgagcacacatgctaaatttttttctttataaaaatccgattttattccaatccattggtgcagccactctgtcagaattccatgggtttcaaggtgcaaaaacccaccattacaagtcctattcgcgcttgcggtaactccgtgcctgggtgcgctgaattcctgaaagagatgaaacagaatatgatgatctgtttgcaacaattcttttacacttttttctacttttttcacttgtaagaaaccatgcgtagggcacacttccattaactacaatatcatccaaagaaggagggaatgttatctgattttaccactaaagtttctggcatggcttcttctctcaaaagtaaaaaaaaaaaaaaaagaaaggctcccaagtgtctgaaatgacatgatagatttcatatgaattccttggcggtgtgaagctctcaaagaaactacaggagcacaagttttctcctgtccattcaccaattgatgcgtgtcaacatcggccaattaaaccatgtcacgcgagatgctgcgggaattcctcgtgttcttggagcccttctttttcgcgatcaatttgcgactgttctgaatcaccagaggcattatcttgaagcttatggagaaggggaatccaagcataataatatgttcttgcctttttcttactttttttttctttctaaaatgtcaatgcttgcatgtacatggtattgcatttacatcttggcatgatgccacaaaagttgaatgcaactgaaaagggagggtaggggtatgtagaaagaagaacatcaaacagctacgcagtactaccttttccttttcatttgcaacgaacgaagtacaagctcttgagactacctaggcaagaatccagtttcctttatgctgaaatcttcagagtgagcggattaacggagcaacgctgctcttttgttccgaaaacgaaaaaaagaaaaggaacagggctctaacattcgccagatcaccctagctagctaggtgagtggagcagggagttcaaaaaaacaacggaaatgcacttcgttcacaccaaaatgtacgtctagacacacaggaaacatctcttatatttaggacggatgcagtatttggtagagccaaccaaaacaacggaaacaaaatttgttggtcgagtttaaatatttgcaatgtttgaattgaaatttgtttcaaaagggttcatctggattttctgaaatgattctgaaatttgtgaagaggcttaaaaggtttttcaatggctaattaatctcttgcattcagggagggaatgtgaagcggggctaattaagcctatgaaatggcgccactggtcacctcaccggttagggcatcgatcgcctcgtcatagtggggattcttgctcccttttttctgagattttccgcggcacagagaataatatcgtggtgtcatcaccaccatcagcgattgaattgaacgcccctggaaacccctggcccttcctattgttagccggtgacggatttgatgtttcctagccagcattttccatgtaaattgtgtgtacaagtataacgaacaatatatatgcatgttcatgaattgtaatattgatctgatctcaaaaaaaatatatggttcatgaattgacgtgttgtgctgcacgctgaatcaaaagagctcctttttcacgaggttccttagagagagagcgatggtgtatcatatcgcattttctagtgttaattttctgatatctcaaccatagaaaaaagtacttcctccgtttcacaatataagtcattctagtatttcccacattaatactgatgttaataaatctagatacatatatatgtctaaattcattaatatcagtataaatgtggaaaatactaaaataacttacattgtgaaacggaggtagtatgtattagatggactcgtgccctctaccgtcacgacaagtgccattgagacactaacatatgaacctgatggtattagatgatctaaaagctaacgttgaaatagcgatacgtgcaataccatctcacttgttagaaaccatgcatatataaaatactaccttaaatatgaaataggagtagatgccggtgctatgaaaatgcagagaactacaagaagcatttctcctccgaccctctttttttttgctctgttgaaaacagcaaagcatttcctctttgttgcccttttggaataatggcgagggagatatagctgtgacaaattgagcaggcagtgacagatcataaagataatacataaaccgtgtcaccgttcacacaataaagaaaaaaaaacgacattattataaaaaagtatattattgcttttctcttcgcactactgcaggacattggaaaaggcatgcatttggctcaaaaccgatgtaagttataggcctataattttttctcagggtaaacttaaaacgttgcttggatgggccataacctattaaatttaccagtgtttttggcccattccgacattttgattgttttgttctctgatgagatcatgagagaaaagcagcagcagcttcgttttttcctgcacggtcaagagcaggtttcccaattcatgttcttcatgagcattgctatctagaatcagagcagaacaatgtaatggtcccaagacacaggtgattcttcagttccctacagttcttcaggatttcagatcttgcatggtcaagaagagcaggacaagtgattatattctagcaatccgatggattaaaaaaatcgttttttttccttttttgtgattatgattgagtatcgactatcaaggacatgtgtttatatgctgcctgtcactcttaacttaattacaagggtattcgtaaggcaactagaaaagattacaagtgtgttcttggtgacctaaaattacaaggtgcctttacaagtgttaaaaaatactatactcccaagcagccccgcacagggttcaacatttcggcccttccgatacgatattatttcagccgaaatttttaatttttttaaaattttacgtgaattttggtattatttattcaaaattgactaaattttgttctaaatttcggaccaaagttttcgaaatttcgtcataggggcaccgccagatacaaacacccaaaacgaaaaacgaaaagttgaacctggccctgcacgcattgctgaagagatcaccgatggatggcacgtgcgagccatcagccatgcgtgcatggctggctgagcgacaggtaacctacggggaatgaaacttttttccgatgaatagtgtggctactatcctctttagtcagtgccggaatcctattcctatccgatccgagcgtcgagcgatggatcgagccgtgtttttgtcatgttggtaaagaggggtgcttgtgcgtgtacgggcacgggctggacccggcctgactttcaagtttgtgagacacttcatccgtagggaaaaccccatcaggccttgttcgtttaattcctcccataaaaaaattaagagggatttgaagccttggaggagatttatttcacataatatattatgatgtagaattattcccctctcttgagaattaaaggacaaaatctcaggaatattggtgtcttgatggccacccgtcataataaaggccccattcctaacactccattcatgtcggtttccgtgaggatcggtttcagacgtcaggagaagactgctttctggtgcgcatgatccctcaaggtggatcaaccgtacatgtgttgcttgtgtatttgtgtatggtacggtcatatattctaagctatatgagcgtaagactatgaacaatatataggcttttcattcggtctccttgatttgaatgatgatttctttagataacatataatatctggcctttacttcaactaaagctatagccacttagtacataatttttggttgaaaaccaagtataacaatttctaacaaaggatagagagacgacacaagaataaatgtcatcatcaaagaagagaaaaaacttatttaaagaataatcctactgttaaatctccatttgaagttgacagaaatttgcatggcggttgtctccaagttccaacatgcaacgtgaataatcaccattttctcttcacacctttgtagttatacccaaaaccgaaaccagtatattactttgaagagtacctacatataagatttagttagcgttttgtcaaaaactatttcatttctactcaacgatagagctcaatataaagtagatgctataactaaaatatgtttttttatccttaaacggtgattaattgcatataagaacaacaatcgataattcaaacaaagatagtgtctaatgcttgttatgtggtcataaaatgcatgctgggaaggggagggggtgcacaggatcaaggaaaatattggccacatttcaaggaatctacattagtgaaaagggaatccctagatgtcaccaagatgagccacatcatcaaacaaatatcaaccgttgaatgaatgatttggataaggagaaccgttggattagtacagaaaaaatcagtaaaaaaaagacaaacaattttattgggtgttttagaagcacctcccatgagatgtgtgctaacaaagatgtgaaaatgaaaaaaagaataccttaaacattgaccgtataaaagaatatcaatgagtattcagtactagttctattgtatcaataataatgagtatcggtgtatatatgaatagctaattaacctgatgctatcgactacttcatcacaccttaaaactaaaaatcatgtgtcatgatgggacatagtaaatttagtaaacttgatttaacatatgattataagatttatgataataaaatgtatatatacttcttaactggtcatgacataattgtagcatgtaacagatgtggctatttatattattattgctacagataatgcatttaaagataatggctacagtaatatacaacagattttttttgttgcgataaaattcttaatcatgaatcaagatatatagactcattaatgttatagttacacatcaaaatatgttaaaaatatatttcctgtttgtagggatacctaggctagatattgagtttagcatgacaaccagtggcgtagctaggattttagattagggtggtccaacttaacataaattttctaaacactacaataggattatgcattgttttaatttatcaatccaattctaatcggaatttctaaaatcgaaccgaaactgacatagtgacatagctgcttgctgaacgctgctctcgatcctagtcgccagacgccgattgcccccgttggacacgggtccccaatcccaatcgttgagtcgtcgagttacgaaagaagcactcgcacgatcaatggtgtagtcaggatgggaactgggaaggacggaagctgaaacaacaactcgataaggcaaatcaactaatgaaacaaaagcatcgttcttttctacgtttgcatcagaacaggggtaataggcatttgggctagattttactgtgttccatggcccacacggaccaccatgtggctccgcccctgtaccacaggggccagggcacaactccgccatcacctaccacgttaccactaacttcgttcatctcacagcgagccaggttagttcgaatgagtgaattgttaccccttccaactttcttattccacttttctgttttttaagtgcaagtgcatgctatgtagtttagagctaatgaattttataatagctcatgtgctaatgcatctaacactccaaagagctaccacggctaatatgtagttgcaaattcacacaagaagtggaccagcgaagccatggcaaactaacatgccatccagtgggttgtagaggtaattaagatagagagaaatggaagacatgattaactgtttattactagtgctactgatttcctatgcataaattcatattattttatatatacatatatatgacatatccccgtatgcgtgtttttcaaaaaatgtcgtactccccgtatctgggtaacatagactgtaaccatccaacctcgttgttgccttggcatgccaaataagaaatccaatataaaacccaaagcaccgagtagggaacaaaggagatcttcgatggaatagtttgccagtcaacttcaacctaagatgtacctgccagaccgcacgaaggcggcgactaaatgtgttacacatctcaggggacttgactgaaagtgctaaattccacgatcatcgcaattgctcaaaactcttactcgtgatcagctagcctcaggaagttgctagcttcacactttcatcttagctagaccaccaaaacacaaaggcctaagttaaacttaggaacaattaaagacatagaactaaatcataaatataaggccgaccagccaatagtagaagtttagcagaaagcttgtctacccttccacacaagcaaaccgactaggggtaggcccctagttagaatcatgctgaaaccctcaacctaagcaacaaaataatcaacaagcaagagtcggtacattatataaataatgtattggcaaagccacgatcaaacctatgcaagctctaaatcaaaggagggctatttgtggtttcattttcagcacaaagcaaattttgtttcataaacattttgcaacggaacttataacacaagttaaagcatgtacatgatataaaacattgtgatccacgtaagtaatttcaacaatataaatatcatatccacacttgcaccatcatgccatcataatcatcataagtatcataaactcccaatcccatggcctatttcacacatttaaaagaacaaaactatacttatggcgcacacactatgccgctcatgaccatgagcatggctaatcgattattttagactctcaagagtttgtaaaaaaccacatgatgtgaatcgctctaatttatctggtacccgtcggtatcaccacaccttgcctattgaatgcggcctagaggtcacaatgagggcattacatttcccaccagcacagatcctggtcttcacctgcggcatgacggattcgcaaccagttagtgccccagatcaagccgccatcatacttgcacagctcagctgccactgggcgagggatcggcagatctgcagagccatcattttcatcttctagtgaagtcatccctccaaggtgttagaaccctagctcacgattcacacaagcacacaagaacaagatgatacgaggaactcgattgatagatttctctctcgcgtccaaccggaccgagccaccgtcgccaacgccgccgccgagttccaagccaagttattacaactgttgttttgcgtatttataggatgttctctcctcaccaactctctctctctctctctctctctctctctcttacatggccaagatgggccgatacacagagatggttcatacagcccagtcaggtcccatgtacttcttgttccttcgccggatgcgttttccccttggtaaggcgtcttcctccaactcgccttcagactatacgtcgtcagccttgttgtcgtcttccccttcaggtccttccttctcttgggacttccagctggtacttccttgagctctaacacaaggtgagctggacaacaagctgaaactctgatccattgttgttgcggcggcacagtagtatcccagcgttcctgctcccgtggatgttgatgacgacgccatgagagcaagcggggagcctcctgagatcagccgcagcggcgccagcagctgctgcagggtggttgtagcggtagacgaacagctcttcgcagaggaggcaatgtatggccttattggccggaaactcgcccccccccccttccttcacctggttttcttttttggcaccgcattaattttctattttagtaaatttatgcacctaaagtttatacacctcaagtttacacatctaaagtttagagaccaaaagtttacaagtcaaaagtttatatatccaattcaaatttgaatttgaattcaaatattttttatatatagtatttctatacatctaaagtttatacacctaaagtttatagacctaaagtttatatacccgtttcaaatttgaatccgaattatatctgattcaaatttgaatttgaattcaaatattttctatatatagtatttctatgcatctaaagtttatacacctaaagtttatagacccaaagtttataagtcaaaagtttacatacccgtttcaaatttgattgaattcaaatattttttatatatagtatttctatacataaattttttcaaactttttttaatcttgtggtgtactgtagtaggaagagaaggaagggaggaggaaagggagatccgagtgtataggggaaggttgggaattgggatcggacgatttcttagagcaagtttaataagagagccaactatgagcttatagcttatattagagttaacatgtatagtaaatgggctataaggttatctcttttttttcttctcctctctctatctctcacctatgtatttaatgtatctatcttaaagtatgtgaatagctagctcttgcatgaaagccaatcctctccatttttcaaattctctttcctccacataagcttatagttggcttatagcctactattatacttttttttgaaactaaaccggcaggagaactgccaattatattttcaataagcaggagtaaaaaccctagacgggttacaagaaaagaaaaaacaaccaccggctggctgaacagctgcacagcacacgccagaactcactagcaactgaaaccattgacggagcccaacatagaacgtcgttaccaagcttgaccaagacaacaaaggggttccgaccttgcaaccgtgtcatcgttgccgagcttgtcgcctagcgacacagcagctccgacttcaaattggttgcatcatccatacctaactcgctgtcaatggtcaagtggcttcaacttcccacgaagaacttcagccaaagccatctaaacgccacatcctatccacggccaacagcaaaacccctagaaagagaatgcaacatgtcatcgttgcctagcttcgtcaccctacaaagcagctccgacttcacctagcaaacacaaacaaggagcgaaggtcgcccgccgcaaaacaaaaagtgggactagacagtgaaggcctcgtcaaaaccaagtactgaaaagcttcgaagccaatgcatagaccattaatgacatccttgcatgaaaaagtttctccaaagcggtgcctccaaggaggacacgacgtggatcgccgccaccgctcgtccggaagccagagccaggttttcacccggagaacggtagggaaaggagagagatcaacgccaaaatgacgcctccaaggaggtgaatgacgccaaaaggcgccgccgtcgacagccggccaattgcacagcgaggctttcgccagcgatttcccgtccaaacccacacaaccagtccgcgcaagatgatcgtcgccggtcggctacatcgtccctttagcaatcagtcctaggctaccgcccgcagctccggcagactcgccagaccagccgcagcactggccctcctgccgcggccacccacgcctcctgctgccctctaaccgccgcccttgtcgacgcgtcgtccactgccgaggagccaccggaggggatccggcctccctcgccggagaggccagatccggactgggggtgccggtgccgaactagggggaaccatagccggcggcgccgtgtgcagctaggcccatgcctctcccaccgttagcgccgcccccgccgtcccgtcgccgccgccgccgcctcctctgccccgccaccccggagccggcctccttcgctgcgggcgttggatccggcctggagggagccagatccggcggcggccaggctctctgcctcgtccccgccgccagcgacgtcgcctcctccgcccgcgccgcgactgccgcagccggcggccttctctgccggcacctcgctaatgcggcgtggccgacgccgcttcgtctcgatctggccgcgggggggccagatccgctaacggcgacgccggcactactacctctggccgtcggcgtcgccggagccgcctcaacgcgtcgccgcccctccgcctgtttcccgtcggggccccaaccaccgggtgttggagggggtagaatgccccgccgccaccgtccttgccgctgcccggctttgccggcggctgctcaggcggcggcgaggtgggggaggcgagggagagaaggccggcggcggggcggcttcaggtcgcctcctgtgtcaccctggagcggagcgacacgggggtcctctctcaaagagagactattatacttgctcttagggtttgccaaggtaggcgcttcgagtggtgaaaggaattgaattttaaatatatattgtttatttatttattttttttcccagaaaaatccgggatgtaattttttggcataaatatatcatcgtcgctgagtgggagttgcacaatgatggttgcgcaggagctgctcgaggaccgtgctgaggaatctctatgtaaaaagaatcgatgttgctaataagctgcaagtttacttgtaactttgtttatgatacccttaattttttttatttaacaaaatgaagtgtgcatttgcttgcaggctaaaatatggccttcttcgccaataccgatgggtggagtggcaattagcttcaatatctgatttgagatctcacatggcaatataatagatgtgctttgtgctatattttgggtttgagacatggtgatagatgtgctgacgtgctgtgagtgtgaggtatattttgggttcaatatctgagttgagacatagcaatagaggtgtttctgtggtatatatttgggttgcaatgttttagggccattgtaacggtatatttggaaaaaaaataatttgtgaataaaatttttatatacacgttcttagcaatctaaaggctaaaaaataaactatgataaaaaccaaatcaactttaaatttaaagttgaaaattcaaattttagcttattagcgtataagcgaaaagatgagaccgtttgatagctgctaggttgcatctgtagcctattgttttgggttgtgttattctaacactgtcaatcttaggttgaaatgtttgatatatactcactcgatcttgacattggaatgaaatatgcgactccactgcatcttctttgtgagctattcaatgcatcaaatttataattgtgttttacattgctcgtacacgatatctcaattttgtgttttttttaatgtttgtacatatgtctaaaactcttcccccgtccttaaaaaaaaaacctagagaaagatgagacataacataaaacaatgaatctaaaccagattcgttccgtccttgcctagtttagcttagggaatatttttttcaaaagatccttgaaataaataataaggttttagcattttctgtacttttcagtgtcggcgctgtgaaatgtaagggtaaaaagtctaaaaagtaggttagttgtacacatgctccagtagtctttccggtgaaatttggcatgttatcttactgtttatcgtcgctgtgctgacatctgtaagtaagttcatgaagacatgacaagcacttccataactgtcacattatgaggaaattggggactatgagacgatcgttaaagatttagtggctgcttgcaaacagggactcactgagcactgaaaataaactgttgcatgatctgaatagaacaggtccatcacaccagatggccattaggatacacaagaaaaacgcagctgatgcagtcatcttttattcgatgatgctccgaaggaaatgcacaggtcaagcctcgatgagttttttgtttggacaaaatccctaaggaaaaaactaccacctgcttgatggccaaatgtgtgcattcataaacaaggacgccgtagagcagtctggtgctaaaaaggtttaaatgaaatcatctgcctcatcaaattcttattatcagaaccacgaggcatgggcgtccttagtggtgatgctcgtcgtcatcatcatgtccatctggatcaccaccatcaccaatgaccttaagctgcaaaaggcgagcaacaaagatccattaaagaacaatagaacattacagaatcaaaacagcttggaactgtgagctacattcaataaaaacagttactaaatacataaattaaagtaatatgtcaaacaacgaattccaattaccacaaaatattgtgaacagactgggcactcatgcggttcatcttttttcaaccagaaccatacaacatcatgctcatcctctgtaaatgaaagaagtgaaaaaatgttgataccagtattgcataatatttggcagtttagagttttcgctgagccaagtcaacactgactgacctccttcaccaccaggacaaccaactatcctcttgttatagtaggattcaatgacagctggggcctcctgcaggtaacaccatagcaaattgatgaataacatgacatggtgctcaaatgatgctgcaagataataaatgaagagactaatgtgccatggttcagatccagcatcatccttacagccaatttaaaagaatagctccaaagttgaaatttcatcattttaaagcaatcgcaaatcacaatcagtgcaaatcatccccctcaggccctcactctaaaccacccatgtttaatcaacaagacatcaacatggataggctaccccccaacccacacacacacaaacaaaaaggtgtaacatgctgcaacagattcaaaagacttaatcgtagcagaagtagaagtacaggaaaggtcatggtgagccaggacaggctaaaatcagcagggaatacttgggattgtgcaatctatcgccacctcttgcagcaccctgctgcccattgtggctgtgtttgcagaggtcaaaggaccatgttcacacacagcgtcaaggaaattaaggaaaggacttaaggcttgatgtacaggcaagaaagaaaccgtcaataagaataaatcaaggtcccgcctctaatgttcttcattactctcctgtctcctctgcatctgtatctcaacaaaaagaaatccaggttctcatcggcaataattttctcactaccatattctacgtcttagaattgaaaaaaaaaataattttcagttgcacttccattgcacgctgctaaaccagagtctctgtcatcatggcttgcctcctgactcctacatttgggatgtggagcgtggcaggtgatcaggattgggcatgatgcaggtggctactactttgtacacagaagagattgagtaactgataggatataaactgggctggattgattgaagcggtggactggtattgctagctgaagggcataaaacaaagttctaagagttgagtagttagattttgactccgcggaaagccaacagggggtaaaatgggttcagttcaaaataagaattgtggacaagtaacatagaaacctgtttccaacaggaaaagcaaacagcaatggggaaaatgaatgacaggtaaattcaaataagtaacagtacgatgtgtcacaaggatataagggagtgtaacacagaagggagcaaactaggggaaactggacgagtccctcaaacagacatttgtttattgtacaaatacatgaaggtgtataaatatgctcatttacaaatatttgatgacctctttacagatgaaatacagatttcggattaaaaacgcaacttgatatttaatgatcacatcactgtctataaattgaccaagcttgtgtggtctgctgtgataatactaggcattgagaaatcagaattagagaaaaaaaacatgctgtgataataataggcattcagaaatcagaattcaagaaaaaaaacatacatagtactaatgttaaaagacttggctacaggaagaggaaaatcatccaaagaacaggtgggtgtggtgagggcacagcagcggatgtatgctggttcttgttgagccacttcacacattagtgtgtcgttatttttttctggtatacatcaagaggtaagcgaaacacctttgcaggaacagaagggcacagttcaccacctagtggttaccctaataaatttggcacgaacactaatgttcttgggatagtaaaaaaaaatttaaaaaaaagatctcaccactcttagaacagaatagtcaatcagatgatttgcagttaggtgatgtacaaagacattctacaacaggtcaccaaatatccctgctgacatcaagaggtaagcgaaacacctttgcaggaacacaagggcacagttcaccacctagcggttaccgtaataacctactaaatttggcacgaacactaatgtttttgggatagtccaaatttaaaaaaaaaacgatctcaccactcttagaacagaataatcaatcaggtgatttgcagttaggtgatgtacaaagacattctacaacaggtcaccaaatacccctgcttcaaaaacaggttttcatagttcctattcaatctgagacatagattgccaacttaacaaaaaatctaagtatcaggactaaaagtccttgcattgcatagctcaagcatttaaccacagtaagtttgtagtccactaccatatcacaaatgcaacaacaaaatgaagttaacatactctcaccgccaaacaatacttataaacagttcccagttacaggtaccggtttgctagatagctatagaaaaacagattaatgcaacattcccaagataatgttcaccattcagtctctaatttcgacttcgacaattgtttcaacacaaaaaaaatgcatattaaacttgatatttctcagcaactaatgtttatttaggtgttccagctagtcaaaagaatgtaacttaatggcatatccaaaaaacagtttcaatgaagaaaaggcaccccaccaatatgcatattaatcaataggattgggtcagccatattagtttatatgaaaggagcgctgcgtttctgatcaaataagatagcacacactgtgtaaacattattgtgtatcctgcaccaactactcatagaagtttaaagaaagcatccctacaatatatgacaagaacttatcataagtagcattagtcataacatcgcaaactgccaacgggggaagaatagtttgcaccaatatattaactagtaacaatcatttgctcaataatgtggaacaactattgatgctttagtagacaggcaaaggcaatgaacatggagatcaaacacattgcccgtcatagagtgaacaagttttacaacaatggtgcattgaagaatagcacacgaaaacaattcccgaaacgcattagtgtatagaaccaggcaatatagcatgactactggcaaaaaatgcagtttctccctcccagcacaacgcgaatcaagtcgaaggtaatctagcaaagcattcgcaattcatagtttcattaaattcagctctaataaacctaaagctaaggaatagaaccaccacgtatggtgacgatcgcagattcagaatttcagatcaacagaatcaatagaaaatatcctacaactacgaccagcgaacgcctcaccttggtaccaaatgggcctacgggaggatccatgtcgaaccgcttctccccctgcgaaaccacagacagatcggcaaatcacgaaacccatttccagaacagacaaaaaggagcaatactccaacccgaagaagcaaaaaaaaaaacgaaaaaaaaaaggcataggcatctccaccttgagctccgccgcgagctcctcgcgctccagccccgtggcgatgggcatgacgtcctccaccgtcgccggcttgtcccctgcagcgcgacccccaaccaccgaccgatcagcgccgcccccaccaccccacggaagcacatccaaacacgcgagatccgaggaggagagcccttaccggacaggagagggctggtgcggcggaaggcggcggcggccgccgtggagagcggcgcggcgcgggcgagggaggcggggcccgcggcgcccgatgccgccgcggaggcggaggcggaggcggcgcggcgcagggccggggccagggtttggaggcggcgccacatggcgggcgtgcgtgtgctctcaggtcgcggcgccctcggcggcggcggcgggggaatggggaggagggaggaggaggcgaggcgagatggggctctctctcgatttgatttgacccggatgcggacgaagacggcggggtgggatggggaggaggaaataggagggagaggggggaggtgtgtgttttgggccagaggggtgtgtggcctgtggcgccgccagaccagtgtaaattcggctctgccagcgtgtcaatagcaaccaggaggacacgctattgtttggaagaaaattgggttaattctatttatgccattacaaatgtggttattaaaaaatatactattacaattcgtatatttataaatatgccattcaaattttataaaattagaaccatgccatcacaatcttcatccccatctacacgtggagcctactcttcagattgatcttcctcctccaccctcccctcttctcttttttccttctttcttcccatgtagagcagaaggaagagatgagcggcgcgccggtgctccagtggctgggaggtggcgacaccggcggtcaaatgtgttaccgagcttggctcaatcaaggaatgtgttgcccgatacaaggagctagagagatggccagaatagcggatggaagggcttggctctggcggcaaagaaggtgatggtggcggcgggatagggtggctaaaagagaggggaaactaggggaatgggttctcctcggcgggacaaagccggtggtgcgaggatttggtgtgaggggagcgagtcattaagattaaacacaatcactaagaaaatagatagaatataaatatggaaaatattatgattggacgagaaatggagataggtgaggaaattaaacggcgaaagattgagattgatggtaagaaaatgttagtgaagaagttgttatattttaagataaattttgaaggctagaagttattatattttgagacgaagaaaatatgataatatgtataaaatctaaacacaaatgtactcgagttcttcacaattcacaaatgaatttagacgttcagatttgttgtattataatatgtaatagattagttttctatagaacaagaggactattccatccgtcccattttaagtgcagccatatatgattttccgcgaccaactttgatcgtccgtcatatttgaaaaatttttgaaaaaaaaattaaaaacataagtcacgagtaaagtaatattcatgttttatcatctcataacaataaaaatattaattataaaaattttcaaataaaacaaacaattaaaattaaacatagaaactcacgtttgcacttaaaatagaactgagggagtacgtgtgtgtgcaggccgtatagctttgcctgcaaatatcttttcgctctatagctttctccgagaagggacaaggaagtgaagccaggccggctgtggtagaagcagcacaatacacaaagaaggggtacgtaaggctaatttgctaggcacaatttctcaacccatccatctcgacaggccgccatatcggttcgatttacggtctataggaatatccacatgggcaatgcattctaaaatctcttatttttataaagctaatacttactaaacatgtaaaactcaacatgaaaacatagtatttattattactcctataacctacatgcaaacatgttatatcaacccattaaacacgtaaagctcaccaagtaagtatatagtaattatatctataaattatttcattttaaaactagacatacatatactaaatcatcattctcaaattatttttataatattttaatccaaatcatttcatcatttctccaatatgtaatatatatatcccgcagcaaagtgtgggccatcatctggtagtaggaatatcgaagtacagattaaccgtgaacaaacaccttttgatttggaggaaaaacattgaaaaattttctataaatatctttgaaacaaataattgaatcatgtcctatcatttgaaattcctatggaataaacaatcccaaagagattttaaagaaaatttagcaataacttcaatatcttggaaaattttcttttagtttatctctttcatccgattcctatgtttttcatgtggtccaatcaaacggtcattctttgtgtgtttctgtgttttgtaatctttctgttttgcacttatattcctattaaaatcctgtgttttccctagttctccgtttttcaattcctgccatttagagtgacggttctctccgtttttcaattcgtgacgccatcagtgaattgtcgcggatgcacccgctccgacggtgaataggttcggctcgatcaacacgggcgtcacccattgcctcctcaagttggtaggttattctcgttggactgacgttggaggtggcgatatggtgccgacggaggagttagaaccaaagtacgatcaaatccccaccgcttcaacacggatataagaaatacagaaagtgatcccaagcaaaagagaagagacattctcaatggtgtccgtagtaagtattctcaaattataggaactgatgcaaatagaaataggggtatcagatgcaaagtgaaatgagatgagctactagtagtaacacatcccggttagttatttagttacaagctgatacttctacgatctagcaccaaggcagtaaactacagctagcatgttatcagacttacgtagctgggcgtttaagcctccttgagttgtgatttttatcttttgtaatcaaggatctgtttgtattctgttttccttcttaatcaaattccggctgagctcctgctgtcgtcttcaaaaaaaaatggagagtaattgaagtcatgactggtgctattaagctttaacaccacaaatcatacatggcatatatggcttcttttaaagaatatgtttcggtactgaactgactacaaggttacaattccactgctcaccactaaattgagaggagtcactacagataaattctcaagcgctgtgcatagaatatgtgtaaggtacagcaaatgctacagaaaaaaaaaagattaggaaaaacaacatctctaccattaaatcatacaggatgcaatgaatacatgttataaatctattatgatggcgttgcgataaattatgtttatgcagttccatcaatttattttaaacctagcgactacaggtaccattggcaaatgaaggccaatggaacgccatcttgcataaaactttcatcatccaatgagcgcaggtccatcagcattaaaatggcatcctaatttagacctctagcagttcaaaacacatagtacctacaacaatagtaaagaaatggatctttaaagagtaaagtgcattgcgatatttaaacttgtagggttgtatcatataggtccctaaactctcaaaatacatatccaggtagcataactttttaaagtgtatcatctagatcccaaattagcacatcccctctaagatcctacgtggcgctgatgtgacaatgccacatggacatgacgtgtccgtttctcttttttttttctttttttttcgttttcttctcattcttctttttttttcctttttttctgcacgggtcactaataaaggagaagaaaggggaaaaagttaaagaaaaagaaaaaggaaaaaaaattaaatggatcctatttgtcagtcaaaataatgtcatgtcatgtccgtgagacatggcacatcaacgccacgtaggatcctgaagaggttttagcgatttgggacctagatgacacactatgacaacaagttctgggacttagatatacattttgaaagtttagggacctagatgacatatccctataagtttaaggaccgcccgtacactttactcatctttaaatctcacaggttcagtggtttcctaatttcaccccttcttacagctcttaccactacacacaaaatggacaactcagtggaagtaacaagtctattgatatcagcacagcgaataccataccacctccgtagagtgcacaacactaaaaaaaaaaaacatgaagcagctgatctaaacaccatgagggctaaaacataaaaagggtagcgcggcaatgccaccctgcaattctagttgctcaagctaaaaatgggcaagtgcaaactgtttcaagaaaaagggcaagggctttgctatttattgaaggagaatcaaacatatgttcctcatactccctccgtcccagaatataagttttagagttgggacacggttattaagaaaatagataaaagtgaatggtggagggttgtgattggatgagtagtggaggtaggtgggaaaagtgaatggtgaaggattgtgattagttgggaagagaatgttgatggagaagtggttatattttgggaatcccgagggctaaaaattgttatattttgggacggaggaagtaagtcataacataccataaaacggttggggttttagttcctatatgcaatttgatcaaaaagagtaagataagtcatgccgaaaccaattcaagtagcagagccaagagagacaatacatatttgtcttaggtcaaccagaccaacatcatgcagcttaaaaagagcttccacagatcacctcgaatgcttcgactcctctcaactctataggttcaattccagctcgccgagacctaaaccaggcgttgtttcgggaggcggcatccgttgtgtggaagctgggtcacatcgtggataaacaccacaggagattgctcccttactctttcaccccgaaagccttctctgaagctcaggatcactttcttcttcttattgaagaacacagttcctttcactttcatcaccacggatttcaaacccatcttcctcgcggctcgcccgacatgttctgcggttgcttcagtagcatatttggagagacgagagcgccctttcttgtcctccaaacaaccagcggatgccccggtctttctgttcccccgaacgtctgtcacggtcacaaaggtcttgtttctcttgagcaagacatagacaaaatctctcttccctttcaccagagattgcttgtgttcgtcaaagatgtgtgatggggtcccgaagtaggagggattctcgccaccagctatcctggaccttaactcgggattaggaggaatgagcaaaatcatcatcagcagaacaatgcagaaatcatatgggcgcatggaaattaccatttgcctactcccatcgtgtcaccagaacgcggcacattggcacggtagtcttgaggcagctgctgtgactccatgagacggtctccatatgaaggttggcgtgtgtcgccgccgggcatagagaacaaacccatacgtgaagcggttttagactgaggaggtgggaaggcggcggcggccgccgtggagagcggcgcggcgctggcgagggaggcggggcccgcggcggaggcggaggcggggcccgtggcggaggcggaggcggcgcggcgcagggccggggccagggtttggaggcgtgctctcatgtcgcggcgctcgcagcggcggcggcgggggaatggggggagggaggaggcggcgaggcgaggcgagatgggggctctctctcgatttgatttgacctggatgcgcgcgaacggagacgacggggtagggtggggaggggaaataggaggaagacgggtagggggcgcctcggggttcgtgcgggcgtgatggacggtctggatcgggtcacgtgatgagggtatgctgtgggccagaggggtgtggctagtggtgccgcagaccagtgtaattcggctctgccagcgtgtcaaaatcaaccaggaggacttgcgggccccatcgtttcgccaaaatggtttattagaaaataaataaatttattggtaaaacttttatatatgtgttcttggtaacttaaaaaccaatgctgaaaaagaaattacgttaaaaaaaatctcaaaatcaatcctaaaattaagtttaaaaatttaaaatttgacttttttttttcttaatgggatgggagccgcagtttagttggggggccgaaaagcctttcagaagtccagcaaaagccggcaaggcgccgccaacgccgccgccatcatcgccggagacgatggagaccgcggtgccatggaaagtcctcgagttctatagcggcatcggcgggatggtactaacacccaacccaccctctccaccttccccactgcgaacttgcccgcacctgtctaacggcggctagggtttttgcgccacctgccctcccccgcagaggtactcgctggcggcgtcgggcgcgcgggccgaggtggtggaggccttcgacatcaacgacgttgccaacgatgtctacgagctcaacttcggccaccgcccataccaggtgcgctcggtttcttccccaaatccatctgtggtatcccaaattggaacctaggagaaaaagcttctggttagattccgcagttttgatttggttcggctcagatttaggagtagcacatagaacatggtattattgtgccaactgcaaaggtgatgagaagtgagattcagaacttaagctgctcgaccagatgtttaggctgagattcagaacttaaactgcttgatcagatgtttaggcacttcttagggagtatgcttacaagttttccacagaatttatgttctgcctagaatttctcaattagtagactgtcttgatgtatttgtttaaactgtccacagaattgcttacaatctggttgatttcttttgagtatgttgtgttgttttctataaccatttcacatggcaagggaacagttggtcatttgccttcctcatgttcatgtagtcattctcctggctcatctaccctgtcctgcagattaagcatatcattctacctgcatgatgattcttgtattgaattgtctaagtctttaacaatttcattatctgaactgtatcactgttatctaaatacagggaaacattcaaacactcactgctagtgacctagataagtataaggcacaagcatggcttctttctcctccatgccaaccatacacacggcaaggttttcttctggagctttctttcaacattatctgaccacttttcaaatttcactaatggatggagtatcgtgtaggactacagaagcattcagctgatgctcgagcattttcattcataaagattcttaacctaatgaaaaacatgtgctttcctccacaaatgttatttgtggaaaacgtagtcggatttgaggttggtgtaatctttggtttctttaaagcactattcttgaccgcagtattttatcaagttgtgacccctatttgtttgtgacaggtgtctgatacacatgaccagttgatagaggttctttcagatctcaatttcaacacacaagaatttatcctaagccccttgcagtttggtatcccatattctagacctcgctacttttgtctggtaagatttctggaggatctttcctgttgtttcaatgtgatctgtcacttgacgttataggacatgacatggcacaaatcttattgttactattacatatgtgcatagcttccaaagttcacaaattgtggaaatcagcaagggatgacttgggggtttgttgcttaagattggtaaaaagattgtatttgcccaagtgcttattaaaagaaaaaccataggaaattagtctggtgtcactacaaaactgagaaatcatgcaataaagttcctgataaaaaattgctggataataaactctaggttcttcaatagttcatttttgttcagctaagcaactcttcatttatttaacagtaccttgtctataggcgaaacgagaacctgtgagttttcaaaatccatcagacaacagcaagctgctccggacacctacattcctaacattggtaagggcaggtcacaacagatgtaacccggatgaagatgagctggaactagtatgcaaaccaatcagtgacttccttgaaacaataagtctgaatgtcgctgatcaggattcttcaggtacaatctctgacagtaagttcaataagcctataataattaccagtatctcatttgaacatgcaggttaaaaatattttttaatgccactctatattttgtagttaatgggtctgatggatgcaccccaagtggaataatttctcaagattatgtagtcccgctaaacttgattgagcggtgggggagtgctatgggtatcttttttttttcttagtttaagactcctgaatcaatcatttaatgatagattattatgttttactgatgcttggctgtggtgtctcctcgactgtttgcaagatattgtatgccctgaatcaaaacgatgctgttgttttaccaaaagttattatcgctatgtcaaggggacaggctccttactagctacgtccaatgtaaggctcattatattcaatctttcatctgctttgttttcaggcatccctggtgttgcctcttaatctgaacattcatgattccttttccttttatgattacctacttaaattacagaacctcaaacgaatttccaaagaggaccttgaaatttcttcactgaaggagttaggcttacgatttttcacccctcgtgaggtatgtgcttattgacaacttcacataggtccacacccttccgtatctatgttttgtctcatagcatgcaatattcatgatttttcaggttgctaatctgcattcttttccatcgagtttccactttccgaatcacataagccttaggcaacagtaagttttaatccctaccttttactctgttggaactcaatgaacttcaggaacatcataatcgcaatatatataagaacatgaatgtgactttctagttttgaaaaccagaccgcactgcctgaattgtttgttatcgctaacttacctatggtggcaggtatgctatgctgggcaatagcctgagtgtagcagttgtggggcctttgctgcgttatctgtttgctgagacatagtgatgttcaatcagttggcacatgatgctacacaggacaaacacattgaccttcctttgcccgtgttatcaccctaaagccaggttggttcgtgggtatgattcgtgtactccccgaagctgatggttgtggttcaaaccttgcaacccaattggagtgaatttcccacagtggtgcaacttcaacttcatagggcttggggacttgtcgattcatcggtgggaagaagacagcgtgcatgatggcccggcatgtatcggtgaaactctgacgcgaatcttacctagtagagtagagaagcttcctcagcattttccctttgccccaggcataagttttaataataatgttgaatgtttgaggtgttacagcatttgactcatgcgcattgtgaaacgaggttattatggtttagaactgaacttcaacttcatgagctcaccattcgactgtctcaaatcagtttgctttcttgatctttctgcaaagaggcaatattttgacgacacatttgccccgtgtacctcagttaaacagtagatctgcattcgtttagctatagccaattcttgtgaaaaggaagtttgaacatttttttcgtgagaagtttctacccttaaattgataaattgaagtttctcaatccctttattttgttctacaatatgaacaaaatgttttgagaaagggtcaggactgctcgttaacacgtggatcctcagttccacatgtcaatgtgcagtgtgtgtacagcaccgttcgctaacacaggtcccacagacactcgggcctacatgtcagcgaagtgaaatgtttcaccatgatcgatgttaaattgttaatctaccagcagctccaaattcaagaatgtttgagttagaaaaacacaactgaaaaagggtctatcttttattttcaaacttaaatttagagctgattttaaggttttttcatcaaaatttaattttttagcctttacttttaattgctacgaatacttatataaaaattttatttacaaattactttttatttgcaaatatgccgttcacatgttctctgcttgctgagaagtgagaattgagaactgagaagacagtctccaagatatgcattgcacagcgcgtattcgtcgcaggaaacggcggcatatgcaagcgagagcagagcagatctaaacccaaaacaacgcaaagccctctctcctcctcctcccccgcgacacgacactgtcgacacaccatgcgccagccacagctccgcgccgccacctcgcgcccgctctcatggcgctccaactgcacggctgctgcggcgtccgcctcccagccgagcgagccgctctccgcccacttcaccaacggccggcccctctcgcgcgccccggccgtggtgagggacctctcctcggtgctccgcgcgatcctcgccgcctccccgtcctcccacagccgcgcgtacccgctcctcaagtccgccgccttcgacgcccgcctcgcgccggacgcgctcgtcgacgccgtcctctccgccgtgggcggcccggggtcacggcaggccaccgcgctcctcagccgcctcctcgcctccctgtgccgcgccggccgcgctggcgcggccgccgccgcctacgccagcatggaggcgcgcggggtcaccccggacgccaagtcccgcaccgacctcctcgccgtcacggcgcggagcgcgtcggccgcggacgccctcgcgctgctcgccgagatgcgggggaaggggcgccccttggacgcgtggatgttcgacgtggtgatgcgcgcttgcttcaaggaagggatgtacgacgacgcggtcaggctgttcgacgaaatgcctgcctctgagatcgagcccgaccagcgcgtgtgctctgtcgctatcgcgtccctatgcaagctgcgtgacgccaaccgtgctctgctggtgctgaggaagatgcaggatgcggggttcgtgccgtgggacttcacgttcaactccgtggtggatgtgctcgtgaagggagggaggatggaggaggcgctgcacataaaggatgagttgcttgctacggggaagaaaatgagtgtggttctcgcaacaacgttgatgcacggctattgcttgcaacgggaggttaggaaagcgctggatatattcgaggagacactaagggacggtctggtaccaaccgatgtaacatatacggtgctgatcagaggttgtactgaagaggggatgccagagaaggcctatgagctgtgccgccagatgagagatcatggattgttgccgagcacaaatgagttcaatatggttatcaagggccttttgaatgataaattgtggaaggatgctgtaagcttgttcaaggagatggctgattctgggataccagatgccttcacatacaatatactaattcactggctctgtcagcgtcgcaaaattcgcgaagcgcttaacttgtgggaaaagatgaatgaaacaggagtgaaaccatatatcgtgacataccacagcttgttgttgtgttattgtgtgaatgggtgcatggatgaagcagtcaagctgtacactgagatgcctggaaaagggttcacacctaatgttgtcacttacacaacgctgatgaaagggcacataaataaggctgcttttgacaaggcttatgccctccttgctgaaatgaaacagaatggagtctcttgcaatgattatacatacaacactctcataaatggcctttgtgtggttggccgagtttgtgaagttggtgaaatgctgaagagatttgaaactgaaggttttgttccaactgcaatgacatacaatagtatcatcaatggatttataaaagctggcatgatgggctcagcatttgctgtgtatcagcagatgtgtgcaaaaggcatacctcccaacatagtaacatataccagtttcattgatggatactgtaagactagttgctgtgacctggcactgaagatgctaaatgatgtcaggtgcaaaggctcttaacctgaaatcgctgcatataattccttaatatttgggttttgccaagaggggaatatgtctcatgcactgcaagttcttgtccttatgctgaaagatggtcttttaccaaatatttcagtctacaacagtttcattacagggtacaagaatttgaaaatgatggaagaagctttgagattgtacgagaaaatgattaaagaaggaattgatcttgatacagcaacctacactaccttaattgatgggttctcaaaagatggcaatgtaacctttgcattgaaactatactcagagatggtggctaagggtaatattcctgatcatattactttcacagcattaacacatggtctttgccgcaacggagatatcgatgatgctagaaaattattggatgaaatgaataggttagatatacgccctaatgttttgatgtacaacatgttgataaacggatacctccgtaatggaaagctgcaagaagcgttccggttgcatgatgaaatgcttgaaaggaaaattatgccagatgatacaacatatgacatactagttggcatgaaatctttgggaagtgacagtcccattgacgcggagaatcctaatttaagttccacaggataaggatcaagagctggcttgagaagattaaactttccattgtatggccagtgtcagattatgagttttgctatatataaagtgaaatcttagctatggcaaatagaagcaaaggtaagcattgagattcagttactaacaagaattcaccttttattattatgtaatctctattttaccattggcactttgtgattacttctgtactatacattaatttgtgtccaatcaatgtacatgattttccctttttggtattattgttgaacttcgcaaaaaaaaaaaacacttagagcttgattataaactgcaactgataaatttatcttttatgtgaccatgcccaacacatctcaagtaatggcgtctggttgggcctgccttgaatggtcaataactcaatatatcctctgtaaagaaataagtttgattgctattcatgaccttggtaattttgacatgtttaatatctgcatgagttgtttctagttgtactttctgatctattacctatttacttgctgcattcacaagataagagaaatggcattattgtcggacctcaaagatccataatgattaatatagggtactaactagactggagacttatgaggaatcctaatcttgcatagataaagggatgaaccttgtttcctcatagaattagcagaatggatcaatgctcttctgggctgtagaacccgacaatagaggaaagattcacctagaaagtttgcttaacaccaatagagcaatgaacaggacatcgatctaacttctatgccaaataaatttaaaaaatactaggttttgtactgtcattgacttctggtgtttcagaaaggtcaattcgtcaggtaaattgtattgagactttcaaatttctgccattttcctaaggtaaaacacgatgtgtgtcctcaggtttttgttgtgaacaaatgcttacagttaaccagccaatgatgaaatctttctaaaagcatgcatgatttgtgcttacaattagcagaatggatttatctgtgcagtctgcataactcaggctgttgtatcggcactgtcaaccttgaggggagggcaagcgttgattgagctgaggatggtgaggggcgtgttgctgtggtgcgcgagtctgttgatcatgttgtagaacatcacccttgcctgcagtgtgctccctcaccaaatccagaaattcatcataaaagaggatggagatggagacagatggagcagctcatgtcttgattcacctgatgctcactacactcacattacctcctctactggttgttcggagaggcaaggggcggctgccaagagaagtaactagtagaggatgatcaatgaacatctaaggtatttctaccttgccttgcattatattccataaaagaaagtgtcatctattggactcagattttctacaggacaaattccataaacaaactgtgcagtacaactctctgtctggtagcaggtataataacaatatggtaacgtgtacgtgaaaatagacatgacctattaaggattttctcacctatatagattgaggagggaaggacacagtggctgagagaatattacagtttcttaaaagtcaacatcaccctcatcctggttaacttcactgccgttcctacacatgattcatattgcgtcctcttttttcctgattaatcctgtgttactgtgggttattactttcttctgttttctctaaccccgtctgccagtgagcatatgtgcttgtttttatgtttatgtttgcgttgtgctatcttcggcatgctccacctgtggagctgagctgccgacggatgcatgtgagtagcaaggtgtcgctgcgctgggcgttgcggacgagcctgcattgctgtcgtgatggtttctctcaattcgccaaagagtagtccttttttttttttttgtgtgtgtgtgtgctcccttacctgtgccaacttaaactccttcattgctgtcttttttgtcagtaactacatatcatgttaacttgcttatgccagatgctcaatgaacgctaatcaaaggaggatatgtttgacaatgggacaaagtcttaaaacgctgtactggctaaagaagaacaaatatatggaatattggaatcatctgccaggcttctctgggaggtacctccaattgaacttatttatctgtttgcaaattaaatggtcttctcttatatttgacaccgcagaagaaattaggcatccagaattttgttgtgattctaaaatcttgctataccattttgttatgcagcacatctccattcttgacagcttttcactcgtgtccaaatcataacgattttaccaaatataaggattctagaaagcttcaaaggttatggtttgtcgttgcaattgccaatgtctatactatcgttcacctgcctactgttgcctacaaatcaatagaattattcacaacaatcgtctgaggtttgtgactgtacagttcacctggatgtttgcacataacccaggtaatgctatttatctgctttggacgcagtatacgctgataaacccattactgagaaaagcactccttttgggctgttgcatgcatgctgagttatttgatgatctggcccttgtttagatcagtgctgctgcttaaaaaaaatatctgctctagagaccaggaaattcaagtaggctcatgaccatctgcagtttggttgttgtaaaaatggtttttgtttcttgcataattgacacctattaagtatttaaattacatcctcaacaatatattctacggatggttcatggtgcttttaaatcttcaatactgttcatgtatatattgtactccctccctccatcccagtttgatcatcacataagatttttttaggttttctcaaaatgatcatcataacaaaaaatattttgtttatttgtgcaaagagtaaatccgcatcgtgaaatgccatgcaacaaacattctattggttcaatgcatataacgtttaaagtgtgaattaatttttgttggacatgaaacgacaaagcaccttaatcaatgaggattaatttcacaatgatgatcgatgaggattaatttcacaatgatgaatgttttggtgtctttgtcttggtgttctttgcttataagatgatcatattgggatagtaagagtattgctttaagtttgttgcatagtagtacaacttaaggaatattcccaacaagctactactttcttgtaagtgaatctcaataagctgctacttggccatactattttcgtattccctttgtcccttactggtatgctgcccgtgggttaaatcttaagactagcaaagctgtaaggctaaatataaatgtgtgtttagctccacatgtcagcacacacggtcctccatgtgggaaatggggataattggtggaatggcctttcccgctttacataatttgagtggttcttcccttttgtctccgagtatgcaagttttccatgttagatgtagagaccagtttaattcattgttagaaaaaaaatgtattgaatcggtacctcaaatctaaaggatttttttttcatgtgtgcaaatgagccgtctaatatgcacaagcagagggatatacagataattctccaatgtacgtgtgatttgattacatccatgtcctgtacctgtacgcctgtcttaacatatatatggccattttccgtgccacttcagcaccaagtttacatatcttcaattgtatctaaatgatcaaggggaatagggttgacgaaatgactctcgaacatatccttcaactcgtggctattggtgtagccgtccctcttgccatggaagaggagggcgatggacatggacacattggcgatccgctgcacgaacgggaggtacacgcggtcctcaaagcgcgcctggtttagggttctccatgcgccttccaccatttcacttatctccgcctccgcgacatcgcttgtcacgccatgctccttcatgtaacactccacggcattggccacgtccatcttctccctcccattctgcgtgccacatattataagtatgctatagggtaatggcgaacacaagattttagctatagggtacaccactactaaaacatatagttaaatagaaaaagaaaatatagtttccttgccgagaaaatcaagtgataattttgacactagtgcaaataaagatcaatcatgaaaaaaaaactctataaaacaactaagaaaaaattattacaagttttaaaaagaggtttatttgatttttttttaaaaataaaaagttctagaaaaaacacaatttaacaatttaaaaatcataataatagaaaacgagtaagttatagtttggagtagagaaaataacaatgcattattagttcaccatgaattggcttatatttttttattcaaaataaccacattgcccctggcatctaaactgaaaactttccatatgggaagttcatcaaggaaaaaaattacttaaatgtttttttcctaaataagatgaactctgaccaatggaatttcaacactcaaccaaatatgaaaaccaaaatttataacattcatatataaagttataaacccaagagtgagcgatctagctggcatacatgcatgcatattagtactagtaagtattaattaattagtacctgtgatacagccaaatcatccatgaaacgtgacacctctccaaaggccctgccagcatcagcgtaagacaaggcccaatcaaaggcatccttggtagctatgtcacccatgcctacgattatactgacaggtaattctatagcacctccggttacgagggacacggtcgcatgctctgtaaagcttggaatgtatttttgatggaaccactcagcttcctggaggtaattgttggataatatttgaaactgcatgtggcaaaaaaaacagagtataattaagataaatacatatttttgaagatgtatgtattaattcttaaagttgctagttcagatttttatacgtaggagttgattgaaaaaacaatttcttttttgtccatttctgttatggacgattatctatttatccatttctaaattataagctgtacataactttgttgaaaagttgtatacgacgcttcgtaccgctttaatgttgtaagcattacgatatttctcatgtggttccaactcatcttcaaagtccctaaagttgctcataatactgagaaagaacctcttcagcccctccggtacaagtgaaacagcattcttatcccatctgcattgtcaatttgagaaaatatgagaaaaccatgatgattttatcaaaactattggttatttgctactactttgggtagtatcttagaaaactataacgatagttgatgattttcttatacaatgggaaaaaaaactgatttgcccctctaaactattgtgttcatcggatttagcgccctcctcccactcccagaaaaaaaaaaactataaaccctatggtacataggagggggtcaaagtgggccaaaaatggaggagacgaatctgattgctgctgctcttcatcccctcctccctcaccttccatcatggtctactggctagctacatgggtgccagattgcatgtttgatgagctcatgctcatgaacaacagaagaagatcctttggttgtccctcttagaacaggtacaatagcaagctataatctcatatcgagaagaaaagagaagggagagaagaaagcggactacagatttatagccggctgcaacacgaactccaagacgttatgcgtggatgagaggtgggaccgagtattaatggtatagtatatttttatagttaactattgtatgaatggctattaaattagctatagttgttttggagccaacagttggctatactattaaactgaggtttagtggcatcagtgccgaggatgctagtcattggctgacacgctttggtcggtagcctcctagagcctattgcattggttgacatggagagcaaaatcaaaaggaattgaagaaggtggaggtgatatgtggggatcggatgccatgcaggaccaaaattgtcttgtattggactcatggtgtattttatctgatattaggagtttaggaggatcaagcttgtggtatcataggtagagcatgtgtaaataggacttttcccttccaaactaaagtagagatgcaaatggttaatcccgctacccacgtaaaaatccgcttactcattttatatatgctagtacaaaatttggaagaaaaaataaactacaagtgggataagcaagtaaaaaaaataccgctagcccgtcccacttacatccctattccaaactaggcatctcaacatccttatacatgcatgtattagttctcaaaatgaagggaataagaagttgacctttgcagtgcttcattgaacttccgagcctcttccaatgtcgcatgcacatcataggtatcatcaagtagagaaattagcataattttcttggcgagcatcatgcgtgcacgtgcgtactctttctcatagtacacaatgtaagcacaaaagtaacactcaaccacacgatcgcgggtgtagtctaggttaatgtcactggaaacatccttccaccacctaaaaaatatattaaatataaattaattctttttctcaatattatgattagtaatgacattatagagtgattagaagacttgccgacaaatatgcttgagttccttctggtgaagtttttgtaaaatgttaaaatcaagcttggctagctctgaaatggatgggttaaatgtatgctcttgtgcagtatactcgaagataaaatttagcgcctctactctcttcaaggtccttggtaatggtatttggagggcacgctttacttgttcagccagcgggaactcaaggctaccacttaataattccaggtgatgggttgcaaataagatagcttctttgagtgccctctcattatgagttagaaggtaagctgcatggtacaaacttaacaagcccttcgggtcattatttatgtcactcttgaagctcccatcttcacatttgaatttgttgaattcgtctgtgtatagcataaaccataaaaattcaaatacgagtactttagaataattaattttatatcttgatttatatatttcttcttgctaatccctgaatctataggagaccatattcaaggtttgtatggaaaacaataacttcaaagaatttttccattaagaataaaaaagatccccaagttttaaataagtcgtagtcaaagtgttatgtatgccagttatttcattcccgaacataaatacatacctggtgaaacccaatacccttgttgcctcagcaagcgaaaccgaagagcaacctcatggaggttagagctatagaattcaatgctgtgaatatttcttagagtggtgttaatctgctcctcaaaatgatgttctattcccaaacgttggagtacatcgaccaggttcatttgtttcaccacatcatccctgcaagcttcaaacattctacctatctgctctactaactgttctgctctctcttccatccattcatttgactcctgctagacacatggaagcatatataacaaacatgacatagagtggatttcataaaactattattatttcgttaaaattgttactttgatacaacttcagcacgatacatattttgttatgaaaaagattataacaagaccaaactatctagcacggattaaataacgtgtgtgcacatatatgtatacatgtccatgccttgagtggttggttgtattcgatgaagaagtcgccgaatatcgttgggtggaaagtcggtgccatcttactagcaatgggagatgacggcgctgtgcacttgcaaggcatgaggcgggcggcgtgcagggaggacagcagtggatgacgtatcatcatccgatgaggaaacgaagggccaggatgaacccacatgcgctgccagcaggaggcggtaggccacgctggagctgcagtgggcagcagcaagagggaagccatgtggctcttcatcccgtttagagcaaaagtgtacactgtcgagtattatgccttagtgtacctagctagtgctggctgatttggcagatgcaatttcaaaggagatgtctttttatagggcttcaaaaccggacgcttgttaactgaacccgaccaaagatatttcaaaatcgcttttgttgtactaaacccttgcttgttggatccagccacaattttctaattggcttttaaaggatgaagagaatacgatttgtagccgtcaagaaagttctcaaagaaaaaggcatcgatcgagaaaatacactccatttatcctagtttgatcatcacctacggtttttgaagtctttcacaaatatctctttacttatttatatgtaaaaagtaaataagcatcattaaatatactacatgcaaccaaccaagattaattcctattggtacaactacatgcaatatttaaaacttgatacaatccacgtgatacgaagcaacatattaccttaatcgatgagaattaattatagaatgataaaggtttagttgtccttggtctctacgctatttgcttaggtgatgatgaaaataggacgaaaggagtatggtgcacttatccataattatatatatacagatccgtttttgttagaattttagtgtgggcattgattaatcgacgcttttaattactaggattttgatatggtcacagataaatggttggtgttcatccttcagtgtatggtaattaaggaatgtgtaagagtgtgtatttctttgtaataagatatagggtatgtatatagataataataaataagctagtccagacaacaccatataagctaggaactatggaaatgggaggaagggaggaagagagagaggaaaccaaataaaagaagtattattccccttttatctatcctaaggttttcttgctactgtacttcatccgttcatattgtaagtcgatttaatatttctttctagtcaaacttttttaatttgatcaagtctatggagtttaacaatatctacaacatcaaattaacttaattaaatgtaacattgaataattttgataatagtatgttttgtgttgaaatgttattttatctctgtacaaacttgattaaactctacaaagtttgatttaaaaaaaatcaaaactatttataatgcatcagtgagggcccaaactctgccccgccagagatgaagagcttgttcactttgctaccatttttaaccttatcaaattttggtattgccaaattttagtaatgttgccaaaattttggcaaggttatcaaattttggcaagattttatatgtgcttattaaaatttggcaacaaactaaacgtagccaaaattttagcaactttaccaaaaaaaaatggtataattgaacagaccccaaaatccgttttggggaaaaacggcagtcaaagaataattttcactgtaagtcggtggtggcaacatttctaccatgcatggaccattattcatccagtcagagactttctactaattttcactgtcagtcagtggtggcaacatttctaccatgcatggactattattcatccagtcagagactttccactaattttcactgtctgtctcaattgttttgagtcaatattgactcaacaattgtccttcgaaaacgtagaaagcctgactgcgtcgaaaattcgatctctaccactgatcttgtacttggagctattgactattcactactcaattgttggctctttccatgagcatgaactatttattattcatccggtcagactttctaattgatcagtttcttgctcttgccgactattcatccagtcaagaaaacgtgaaagacccgagactttatatatacagaatatgtgacaaatcgttaggcacacatccttgtatgatcaaatactgttatatttatataaatagattcctacaaaccaaaaactgggtattacgaaaattagcaccacataattttactacatatggtcgattatagggtcaaatgaacatcgactggtatatatccaaaattgttgggaaaattgtgggctttaacatgtcagttttatgcggctcctgcggtattgtaccgttcgtactcgtgagctttttttgatgtgtaggttgtttctatcgttagtacagtgaatttctgttacaggcttatactactgtggtgcagtaacgaattctatctggtatatcaaccaggtaataaagaaaatatatttttagtaaaaaatattggttcttcttaaggcgcgttctttggttcagtaacgtttcacatctaggtcccatgtaaaaaaaataatatttcaatcacccgtgttatcctcccgtgtaacatactaaaaatttattactaacaaaaatctcaactgtttgattaagttaattgaaaattataaaaagttaagatccaaccacaatatgactcatacgtgtttgtaaaaagttcgtaaaacaaattagtatgcatatcgttctcctttttggagtttgattttttttttctctagtgtgctgtgttcggttttttcgcccacggttcgattttagctcaggaaaattctggtgttacataatcatggacctacttttgttctaattatgaaaacacgtcgttttggatattggaaaatctaactttgatcactaatttttattataaggatttttagaaaacctgataaattaatgattctaatgtcatatttttgataatttgacttgaaaattcttgaagatgacattatccttcgttttctggagcgcttgcgtgtgtttctttttgggtccaaacagagattgttgatgtccccaatgtagccggatccgatagcaacagaagctttcgtttgtaactgtggaaatcacacctctggtatacttgaccgacgacttatgccggccagcttcagcttggattcttgtttgttgaaacgcacaaatgtgattaacacaaagtacacgtgcttctacacttcgctgatcatattcatacaactagtggtaataaagtcctaagatagctgacaacttttctttgttcaacaggccactgcacactgatcagatcaagatatatactgtgcagtacaatacatacatactcactcaggaaaaatgctcactcagtcactccgtcctataaaaaacgaatctataatcggatgtgacgcatcctactactacgaatctgaacaaatatactctctctgttctacagaaaaccaacctagtaccggatatgtctagattcatcgtagtaggatgtatcacatctggtcctagatttattttttatgagacggagggagtatatccagattcgtagtaccaacttatgtcacattagatttggtttttataggacggagggagtacataactgctccattaattttgagctctaatatatgttcttaaattttgagtttaaatttcaaattgattttaatgtttttaatgtagtttattttctagcatttacttttatgttactaagagaacaaatataaaagtttttatctatttcttttatcgttaacaagcattacattttataatccgttgtaggtgagtagtcgcttttcttcatctcgtcagcttcacttcggagaggcgtctatggctgagtttttcgcgtacacgtttttcaaactactaggcggcggtgtgttatttacaaaatttgtctataggaaagttgctttaaaaaataatactaatccatttttttaagttttgtttaactaatacttactaaatccgtcccaaaatataataacttataaccgaatgagacatttcctatctatctagattcatagtactgcaaaatatcttctctgattctagattcttatattttgggacggagagaattaatctcctaatcctttgctttgttctccgtgtgagaggactaagcctatgtcgagcatctgccgaccaatgtgtgtacggtgtactggattcctggaatgatcatttttagataatggattttcattaatccggtctctatatccacgaaggatatacacagctaaaaggatacatgagtacttacactcccacctcaacaaagaggaaaacacacaaccaaaaaacaaaaagaaaaccaaacaacctcgtgacatccctgcttctctgcgtcctgccatattctcctgaaacggccagatattacaagtggaagttgtctagtcgccgccgcccctagtgcgccgtcgatgcaaacctccgttggtgccatctttatctgtttcaggtaagctgacgccacacgccgccagttagcctactttcaactgtcggcattcgccgtttagccggaaatagccaaccacacacgaaccgacgggatcggcttccacttcatcggattcacagtgctcagactaccgctgtcctaggccgccgcagcccctagggctgtcgacaccggtaggagccgtcgtcctcttggaccgccgcagcccctagggccactggcgccgacgggagccgccgtcctccgccgcatctcctagtgccgccagcgccgatgggaactgccgccgccccaagggttgccaatgccgacgggagccgctgggccaccactgcccctagggctgccgccgccactgggccaccgccgtgcttcaccgcccctaccgctatccggagagactccatcgctgacgccttgccgctccccaccgccctcccgaccacctccagccatccctaacccacacggccaggcgcaggcccggctgcctctggccaccacttccgcacctccgcctcccacctccccactgccaccgtcctagccgccgcgcagacgccggtcagctctggcggcggcggggctatatctggctgggagagaggaagagatgcgtgagggagagtaagagacgcacgcgtgggggaaaggaagcaccccctctcacctggaatgattatagtactagaaaatatcttatttgattctgggctcttatattttgagatggagagaataattaatctcacgctaatcctttgcttcgttctcagtgtgagaggactaagcttatgtcgagcacctgccgaccagcgtgtgtatacctggattcctggaatgatcgtacgtgcttctcgatcgctgcggtcatcccccacagatcgatctcaaagagtcgatgagagaccaagtgaaaaaaaaaagaatgacctaatattaaataattagaaggggtaagacttcaaaccagatcgtccagctcgctactttgtgaagctagccggaagacttctgttgtttctcgaccaagtgaaacgaattgatatgatatattgggctggctagtgcgcgtgtggagggatccgtcggattcggaaataaaagtatttaaatcgcgcattgaagcttctttttttattcatctcacaatcatcaggataaaggcccgcgcggcgtcgttaacattgagtgcaaaagtaatttcatttagcgcttagtttacataggtcaagtgtttttcattagtttaattacttcaaaaggaagcattggaaaggtagttatatcatgaccgtgtgtcttaaacattaaaaaacataggatcacacgtataaatactatggcaacaattggtctataaataattagcagtcaattaatatattatcagtttatttaaattgagaaaaattgaagcatataaaattcgaccaaattttatcaacagaaatgaactgatatattttttttggggggtggggggaagacccaacgtgaatgaaatgaaacgtcttgtgagcaagttcccttctttgcttcttgcctcaactaatgtattgtgtttatttccttgcaagtcgaacgcacaacagattagcggccccattgttttacatattcgtggaataaggagaacggcacatttgcaaataaaaaataatttgtgaataaaacttttatatacatgttcttatcaatctcaaagtaaggctggaaaacaaactttgatgaaaataccccaaatcatcttcaaatttaagattaaaaatttaaattttagctgataagcataagcataagcgaaaattctataataaggtacatcgaagttatcatataaaccgtaaacagtcttaactgcatgcttcatggtatgaacgctacatttaaagacaacttctatgatgtaaaaatttcacagaatggcaagtcaatcaactgtgttagatctggtagacagcatccggacatctggagtgcatcaaaactgacagtaggtaggtgttaaaagcattaaatttgtcgctaacatgcacaagataatcggtctcatcttttcgtttatacttatatttatcaaccaaaatttaaattttcaactttaaatttgaaactttgcgatttttttctcatcaaaatttatttttcagcctttacttttatatcgctaagaacacgtacataaaagttttattcacaaattacttttcatttgtaaatataccattctacgaataaaccaaacaatgggggccgtttaggttccagaaaaggcgaaaaatcatgcactagaattttggatggagggtcttctgagattttgaaaagcttcccatggtgatttgtcagcaagattttccgccagcccgaaaagtagacagtttatgttaattattatatgagttctatatgcatggtcactaggaaagatgcaattccgtaataaggtacattgaacttatcatataaaccgaaaacagtcttaactgcatatggttcattgtatgatttgtatcaacgctacgtttaaaaaagaaaacttgtatgatgtaaatttcacacagaatggcaagatcaattaactgtgacatccaaactgaaagtaggtaagcatcaccaacagtctatctattccatccccaatcctattttttttggattttggttaaaaaaaactgatccaacagattcccaaaagagctctggatgttttggagttccgaaaaaaatttgaaaatatatttttatttttcatattttgcatttatatacatgtccgagattaatttgcaaaaatatacccaatccgcatattagatgcgcgggagcgaccggtcccataggctggggatgcggtatcgcacctgtcccgcaggaagtttgcatgccgagcgctcccgcatattggatgtacgggaccgtggctcccacacgcgtcttctcccaaattgtgaatacatgtcccgtaggaaaaacggagcagtatattggcacgtgattaattaattattagtttttttttcaaaaatggatcaatataattattttaagcaactttcgtataaaaactttttgcaaaaaaatgcaccgtttagtagtttgaaaagcgtgcgtgtggaaaaggaaggagatgagttggaaaaattaggggaataatacagaaccggatcgctccgcatattggatgcgtgggaccggcccctctctcccgcatggcggatgcgcgagactgccactccgtcctttccaaattgtgaatacatgtcccgcacggaaaacggagcagtacattagcacgtgataaattaattattagttttttttttcaaaaatggattaatatgatttttcgagcaactttagtatagaaactttttgcaaaaaatacaccgtttagcagtttgaaaagcgtgcgcgtggaaaatgaagaagatgagttggaaaaaattaggggattaataccgaataacacgagactcgctcggtaccgcgcgctggaaccacgggaccgcgcaggtcccgcgccgctgttatgcggtaccgccgcgctcacctgcggagctgacgtccccatcgctcccgcgtatcggtgccgcggtactgactcggtcctgcagtctagccgtgcgggaccggttcggtcgcgcatctcggttccgcgtgaccgactcgggttctacgtgaccgactcgaattctgcggttcgtcctcgctcccgcacaaccattctgcggatcagatatatttttgcaaattaatctcagacaggtatataaatgcaaaatatgaaaaataaaagtatattttcaatttttttccttggagttcccatctccaattttctcggtacgtgtatttgagggcgagagaacgactcccaatcccctccttccgcgcgtttctcccctccttccgcgtttctcctgtccttcccgcgtaagggatctccttctgcgcacgggaaaggaaaaaaaaatagaatttctgttggtagtttaatagaagggcccacttttagtttttttagtttttgaggattgaatttaggctatctcttggaggaaggggttttttcaccatctattttcagtttaggaaaccaccaaaaattaaattttagggatagattattggtaaaccgttggtgatgctcattaaattttgttgctaatatgcacgggataaaccttcagtggcaacatctgactgcatactccctccctcccaaaataagtacaactattaatttccatatacaactttaatcgtccatcttattttaaaattttttaataattagtatttttattgatattagattataaaatatgaatagtactttatgcgtgacttatgtttttcagttgagcacggaaactcatgtgttgtgcttattttaggacggagggagtatatttggtgagattatggccctgtttagttcccaagacaaaaattcacgctctaacatcgaatgtttggacacatgcattgagtattaaatgcatgaaaaaaaatcaattacacatattgcgtgcaaattgcgtgacaaattttttaagcctaaattgcaccatgatttgacaatgtggtgctacagtgaacatttgctaatagcggattaattaggcttaataaattcatctcgcagtttcctggcagaatctataatttatttttttattagactatatttaatacttcaaatacttatccgtatatccgatatgacaatcaaacctaaaatttttctccatctaaacaaggtctattgtcacatgacttcagctaaggcgatggataaagcaaccacctgggcaacgtgggaggccctaccatcgtggcgaagccaccgtggatcttcgactaggcctgaggccaggcccatgagttgcatcgatcgaatcgaaccgtacgggttagtggtaagcgaaaactaattggtactccccgtcttgaaaaaaaaaatccaattccaaagataaatctagacatacaccatatctagattcatctctagaattaaattttttatgggacataaggagtacacactaacatacgtggtgcaaagtaaaatggttcaacttatacatgatgcaaagtaaaactgttgaatataccctgtgcaaaataaaatttactcacttttttaaatatataccagtgcaaaactcaagaaatccatagtactattttgcaactgagggagcactaactaagagcatccctaggagatcctccattcagaactccatccgagatttagcgtacgaaagtgaaaaacggggctccagcggacacgccatcgagccatccaaaaatagaggatgcgccaaaacggagagagtaaggccaaatatagcgtttctctctccaaaagccatatcacaacggttgcagctcccgccctcatccagagttccgtgacctcccctccgtcgtcgtcgtcaccggacggaaggggaggatggagagaaagaggcataccagatccagaagtacagtgtcgctagtggcaatcatgctcccttccacccctccgtgcccgtcgcctacctccgcccctcggccgccaccactacttccgcgcccgctggcctcctcctccgcctccgcctctgtgcccctcggctgttacctccacgtccgcgcctgccgaccaccgcctctgcttcaacacgcgctttccaccgccgctccacctccatgccatgctgcttcgctatgcccgcgctctttgcccacccgaccgcatcgtttatctgttcggctggggttggggtctcggggaacgatgtttatttgttcttttctttttttttaattttagttttttcttctttgatttaataataaacgtggtagttttatattgatatacgtgagagattaattagtaactatcaggtgaaacatgtttagcgaataacaatatttcttttaactaatccaggctaaaaaaacgtacacatagcaaagttggttaaaaattatttttaaatatatgacaggtgttatagagaatgtaatatggatgatctgttggaaaggaacaaaatctagagaaattttttttagatggccatccaaaccgagatatggagtaccaaatttagagagtgggtatgctctaatgtcctcactcatccacaacaaacctcgtatggcagtccaacctggttttcggagtccaccagggaggcctaatttcagagtccaccaactgagttgcagcacgaaattaaaacactttaactggattgttggcgtggtgaaaagaaatttgtgggatagagggacttttggaaggcaaaatttgcaggcattacctccaatttacaagcaactttggtcgggatatttaatcaattcaattaaagtcaacagcaagggcaatcccttgtgcaccaacagtataacagcaagaaaaacaaatgagaaagaggatttgaccatgtaatttgcagtcttttgtcaagatgatggcagggattcttcttccattctgtccacatcaggaagagacaaaccgcagcttttgcagggattaaaaactacttgtatcttgcagctttgtgcagaatttaggctgttttttaattagggtgaaaagttttggcgtgtcacatcggatatatacatatatctagagtattatagactaataaaataacaaattacagattccacctgtaaactgcgagacgactttattaagcctaattaatccgtcattagcaaatatttattgtagcaccacattgtcaaatcatagaacaattaggctattcgtctcacaatttacacgtaatcggtataattagttatttttttgtcccagaatataaatattttagtatagtgacaagtcaaatattgtttaactttgaccaataataaaaaaaataaaaaagatcaatcatgtgaaattgatgttactccctctgtcccacaatataagggattttaagtttttgcttgcaacgtttgaccactcgtcttattcaaattttttatgcaaatataaaaaatgaaaagttgtacttaaagtactgtagataataaagtaagtcacaaataaaataattaatcatttcaaaaaaatttgaataagacgagtggtcaaacgctgcaagcaaaaactcaaaatcccttatattatgggacggagggagtactatatttatcattaaacaaactatcataatatacaactctttttatttgatattgttgatcaaattagtatctcgaagaccgtgtcagggtagaaaaaaatgcttatattttgggacggaggacagagggagtaacaattagcaccttcttcaccaccgacttacaagaggagaagaaatacagcagccagctgtagctttgtgcacgagttaaaaatgtttcaacctgcataacgcaaataagaggtaacacacagagcaaacaaatatggaagataattttgctcggtttgaggagaaggggatagagaagaatgggaagatatgcaaaacgaggtgagctattagtgcatgattaattgagtattaattattttaaattttaaaaatggattaatatgttttttaaagcaactttcctatagaatttttttgaaaaaacacaccgtttagtagttcgagaagcgtgcgtgcggaaaataaaacaaactttctcacactgtcatgctacctaacgcagaaaatcgcagatggcttactgacaattagggctattaaaaaagctcggggctcgtgagttgcttgagctcgacttgcccaaggctcgattcgagctcggctcgagctccaaacgagatgagcccgagcctatcccaaagctcgcgagccgagcttgagcttctatcgagtttggtaatatataattttttttgttgctatttaataaattgggagatcaaatatgttatttgtatatcctgtattggcatcatatatttattttattctttacaataagatatcacatgattatattcttatgaaagaaaaatatacgtttcaaacaataaaaacataatgtttcatgcgtgatagcaatatgtctcaccacgtgtcatgtgtttttattgtgtttcgcatattttttatatattcccgaggcagatttctctgttacatcatgtattatactaatagtcaactgaaacatttgacctctatttttttttacaacatctaacgtctgatttgtagctcccacaaattttatatctatatctatattatacctatctctactacgtaaaaaaagtgttttcgtggccagtacaaaataaataaacagcgaaaaaaagtccgattatatggtaaaaaatgcgcgagaaaaagaaagaaaaaagaaaacacgggaggaaaaagcggaggggcctacgcgtcagcgccacacatgcgtgcaataccactttaaactggtttttctcttaaattatttatccaaatcatgatccaattacaccattaaattcgttgtaattaaatctttaaaacaagtccacacatggatatgttacacgatgttccaccaagtatatcggaattgtttcactaattagattgaaaatgtttcactcgtttaaatcggacattgtttcaccttatataaaaacaatgtttcagcaaatagcgaaagaaataaaacattgtgagtaagctagatgaaacatttttggtgaaaaaaaaaatgaaacgaattccattaatagatggtttccaaaatatgtggacgatttgtttcaatggagtatatggtgaagatacatggtaggtggtggcagagaccattgtagggccaggctcatgcatgcacgcgcgtgggggcggggccgcggg

SEQ ID NO: 9662 - DNA, 1329 bp, Oryza sativa
tgtagtgtagctttcctctagtcgacgcatccaggcaagggtgggcgtgatggagcggggcgggccctgcgacggcctctgtcgcttccggattcacctaggcacgagaggggactgcccgtcgcccgctggggacgggggtgaaacctgaggtgtggtgtgcttggctagagggggttatgcgaagggtcctgtcacggcctctttccggtatgtcgtggtgacatgtcggcgcacggaaacgtgtcgtggggctgtgtcttgtgggtacagttgtacacctctgatcagagtaaaactattcgaatagccgtgcccgcggttatgggcggtcaaccagattcaccgtgattagtctcaccctagtgtaatctgttgaacttggatagttcaggtggatggctgggcctgtcgcaacgtgggttagcgttggacagcggatgtttaatactgcttaattattacaactgttttcgcattaaattcctgtttataaatgccagtatttatgcaaatgaaccactctagctcttctttgttaattccctgcatcatacccccatcccggtatgacttgctgagtacagtgggtagtacttagtcttgctctatttttcccaaccccagaggacgggtatgtgtcagatgaaggtttccccgaggagtaggcttcgtccgtgccgtcgaggatgcctgtggagtggtgttcccgctgcggtttagtcaaggcttaagctccagtttcttttgttttccgctgcatttttgtaagacctttataatgtttgtaagacgtggatctgtatgtcaacattgtcgtttgtgtaccccggctggtcctggacgggggttttaatacacattctgcttggaattctattcgggaatttctgggcgcgacatttgtacgccatatgccatgccatgtgcctcacatagagcccacatgcgccatatgcctgcacactgacccgtgcgtgcaatcgcgagggttagctctaataccatttgtaacagccctccctctagaaccgcgtagcccagcccaaccgacgagcgggctcacttacacataccacctcgcttacactttcgtcctcgcttcgtgtaaaagggttaacccgaaagtgacatggttggaggggagagaccatataagttggtttcactcatgctaaactagcaaggtggtactaaacatgcgcacacagctcacatgggccacacaggccttatcctaaatgggccaggatgtcacaaatatgcaacaagttttccttcttgtagcaaaacaccacccaatccaatcccactagcatcacattcaag

SEQ ID NO: 9663 - DNA, 3554 bp, Oryza sativa
gcttcgcctcacctgcccaccccagaagcaatggccaagtggagcgcgccaatgcagaaatcctcaaaggccttaaaaccaagaccttcaatattctcaagaagcatggcgattcatggatcgaggagttgccagcggtgctctgggcaaaccgaaccacaccaagccgagcgaccggggaaacgcctttcttcctcgtctacggcgcagaagcggttctcccatccgagctcaccctgaggtctcctcgggccaccatgtactgcgaggctgatcaagatcagcttcgtagagatgacctcgactacttggaagagcgaaggcggcgcgcggctctccgagccgcgcgctaccagcagagcctgcggcgctaccatcagcgccacgtccgggcccgatcactctgcgtcgacgacctcgtcctacgccgcgtccaaacgcgtgctggattgagcaagctctcaccaatgtgggagggtccgtatcgagtgatcggtgtcccccggccgggctcggtacggctggccacgggcgatggcacggagctgccaaacccgtggaacatcgaacaccttcgtcgcttctacccctgaagggggggggtcgggtgtcaggttttggctcgggccaaccccgcacccccctcgggtgtgcaggattggccgggggctaccacacatgcgcatatattcctttttcctttatttcagcatttcaatagaagcagtttcaattttctaaaggttgtgtctgtgccgttttttccttttgaagaatcttgacttgaaataaggtcactcatgcttgaccttgccctcgggggttcggttcggtcagctaaaatcgccaaacggggcccagaaccgagccgtgccccggggcgtggtgaactccgggggggaatcggcaaaaacctacaatcgggtcacccatacccctcggtcaccacgttcccggcctggccagtctcgacatgtggatctccccaggcactagccccgacccgagccatccaagggcacgaacccttatttcaagctaagacgcaaaaggaccacggcacagatcatcctcatctcgtatgtatagcaaaataaaactaacacaaaaatttttttcatcatttctgattgcagattaagttaatttgtacaaaaaagaggcatgaaggccttagaagaaagaaaaagaaaaaagttaagattggcgggggcctgggggctcattctgacgcgcccaggtcgccggcctcgttgccaccgtcgcttgcactgctggcgttccccccctcgtcggagtcgggggcgaacgcgagccgaggggccgagccctcgaagccgttgacgatgtggtcggcagcaaccccgacccgtgcgcgcgcgtcgtcctcggtcccgggagggaactcctccagcgccatccatggagagaagttggggtcccgggcctggtaactcgccagcacgagttcgaccgctccccgcgcgaggtccctcgaggatgacttgatggtcttctcaagctcctcggggagttgttcgagaacccaggccatcctgttgaggtgcggagcgaggccttccagattggtggggggcaccgtcgtctggcctttccagagacccgcttgccgaccggcgcgcttcaggcgggagaccgcatcccaaagcatgtcgggcccaatctcgcccgccaagcgaagggcctcggcctccccggtggaggagtccagcgctcgctgcatatcggcgacggtgtgttcggcagctgcgaggcgggcggctaagtcgctttcgcccgcggccgccccaccgatatgcgccctcgcgtccagctccttttcccgcgcctcgaggtcagcagcccgctgctccagtgcggctctctcggcgcggacgcattcaagattgcggcgcgcctgctcctcctgcgccgcctcgcgaagggacaggctgtccgccagccgtttggtcgtggcctcagcctcctcgagagctcgctcccgctcagcgagtgcgtcctcgcggaggcggagcgcgcactcctcctcggcgcaggcggcctcgtgcgccgccagcgtcgcctcccggagagcagcggcggcctcgcggtccgtcaagcctttctccacggcgccggcgtgttcttccagcgccatagcacgggcctcaagggactcctcgcgccgccgggacgccgcctcagtctctgttacccgccgctctcgggcagcggcggagtcaaggactccctgggcggcgtcgagcttttctttcagctccgcctcccggctggcgttttgaaggcggagggcgtcttgcgcctcaatcatcgtggtggtagcgatgagggcggccgctcgctcctcctccacctcacgagcgatctccgtcagcgccgccttccgggcttcaagctccgagacgtgacggcggtgagctttacggcccacctccaccatggcgtccaccgagcgccgcccctcctcaacgcgtgcccatgcggcctcgagctccgctcgttccgcgcgcagggcctccacttgggcgctgaacccatctagcaccgcggtgtttgcggcggccaaggcctgcagaatgggctcggcgctcagcggggcgacggaagatgaggagaagagccgccttggagagaaggcgatgcggctcggccccccggaggacgtgctgggctcggggatgtcccccggacccgtttgatcctgggcgtcacccggggaggtgggcccaggcgatgtgcccgaggcctcgtcgcgagcctccccggaggctgtcgcctgagggttgcccgagggagtgggtgtcacgaccggaaataacccaacgggcattccttacgtgcgtgcattaatccttgtcccaggaggcaaggtacaccaaaagttgatacaattcagagtttaacaagcggaagcgtatataaaattattacacgggcaacaacggcccagcacactcaaagacaacgaaaaacagcggaagactagggcgacgaccacaggcgcttgacggcaggcacgagctagacaccaaagccttcatcttcaaggaactcctcatctgggcttgggaaaattgagcaagactgagtacaaccaccgtactcaacaagacacacccacaaatgcagaataaatgcaagggagtacaagggaattataatatagagggttagggttgcagtaaacagcatttaaagacatttagttgctcaaggccattttgtaaacacgatcctagaactatccaatattattaatcaaggccgtgaacccacacgaacctgccttaacccaaggcctacgatgattcggaccgaactggcaacccgaccctgggtcccagctcgtcccaggccaacccaggccaaccattccacattttagttgttgagcaaattttaagaattagaacactgacttgggtacattgctcggcttgcccatatccgagggctcggctattcgaatagatttactctgatcagaggtgtacatctttacccacaagacacatcttcctcacgtgttgcca

SEQ ID NO: 9664 - DNA, 26951 bp, Oryza sativa
catgatccctatgggtttcacagatggtacttaatggggggatactttacaagtatcacacatgattctactcaaaaagtatcattaagtgggatacatgtgaggtatcacccatgatcctacttagggatcttgtcttctaacataatcctacttgggtatcatgtatcctacttagggatcatgtcttctaacatgatcctacttaggtatcatgtcttctaacatgatccctatgagtttcacgaatgctacttaatggtgtgatactttacaggtatcacatatgatcctaataaaaaaagtatcattaagtgtaatacatgtgaggtatcacacatgatcctacttagatatcatgtcttctaacatgatcctacttaggtatcatgtgtgatacatgtgaggtatcacacatgatcccacttaggtatcatgttttctaacataatccctatgggtttcacagatgatacttagtaggatgatgtgatactttacaggtatcacacatgattctacttgggtatcatctctggtaacatgatccttgtgaggtttcagagatgatactttagtaggatggtgtgatacttgtgaagtatcacacatgatcctacctaggaaaatcgtcgatcatgatacctgggtaggtaggatcatgcgttgctcagcgcgtgtctatcgccatcacacatgagactcgagtctgatcctgtacacggtgcgaggtatcagagtcctctctcgcgtcgtatcctgtgggctcatgtggtactgcagctccgtctgttgaggcgcacggacatcgactatatctgatccacgcaaaaggtctacccagtataatccacttctttaccaacatatatgtacatgaaaacagtagccacatacagagttcatatcatttgattattgtgcccctcgcaatcttccagttcaagacaaaaacagtagccacataaacaattctgaaacttgacttgttacatatgttggttgggggagaggaagggagggggctaaaaaatggcctaagcacgcatccgacactgcttgaaccgaatgagcatagaaatgacgttttggatgtaagtcattgaagcgatggtacaacaaccttttgcatagctccctatgatattctttcatgtagtcctgcatggatgacaagaatgagcagtgtgagatttgtcaagtgggggttaagctgagcccttgttcaaccttgaagagcaccttttcttctttgaaacatgcatgaaatcggattcgcttgaagcaggtggcaatgctatttcaactctgtgcacatgtgtgaaaggacaaagaaaatatcatttcaatggtgattcttcttagattgaaccaaagtatcaaatcattttaaaacagaaaactcccagccagccactgagatctacaaacatcaacaggaaaaaaaaatccaaatcatctgcatctatgactcagctgcatctgccatctctgtcgccacgcgctgccctctatgacaaaaaggataacaattgacaagcaaagcatacccggaactagaagccagcaaccgactgatgcggatttctctgattttgtttacacttcagttcacctaaaaaagtcctaagcagtaagctactagttgaatggagatttctctgtttcaagacagtgtgtacttgttaacgacaaaattgctccaagcaatatttgccttcccatcaatatacaactagaagcatttttagcgatctattccaattcgaacattttgctgcaagtatcatatcaagtatcatatgattcagcacacacacacccctcacctctggtacaaacatccccagtgaatgaacaaaaatgcatagaaaaaagagagagtattagcttactttgatttcaatttggatgtgatatgacgagccccatccacaggttggggattcaacaaaccctagaaaatacaaaaatgaagagatgttaaaatcgaaatcaggaaatcgatgaaaaaggagtgataacaatccggcccaggtggggttggccgaggcccaataacttaagattggctggaccccaacagttcataggcacacccactcggggaaaggcccaatctccctaaaagactagtccaataggggaagggtgactctcccttttaaggtggcttcctcctctcaagctaagcaaggtgggattattctggccggaccccaacagttcataagcacacccactcggggaaaggcccaatctccctaaaagactagtccaataggggaagggtgactctctcttttaaggtggcttcttcctcccaagctaagcaaggtgggattattcagaggctcacacggtcgctgcccgactttagcgtctttgctagcgggtaatagtagagaatgtcctcatcattcccacccccttaacaagggcccaactctgataccaaatgataataatccggcccaggtggggttggccgaggcctaataacttaaggttgcccggaccccaacagttcataggcgcactcactcgggaaaatgcccaatctccctaaaagactagtctaataagggaagggtggctctcccttttaaggtggattcctcctcccaagctaagcaaggtgggattattcagaggctcacacggtcgccgcccgactttagcgtctttgccagtgggtaatagtggaggatgtcctcatcaaggaggaatgagagaaaggggtatcatgcgcaccagctccgccgcagacgccgccgccgcagccgccatcaacatgcttacgtcactctctctcattggcacagctgacctcgtgcgcaccggcgtcgctgaagaggaggagcagcaagcaggctccgccgccgccgccgcagccttgggagctgtaggtgtctcaatgcttctcgagggtgtgtatctgatccgtgagggtgtgtgtttgatccatgggaaattgtcctgtccgggaccgatcccaaacggtatatcggtaagtagcatttctgtttttaaaatgactagcaaaaatgtttggtatgtttcaacatgtgaagataattttcatgattcataaaaactctgctaatttaaataacaaaccgagaaaagatgaacaaaacaatggcaaaacaaagttaactcagttgtgctcgcttcctgtgtcatcacacgaaaaatctcttatgtacacatttccttagcctcacaaatcgatcgggtggctattatataagttgacgcatgtgtattttgctatagatgagtgaaagtttgattattcaattagtgaaagttttttacctatagataaaaagcatttgcaaagtaacaaacttgttgtagacacaccttaatgataatttaaaaaaaatatttatgaggaaagaaatttggtagagaaggataataaaaacagaaaatgaggagattagatgtaggtaaaatacaaagtatgtaactgtacggacaaaatcccttattttatactagtataaagtggaaagtacgatgtgtggtggatttttaagttggattcttgtcctagccaagggctttaacgggcacacgtgttgatgagcatgtatcacacaatctctttgattgtgtttggaaaatgggataaagagagtgggaaatggatattatttccagttttgatatttcccttgtttggataggttgggaatgggatatgcaatcatgctggattgagggtaatattgccaggtgaaattaccaaattgccctcgccattttgacccttctataatctgttgattcatctaccacagctcatagcatcaaatctgagggtgctctttggtgtaagcagctggcagcaatccaccgagatcctcgcgtgggacgaaggctctcgaagatggtgaggtgcatgtatatattatgtgatcgttggctgcatttgaatgttataccacttattgtagggaggggtattttggtcatttctctagaaacttccatttcccatccatcaaaccaaacatgggatatgactttctttcatataatctcccacctcaatctaccagcatatcattttcttttcccaataggtataacccaatatccaaatggagcctttatcggcagaagcgttttcctttgttactgctaatattctactttggatcagtgaaaaacaatttcggtaacctcgggcaagtcattatctcagctgaaacttttgttttttcttttctttttctttgaatttgatcaaaatttattcaaatctagtcaaattgtcttaaaaatttaaataattttgatccaataagtcttcaaaatcccaaaaatttgggaatttcgatgctaccgacatggccgaatttttgagcaaaactgaaaatgaaaaccttgcttcagataagagagacagaattgaattggcttgaagatggaaaaatgaaaacctcgcagtttaggccgacggaaaccgtacattttgggctttggaaggaaattgtgtgtggcctgttaggcaaatagaagggtgcaatttttcatatttgacctagagaatgtaaatgaagaggaggggaaaagatgactccgtgtctttgtaaaaagaaacccatcactctaagcaataaaatgggaggcaactacacgtcaggcgcccgatccggggtgggaaaatcgggcgcccacgtcatgttgacgtcagcatgacgtcagcaagatgtatgcgcgcaaaactattttaaactatttttttattttaaattatttatccaaatcatgatccaattgcactattaaattcgttgcaattaaatctttaaaacaagactacacatggatatattccgacgaaaacttttttagcttattattgaattatttttaaatgttgcacgttgttgcaccaagtatattgaaattgttttaaatcgaaaatatttcaatcatttaaatcgggcgccgtttcaccttatataaaaataatgtttcatcaaatagcgaaataatgtttcagttcactacaacatttgatccatacataatgaaacattataagtacactaggtgaaatattttttgtggaaaaaaatgaaatgaattcggtttccataatatgtgggtgatttgttgcaaaagaatgtttcaatccactgcagcattagatctatacatagtgaaacattgtagtacactagatgaaacattttttgtggaaacaaactgaaacgaattctcttaatagatggtttctaaaatatgtgggtgatatattgcaacggcgtgtgtgctagggtgtgtggtgggggcggcacctgagctagaggcttgcagcgcgcgagctggaggcgcgatagaggcgcccgatttttcctgctgattctccaataaaattgcaataactacttataatttgcagcgcactatataggaaagaccactcttttgagtattaaatcaatatttattaatctgaaccatgagcagttaaactatctgattacatgttgttattactagtagaatgcatgtgcgttgtaacatgcgaaaataatttttacgatcgataaaaactctgctaatttaaacgataaactgaaacaagagaaacaaaataaagacaaaacaaaatcagaaattatatatagtattgaactaggttgtgttcgctgcatgcgtcattgtgtacacgtttctatagcctcacaaatcgatcggatgactatttcaaaagttgacgtatgtgtattccgttatacgtcattgatcaaatattaaaattttgattattcaattagtaaatgtttttacatgtaggtgaaaaacatttgcaaagaaacaaactttcccacatacacatccgtgtcagctctttgctgctgtggtcgatgaataagatggagaaaaggagccgctgtcgtcatcccttccttccttgaccggcgacgtggtcgggtccagtggcggcggagcaggaggcttgatgatgaagagtcatgtccacagatccaacacatcgtctcaacgcccaacgttgcatcctctcaggatccgatcgaccaccctgatccacagcgccgtggatccctgcatgtgccgtcaacggccgctgccgcatcagcctctcttgggaggaaacatgtggggagaaaagaacttgccggtgattgctcgaacctcggatacgactgaccacccgatccgaggatcgatccgacgcgcatcgcgagtccgacccccaacgacaataaataataaccacgttaattaaagactcgtctcgactcgataatctatgtgtttagtttaacgttaaaattagaagtttgactaaaattaaaagtttgaagaaaaaagttggaagtttataaaagtttgaagtttatgtatgcaggaaagatttgatatgatggataaattaaaagtttaaagaaaaagttgtgacctaaactagggcaataccaaataccagagttacgtctccagccgacgccgacgccgatccatcctcccctcaccgcgcccttcttcgcctgcacaaagggagaagctacgtctaatcccctaattcgccggtgtccgatggattgcagcggtgggatggaaaagcgaccagccagccagttcaataagtcacaatcgccgcggggagcttgcgcctccaccgaaccagcgagaacccaggcgaaacgctcccgccccacgccagccggcggcaatgagcaggcggtggcggtggtggtgcccaggcgctcgctaccaagctctatcaaccacaatagcaaaactggcacaagggactggacgaacctcggggacgggccggccggcaagatcgcggagctcaccctcgccaacgacgtcgccgattacgtccgcttccgtgccgtgtgccgcccgtggcggctctcctcctcgctgcacccgcgcccgcaagatggtggcctagacagccgcttcctccctcgtcactggatcatgctcgacaaggcccaccacaataagggcaccactgccgccgccacccaccgccgccaccgctttctcaacgtctccaccggcgggtgcatccacacggacgacatcccggagctcgccgaccacacgatgctggcgctcacgccggagggcctcctgctgctgctccacgagcccagcctccgcctccacctcctgaacccgctcacccgccaccgcaccgacctcccgccggtgacagcgctcctgacaccggagtggcgccgacgagcgagctggcgtttgggcgcccatggcgtgggtcttcgcgtgaacgccgccggttttgtcgtcgaggatgcctccacagtagtggcagtcgatttctccgatcccacggtgcgcgccattgccaagcctggcgacgagagctggaccgtcatcgacgacaggctcaacacgatagattggattatcacatatggtagagtacatataggcacatgccttccatatctagcaaccgatttatagaaacaatatcggagaagattaaggaaggatggcaagggataaacacaatctaacaccccccgcagtcggaacgtcgtgggaacggacattcagactggaccgaaactccaagaagatggcactgggcaaccctttggtgaagatgtcggcaaactgtgacgtagtaggtacatgtagcactcgaacagatccggcagcgacgcgatcgcgaacgaaatgtagatcgatctccacatgcttagtacgctgatgttgcaccgggttagaagagagatagacagcactaacattgtcacagtaaaccaatgtggatcggctcggaggggtatggagctcatgaagaagctgtcgaagccaccaccgcgttggccacgacacgatattctgcctcggcactggagcgcgatacaataagctgacgtttggaggaccaggagaccaagttgtcgccaaggaacacagcataacccgaggtggatttcctggtgtccggacaacctgcccaatcagcatcagagtatgcactcaagtcaacagtggaggagcggcggatgtgaagaccataatcaaccgtgccatggacataacgcaagatgcgtttgagagcagcaagatgaggctcccgtggatcgtgcatgtgaagacagacctgctggacagcataagagatatctggcctggtgaaaatcaggtactggagggcgccagcaagactccgatagttcgtgggatcatgaactggggcaccatcagcggcagagagcttggcgttggtgtcaacaggggtagcacatggcttgcaatctgtcatgccagcacgctccagaaccttgaggcagtactggcgttgactgagatgaaggccagaggactgccgagaaacagagatgcccaagaaatgatgcaagctgccaagatccttcatcgagaactccgactggagagcacggatggtccatcgaagaagtgcatcagaggaggctgtcagaacaatgtcatcaacatagaggagcaaataaaccgtgtctgatcctcgatggtagatgaacaaagatgtatctgattttgcctcaacaaagctgagtgtaaggagaaagctggcaaaccggctggaccatgcccgtggggcctgcttgagaccatagagccgcataggccggcgggaggaaggcttgctgctgggccggcgcgggcgtggtggtgaaggctgtcccgacgaagttgggccgcacgccaaggaggcctagaccggcctggcccggccacatgtggattctccctgtccatgggttgtaggccgtgggccaggcctggttggcccgtggtgcagtctatgcgccagggttgccctgggcgccgccgctgtgtgcttgtccgccgccgccacttgcgccgccgctgccattgctcccgccgccaccaccaccggagccatgaccacggcgtcggttgttgttgcgggagttgttgttggaggtgttggtggaggtcgccgagcgagcggtggtcgaggaagcagcgaggaaggccgtggcagtaacgggcggccggtggcctttcgtcagctcatcgaggagaagctgtgcgcgagccttggcgaacgtcgggaacaggacttgcagaggcaagagggacttgaggttgtcgaatttgtcgttgaggccgccgatgagggtgaggatgagagaccgatccttgacaggttcaccgacgtcggcgaggttgtcggcgaggaccttgagtcaccggcagtagtcgccgatggagaggtcaccctgctgcagatgatggagctcggcggtgaggttgacggcgcgccgctcgccgttgccgaggaactgcagctcgaggtcgcgccagacggagcgtgccgtcgccgtgggaaagagcacctcctgcataagagtagaggagatggagccgtagagccagccgaggacgatgcagtccatctgtgtccagtcggcgtgatcggggcgaggtacgtcggagaagacatgatcggtgagggcgtattttccaagcgcgatgaggaaaaggcctcgccagcgggagtagtttttggcgtcgaggtcgagggtgacggggacgagcgccttcacgttgaggacggcgacggctttgctgtggaggttggcaacggcttcggcgtcaagcgccgccggtggcgcggcggcgtcctgcgtgggggcggccggcgtcgtggtgatgccgagacgggcgagaagcgccaggatctcggggggaagttgcgccgcgggagccggagtggaagccggtggcggcgggatggcggtcgtcgaaggcgcggtcgtcggaggaaccggtggaggcaccgtggaggagtcgtcggaaggagaccgaggataacaggggcgagggccgcccgggccacggtcgcggcacgatcggtggcgtcgccagcgacggcggtggtcagggtgtcgtcgtcctgaccagagggagccttgaaggaggagcggacggcatcggcgatgattttgatggtgtcatcaaggacggcgtcggcagtgagggaggagggaggagaagccatggcggcggcagggtgcgccggccggcggctggggtggagaggaggcggaagcgagaaggaacctaatctgaggacgcccccgtcgatcaaccccaggccaggaacgtcccctcttggccacgtccgtgtgtccagtgccagcgcatgtgccatgctgtatgaccactcccggtccacaccaaccatactcccgtgaaaccgcgagagtcagctctgataccattttgtaacgacccgcctttcccaggctaggcccacttacatctggtagctttcataggtcataagactgtcctcacagaccaacacaagtcttttctacgcactttgtcctcactcatgcgcactcgggaagaattttctggtcggtcacccatccttaaattgctccagaccaagcacgcttaacctcagagttctttagagatcggcttccgaaaaagaagttgcaatttgttgatatgagtattctagtaatcctattaagccctagaccgggatgttacaccctcaccccttacaaagaatctcgtcccgagattcggaacggctagaaagaaaagggcattggtcaactgcagtctatcttattccataactatgataattattctaaggctttaaagaaaactactgctgctttgagactggtggctgagctgtaacacttgaagatgcaactggcactacattggctcctgtgacgacaaagatgtcgatggggtctacttatggaggccaagtcaagtggatcgagggacatgaagatgatggtcgaactaaagtgtccagctgtcaagatggaatgaagtttggatcctagcttagaacctaaaccaccaaattgactttgaagaatagttagtagggtagaacgtttgttgcttgcttgtgtgtaggtaaggttgcattcccatcattggtgtagttcaatgatgagcgtgtaactatattaggttgcttgcttaatcaacttaaacaatataatggtttacacacactagatcaatgttaacatggttaaggtcttgtctttagtgtcacccctctccttctatcttctccaaacctatagcagatggtgaacacttgcgctagtggaagtggaaacaataacaatgatgagaacccaactcttgctcaagttctagctcaacagactcagttaatgaacataatgatgcagcagatgcagaaccagctcaaccaagggaacgacaatcctccaacgccacagaacaagttagctgacttttcttcgtgtgaggccgcctaccttttctagcaccaccaacccagtggaagtaggtgattggctatacactattgagaagaggttggaattgctccagtgcacagatcaggagaaagttgttttcgcttcacatcagttgcatagacctgcttcagaatggtgggatcacttccggatgaacagagcagaaggacaaccaatcacttgggaagagtttactgaaggattcaagaagacacacatacctacaggagtagttgctttgaagaagcgtgagttcaggacattaaagcaaaaggatcgtaccgtgacagagtatcttcatgagttcaaccgtctagcacgttatgttccagaagatgtgcgtactgacaaggaaaggcaggagaagttcttagaaggcctgaaggatgaactatcaattacgttgatttctcatgactatgctgatttccaagagctggttgacaaagcaatttgacttgaagtcaagaagaacaggatggacaaccgtaagagaagactgattgttttcaaggaagcacagggtactagccaaaggcagtgtatcaagcaatcccaagttgatgaatcaagtctaacatctcaagaacagtcgcaacagttgaacatcggtgatgagatcaattcagagactaatgcaagcaatgaagttaacatcaagcaagctactcaatcagtgccagttcagcagaaccagtctcaagaaaataatagtagtggaatggaagggagcagcaggtatgtttcaactgttacaagccatgtcactttgcaagagagtgttcgaagccaaagcatcagcagccgcaaggtcaagtcaacaacattgtcgtcacaggagccaatgcagtgcaagttgcgtcttcaagtgttacagctcaaccaccagtttcaaagcagtagtagttttctttaaagccttagaataattatcagacttatggaataagatagactgcagtttacctatgcccttttctttctagccgttccgaatctcgggacgagattctttgtaaggggggtagatttgtcacagcctgaattttcgtttcaagatttataaattatttaataaattattaatagaatttatattaaatgttcattaatttacaagtgaagtgaaatgtgggaaatcaaatttcctaattataaagcatgggtggatttaatttttattaaattctccatgattaattatactctctgaaattttctcggatttttcggagctcaattattaattttaataatacaaagaacatttcagtaattattcacatattaaattaatcattaatgagctggtttcaatgtttttaaatacttagggtgtccaagtatgttcaagatttttcttggaattatttgaccattggaagtatttttaacaatcgaaagatcatcttattggttaatttatttggaaaagtaataaaatcttcatcctcagcttgggcccttttcagcccattctctcccttcctctcagcccgcagacaagtctgcttttcgtccctctcgctacagtgttgtcttcaacccctagacagagccgactgtctccagcccgtgcacagttgccgccgcctcctccttccaaatccggcctctccgttgctcctttttccaaattagttgtgggaatggaatcctctcaatctcctcttccttttccccaagaaatccccaaaatttctatggaaatcctttccaatttcgcggatcaatctttcctttttccggcgaagatcctaaactttcccgagtttttcccgtcgatttgggcccgaacccgagctcctgtgcctatataaaggaccccctcgtcgtcctctacctatcccctcaagttccatcttccgccgtcgtcggaatcgctctccccgcgctcttcttctctctccaagcgccggcgccgctccagccgcccctagccgtcgcttcggtcgtcgccgtcggtcgccgtctccttcatcagcatcgcgaggtcgtcgccgtcctcgtcccgtcctccgtttccgccgaagatcgccagagcgccgctgacactgtcaacccgaagctcgccgccgcattttgatctccggcgaggccactgctgctccttccgtcgtcgccaagctttgccgtcgcctccattggattcgcagctgcgaagtgaagcccggccacccctccgttgttgccgcacatcgccggaaagtcgtcgccgccgtggacagtacctcgccgcccttcgaagctcgtcgccggccatcttccgtcgctgtccgtcatcgcgtaagtgttggtaaggaccgtcgtctcgtgctcttcctcccggtgccctccgtttgcattattgtgccgtggttcgccggcaaccgctgcccctatgccgttcaccggtgtaggtttttccctagggtcttaatccaacataatctaatccgtgatttgtctagcgttgtcatctccgtgtgttgtagccggaccgtcattgtcgaccctttctctctgatcgctttggttcggtgagacttctatccgttctcttttttcagtggcatattatttctttttaatatatgccatctactaaatataacctaatcttttctgaatgttgctttaatcttttcttaattataaatcatttgtaaattgtttaattaatttggaatagttttttctttaataggtttaattggaattaaatcttataaaattcataagtaatttatatgaaatcggaatgaggccgttcaagtctcataattcatctaaaatcatgatctacatgtttatttactttatatgtattgtttatttggtttttattagtctttttccttgttttatgtgttagcttgtcgtttcgaaggatcgtgagtgcgtcggaagtgttcaagaagattaattgaagaccgaatattgcaaggcaagtcacatagatcccaaacacaattcctttgagcatgttgatcctatatttaaattctctatttatttcaagtatacatctattttcgaatgtcaccgggtggtgtgaacctatttctttgttatggccaatttacattgattatcctatttcttgattacctcggggtataatttgactagttgtatttatatattggttcaactagatacattagatataattgcttagccatgtttagaaacattagcacactattgggataactaatgtttcacatttacttaatgataactaatgttttgctattacttaatgattggttaattaattaatgtgccaactaaaacttgataatggtgggttgtgagcacatgattttgatggtcgtgctcatgacaattaaggaccggttcacgagtttcggttgtgaaacattaaccgtgccaaacacaagccagcataggcaacggctggacactttgtatagcaaggctcattgtggtgtgccagactgagaagtggcggagataagcccacgggggtcgctggggagtctatgcctttggtttttgagggggtgactacgatccaggaaaggtgcgctgctttgagttgagctatgcgaggggtcttgtcacaactacacaaatggtgacatgttcagcatgggcacatgatgatatggtgacatattatggagttgtgtcttgtgggtacagtggtacacctctggccagagtaaaactattcgaatagccgtgcccgcggttatgggcgggtctaacaatgtctttcgtgattagtctcacactactcattaataataatgtggtaattgatggtaattaatttagctcctggtttggaatggtacattcctggtttagagatagatctgtacagccgtgtatagttgttcaggatggttgggcctgtgcagcatgggtgtgcagttcagtgttaattaatattgatgattaattactctactgttttagaattctcaaatgttttgctaaatgctgcttttgcaaatgagctatatattatgccattctttggtatccttgtgcacttgcatatttgttgtgtggcttgctgagtatgtcatatgcccacattgcaataatcaatcgaacctcagttgaagacaagttgcgaaggagaagacgtttggcttgtaccccagttgagctacttgtggtagtggatgtcacgccctgaagtttccccctttttccttgctttaaaaatttgttaaataaatcgtccgaagaaattgtcttaattaacctagagctaaatccctaattaataaaggcatttaataattggaattggcaatgtgggattttccttgagttccacatgtcacaatacattaacaggattgatttttagtgaaattttcagagccttggaaataattttaaccaattaaaaatcaccaaagtgcaattttaaatcccaggaaaaatcctttcccctttttccctttttcgcttttcttttcctctttttccatctttttgggccgtcggcccagtccaccccccctttttctcctacccgcgctcggccttcctcttgttgggtcagcccatgcgcccctccctcctctctctgggacgccgataggtgggccccacctgtcggtcgtctcccacctccggccgttggagccggagctccaaccgctgccgccgaaaccgccgcgccgccgcctcctccgctcctcccgtgcccacgccgcgtcgctcccgcgtcctccccacgtcgccgccctctcccccgcatctcccggcccgcgcgcgcgctcgctaggggcgggattcgaatttgaatccccccattctctctctctccacccccacgtcgccggccaaatcggccacctccccggccacgtccgccccctcccgcacctataaatcgctccccgcgtccccctctctcgtttttcgcactcgctgcgcccttccgtgcttcctatcctcgccgcgccgctcgccccttgcgccgccgcctaccgccgtctccggccacgcgccgccgccactatagccaccaccgcgccgcgcagtcgctgccgtcgcgctcaccgagcccgcccgcacctcggccgccgcttcgttgccgcaaatcaccgccggagctccgattccctcgcgtcgccggtgagctctccattttcatccatctccggccggccactttggccgccgtggtcgctctccctactcctaacccctcacctccccttctctaggtgccgccgccacccgtccgccgtccgtgtcgccggtcgtcgccggccgccaccgcctcctctggtgaggactcccctcctccctccttccctatgtgccgcacgcgccgcagctctctgtgctcgccatcgccttcggccgccgccgccagcctgtgcgccgtccgccgccgcctcccgcaccgccgcttgttgttgccggcgctcgcgcgccgccgccggtcgccatggccgccggtcggcttcgaagccgagccgagccaaccgggcacccttcctctcctcttgtgccgctgcccggtggggcccaccagctggtggaccccccttttagccgctgccggtggggcccgcgtgccgtcgccacctcccccccttttagagccgctgacccatggggcccacttgccggcgccgcccccctccttggctgacgtcagccctgggtattattgcgcaataaattgattaaggactttttctttattagtaaaaacacagttttatcttctaaaattcataagtaattcatccgagctccgtttaagtccattcaagtctcagtaaattcataaaaatgcaaagaatccattaaaaatggttttgtttcctgtttcattagtcttatagcatgttttgcttgtgtactttgtttgtcgcgtagatttcggccgtttcgtcgatccgcggtttctcgaagacgttgctgaggtctcatcagtgcgagagcaacgcaagtcatgcattacaattgatcatattgtacccaatttacaaatatcccgcatttctattaaatgtcgcattcttttacaatgtcatatgggatgggtcctattactcagccatttattgtttaccatatgccattaataacttgggtatcaaaatgattagatgttggtttaggaaatgcttagccatgcttagctccactagtacacaaatggggatcacattattacatagactttgactatgagcatagttttggattggtgccaccgcaatggtgttagttaattaaaatacactgaatggtgggctgtgggtgcatggttttgctggtcgcacccatggcaattaaagaccggttcacgggaaaccctgggagacttaccgtgcttaccacaagcgagagtgggtaactgcttgatctgaagtatagctcgaccctttcctaggcaccggtggcgagggtgggcgtaatggagttgggtcggccagggtgtccggttgtccagctgccagattcaccgcggcgcaagaggggaccgcccactgcccgttgggggtggaggtgaaaccttagcgtggtgtggatggttaggggagggttatgcggagggtcttgtcacgatttccccctttgcagtattatggtgatacttcggggcatggtgacatgtgtggaatcgtgtcttgtgggtacagttgtacatctctggacagagtaaaactattcgaatagccgtgcccgcggttatgggcgatcaaccagattcaccgtgattagtctcacccctagtttagcttaatgaactagtgtagttcaggtggttggttgggcctgttgcaacgtggtgtagcgttggacagtgattggttaatattgattaattactacagttgttttactgctttcaactactgcttttaaatgctagttttatgcaaaagaacccctagcctcctttggttatatcctgcatcatacctcctcttccggtatgacttgctgagtacagtgggtagtactcagtcttgctctcttttcccccacaccagagttgaagttcttctcagttggagctgtctcagaggggttggtttcgtcgctgccgtcaaggtttgcctatggagtggagtcgcccgctgctgaagtcaagcttccaaggctagctcgttttatcttttccgctgcatttgtaatcttttatatttttgtaagacgtggatctgtatgtcaacaattgtcgtttgtgtaccctggctggtcctggacaggggtttaatgcacattcagcttagaaattctggttcgtgaatttctgggcgtgacagtggagccggagcttcgctagatcgttattccgctgctattttctcttttcatttgtaagtatgtaacgttgtattattgatgaatctgtatattaaattgtcagcttgtgtacctcggctgattcctggacgagggttttatgcacaaattagttcggaaattactagtgaatttctgggcgtgacaagttggtaccataataaatggcgtcgtcgtcgtctccatgtgttgccgccggttcaccgtcgtcatctattcctctccgatcgctttggttcggtgagacgtctatccgtgttccctcggtttagtttttaatctctcgtttgtgtcgtcgagtagccgccgccgtgccacgcttagctgctgccctagcgtcgccactgcactagccgcctagtcgtcgctgtgccgctccctgctacagccgtgctgctgctgctcgtgcgtgacaagtcgctgccgtcccgctaccgtagccaccatctgccgtcgctgtgtgtcgtcgtcgctgtgatgtcgccctaacccgagccgcgtgtctccgccgagtcaccgccgcctggccgagccaagtcgccctagtgccgccgtgtcgcagctgtgtgccgctttaacctagccgccgctttaaccgttgctcggtagtcaagttgtctagccgtaggtgcatccctaaattcctaccggcctatcgtttgccgtaccggggctttaccgtgaatcgtttctagcccaccggtttagccgcagccattgttgagtcgttcgctcgttcgttcgaacgaggtgttacccgtgcttcgttcgtttgtccgtgttgagtcgtcctttagtttagagccgtttagagccgccggttccgttcgccggtttcggttgatcatttgggtaatcccgtgtcacgtagaattgactcgttgagtcggtatctcgtgaggctcgcttgccagatcaatctaagccatccgttgaatcttggtcaactctatgtcaagattaatcttagccctccaaaatcgatataaatatgttctctcttttcagtggcatattatttctttttaatatatatcatctaccaaatataatctaatctatttccagaggttgctttaatgttttatctcagttataaatcatttgtaaatgatttaattaatgtggaatagtctttttctttaataggtttaattggaattaaatcttataaaattcgtaactagttcatatgaaatcggaatgaggccgttcaagtctcataattaatctaaaatcatgatctacatgtttgtttactttatatgtactgtttatttggagtttcttagtctttttccacgttttgcgtgttagcttgtcgtttccatcgtttcgaaagtccgtgagtgcgtcgggagtattcaagaagattaattgaagaccatttattgcaaggcaagttacacagatcccaaacacaattcctttgaacatgttgatcctatatttaaattctctatttatttcaactgtgcatttattttcgaatgtcaccgggtggtgtgaaactatacctttgttatggccactttgcattgattactctgtcctttgataccttgggttacaatttgactagttgagctttatatattggttcagctagatatattagatataattgcttaggcatgcttagaaacagtagcacacgattgggataactaatgtttcactattacctaatgatggatatttaatcatagctcacgatggctaatcgtgattggttaattaattaatgtgccaactaaaacctgataatggtgggttgtgagcacatggttttgttggtcgtgctcatgacaattaaggaccagttcacgagtttcggttgtgaaacattaaccgtgccaaccacaagccagcataggcaacgactttaccttttgtatagcatggttcattgcggggcaccagactgagaagtggcggagataagcccacgggggtcgctggggagtccatgccttgtttataagggggtgattatgatccaggaacggtgcgctgtggtggattgtgttgtgcgaggggtactgtcacaactcctttcagaggtaccgtggtggtattgaggcgcatggtgacatgtcgtggggctgtgtcttgtgggtacagtggtacacctctggccagagtaaaactattcgaatagccgtgcccgcggttatgggcggggtctaacaatgtctttcgtgattagtctcacactactcaccataataaatgatgctatcactggtaataattcatggtatcagattaggttccttctcgcttccacctcctctccaccccagccgccggtcggcgcaccctgccgccgccatggcttctccctcctccctcactgttgacgccgtccttgatgacaccattaaaatcatcgccgacgccgtccgctcctccttcaaggctccctctggttaggacgacgacaccctgaccaccgccgtcgctggcaccgctgccgatcgtgccgcgaccgcggcccgagcggcccttgcccctgttctcctcggtctccttccgacgactccggccgccgatgacgccatctcctccacggtgcctccaccggttccttcgatgactgcgccttcgacgaccgccatcccgccgccgccgacttccactccggctcccgcggcgcaacttccccccgagatcctggcgcttctcgcccgtctcagcatcaccacgacgccggccgcccccacgcaggacgccaccgcgcaaccgccggcgctcgacgccgccgcaccaccgccggcgctcgacgccgaagccgtcgccaacctccacagccaagccgtcgccgtcctcaacgtgaaggcgctcgtccccgtcaccctcgacctcgacgccaacaactactcccgctggcaaggccttttcctcgtcgcgcttggaaaatacgccctcaccgatcatgtcttctccgacgtacctcgccctgatcacgccgactggacacagatggactgcgtcgtcctcagctggctctacggctccatctcctctactcttatgcaggaggtgctctctcccacggcgacggcatgctccgtctggcacagactgcaccacgggtcaaccaggcctggcccacggcctacaacccgtggacaaggagcatccacatgtggccggtccaggcctccttggcgcgcggcctagcttcgccgggacagccttcaccaccacgcccgcgccggcccagcagcaagccttcctcccgccggcctatatggctcttcctaggccggcccagtacactgcaccaagcacggcgcctccaactcttgttgccgctgtgcaatctccattccagtggacggggccctcacagtgggacccacgggccctcgccaacgcgtacaacacggccacattaactactccaccgtccaatgaatggtacatggactcaggtgctacttctcatatgacgtctgacaccggtaccctctccacttcccaaagccccacccgcaatactccctctcatactattgttggcaatagctcccttctccctattacctccgttggtcacgcatatttacattaccccaattcttcctttgtgcttaacaatgttctcatttctcctgagattattaagagccttatttccgcacgccgttttacttgtgataattggtgttccgttgaacttgacccttttggcctctctgtgaaggattacccaaccaagatcgagatcgtcaggtgcaatagttcctgtgctctttatcctctcccggcagatgcgtactcctcggcggcctccactcgtgcctttgtcgcctcctccaccaacaccgacctatggcatcgccaccttggccacctcggtcatgaggccctcacccacttggcgtaggcgtctgttgtcacaccccgaagttttcctcccaagccaaattgtaaattacaaatgaccccaagaaaatgcagaggaaatcaggataaaaccctaagaaaacaatgcaaataataatcggatttgacatgtggaatttttcttgaattctacatgtcgaaattcattaacaggatttttagtggaattttcagagctctagaaataattttaaccaattaaaaatcactaaagtgcaattgttaattccagggaaaatccttttcttctttttcttttccctccctttttcctcctttttcttttcggatgggccgccggcccattcccctccttccttcccctcccttactgggccggccgcaggccgaggcccagcccgacagccggccgcccgcctccctcctctcggggtcgccgacaggtggggcccacctgtcggacccgtctccctcctcccgccgatcccgctcgcgccgccaccgccgcaaccgacgccgcgcccacgtctccgccttctccgggccacgtcgaccacgcccgcgcgtgcgccgcattccccgcgcccgttcccctctctctcccgctcgcgcccgcgcccgagatggctgggattcgaaaaccgaatcccgcctctctctcctccccactcccccacgtcggccgtcgaatcccgccgctcccggccacgtccggttcccccatcccctatttaagcatcgccggcaccccctctcgctttttccccattgcgccgacctctcccgagctccccaacgcctccgcgccgtgcaaccacccgccgccgccgcttttgctactccggccgccgctagccgccgctaggctcgccgccgtctcacgccgtcgccgccgttagcttcgcgcggccgaggtccacctcgtccacccctcctccgtcgaggttcgtcgccggagccctcatctccacgcgcacgggtgagcgccacctctaccgccgccttcggccatggatcccgatcgccatggtccatctctctctctctaatccctctcttctccttccttagggcacgccgaagctcgtccgctagccgacgccgtcctcccgtggcttgccgtcgccgtccgccatcgccttcctccgcgccggccaccctcggtgaggcatcccctcccttcttttccccttcctctcctcctagagccgctagccgccgcttcgagtcgtcggccgtcgccttcgactgccgccgccgtttcccgtgccgccggtagccgccgtcgtcgcacgcgtgccgtcgccgtttaacccagccggccggtcggctttgatgccgagccgcgccggcggccgcatttaccgcgcgccccggccgcgaggtccccgtcgccgtcggttcggccgccacgtggcgccgccgcccctccttttccccgtgccactgaccagtgggcccgcgcgccgccaccccctttctctctctcccggtcgctgaccggtgggccccgcatgtcggcgccgcgccccctcgctgacgtcagccctggttaatattgcgcaataaattatttaaggatttcttttatagtaataaacacagtgaatcttctaaaattcataactaattcatccgagctccgtttaatcccattcaagtctcagtaaatcaagaaaaatgtgtagaatccattaaaaatggttttgttctctgtttcagtagtcttatagcctgtttgcaatgtttgctttgtatgtcgctagattccgatccctccgacgctccagtgtacttcgagatagtcgccgaggtccctccagcagcagagcaaggcaagtcatgcttgtcatttgaacatgttgatcctatattgcaaatgctctattgttttctttcaaatattgcattgttttataatattactatgggatggatacctattgttacagccatgcttttggatatcatgctcctttgttagcttgggttataacatgattagactttggactaggaattgcttagccatgcttagttcaactagcacacagtggggatctcatttaaaacctagactataggtttatatgataatgttggtttaataccaccgctctggtgttggttaaataaaatgaaccacatggtgggctgtgggtgcatggttttgctagtcgcacccatggcagttaaggaccggttcgcgggatgccctggaagaatttatcgtacttaccacaagccagcgtgggcaacggctgggcttgtagtgtagctttcctctagtcgacgcatccaggcaagggtgggcgtgatggagcggggcgggccctgcgacggcctctgtcgcttccggattcacctaggcacgagaggggactgcccgtcgcccgctggggacgggggtgaaacctgaggtgtggtgtgcttggctagagggggttatgcgaagggtcctgtcacggcctctttccggtatgtcgtggtggcatgtcggcgcacggaaacgtgtcgtggggctgtgtcttgtgggtacagttgtacacctctgatcagagtaaaactattcgaatagccgtgcccgcggttatgggcggtcaaccagattcaccgtgattagtctcaccctagtgtaatctgttgaacttggatagtttaggtggatggttgggcctgtcgcaacgtgggttagcgttggacagcggatgtttaatactgcttaattattacaaccgttttcgcattcaattcctgtttataaatgctagtttttatgcaaatgaaccactctagctcttctttgttaattccctgcatcatacccctattccggtatgacttgctgagtacagtgggtagtactcagtcttgctctacttttcccccaacctcagagctcgagtatgtgtccgatggcgggttctccgaggagtaggcttcgtccgtgccgtcgaggatgcctgtggagtggtgttcccgctgcagttcaagtcaaggcttagctcccgtttcttttgttttccgctgcatttctgtaagacctttataatgtttgtaagacgtggatctgtatgtcaacattgtcgtttgtgtaccccggctggtcctggacgggggttttaatacacattctgcttggaattctattcgggaatttctgggcgtgacatctgtcatcccaccacctaaagtcactacatctttatgtcatgcttctcagttaggtcgtcatgttcgtcttccttttcccactagctctagtcgggccaaggcaaattttgatttagtgcattgtgatttgtggacatcacctattcctagtgtgtctggttttaagtattatcttgtcattcttgatgattgctcacattatgtgtggacctttccacttcgctttaaatccgacacattctccacattatctcatttttttgcctttgtgaagacacagtttgccacgaccattcacagcatccaatgtgacaatggtagggagtttgacaattcctccgcccgctcctttttcctcaccaatggagtctccttgcggatgtcctgccctcacacctccccacagaatggtaaggccgagcgcatgcttcgttccttgaacaacatcacccgctccttgctcttccaagccaaccttcccgctccctactaggtcgaggcccttcacaccaccacacaccttatcaaccgtcatcccaccaaaactcttcaacaccacacccccttttttgccctatatggtgctcacccgtcctactcccacctccgcgtgttcggctataagtgttatcctaacctcttcgccaccgctccccataaactagccccacgatccaccccatgtgtgttcctaggctatccctccaccataaagggtatcggtgtctagaccttaccaccaacaaggtcatcacctcgcgacatgtggtgttcgatgagacatgttgtaacgccccgattttcgttcgggaataaaaatcaattaataatacattttctagaaattaaataaaagttaaaccaatttaatcaagtggaattatagaggaaatttgaaattttcctttaaaaatcattggtcgggaatattttgtaatattctttgcgccctaatgtactctccagaattttccgtgaattttcggagctcgagaaatagttttaatagcacaaagatcattgcatcaattaaaataaaaaaaaacaattaaaatcccacttcctctctttgggcctttttcggcccaagtcttcctaccctcccgcggcccgcgcgccccttttctctccctctcgggccggcctcctccctcggcccgctcggctctctctctccctcaagtctgctttacctccctcgcccgttttcccctctctctccccgacaggtgggacccgaggccccacctgtcatcttcttcc

SEQ ID NO: 9665 - DNA, 1024 bp, Oryza sativa
gctggagaagtccggccggtcgttggtgctctgccttgacacgctggcacacatcacatagagccacaaactctgcaatttcccgcttcatgctgacccaccagtatttctccttcaagtctaagtacatcttggtactgcccgggtgaatggagtaaggactttcgtgagcttcctgaagtatcagctgtttaagttctctgctatctggaacgcatacccgctttccgttccatagggttccgtgttcatcctctgtgaaactagcggctttaccctgtttcatattcttgaggagtccatgcatgtccggatcattcttctgagcctcgcggatttgatcgagcaaggtgggcttggcttctaacgcagccaaaaatccgcgaccaactatgctgaggttcagggcttccatctgttgattaagttcgggtggaatgccacggacgttgagagtgttgcagtggctctttcgacttagagcgtcggcaaccacgttggccttaccaggatgatagtgaattcccacatcataatccttgatgagttctaaccatctcctttgccgaagattcaggtccgactgggtgaagatgtatttcaaactcttatgatcagtatatatttcacagcggttcccaatgagatagtgccgccagatttttagagcatgaaccaccgctgctaactccaagtcatgtgtagggtagttgccttcatgaggtcgtagctggcgtgaagcataggctaccacatgaccgtcctgcatgagcacgcaccccaatccttggcgcgaagcatcacagtacaccatgaagtccttgcgagtatccggcaagattaacactggcgaggaaaccaacttttccttgagagtttggaacgccttttcgcattgcgggctccacacaaacttctcttctttctcaacaactgtgtcatgggtcgagcgattttggagaagttctcgatgaacctcccgtagtatcctgccaacccaagaaactgcgaatctgagtgactg

SEQ ID NO: 9666 - DNA, 830 bp, Oryza sativa
acgaatccgagggagagagagaggggaaagagggggaaacgggggaggggattgcggggaataattcccccctcttgattgcatgcggggcggacgggagcggcgggattcgcggcggcggcggcgctagggcacgggcgctggcggcgggcgcggcgggaggagggcgatgacaggtgggacccacccgtcagcgggagtggcgggcgggcccgcctgtcagcggcgcgcgcgcgcgcgggaggccgatgggccgcgggagaggagagagagagggagagggaaatgggccgagccggcccaagagggaagggggggggaaaagaacttcttttagggttttctttttataaaaccttttcaactttgtttctttctttacaattattatttgtgctctgaaaattccactaaaatttatttaagcattttaggcttttaggaaatatacaaaaatcctccaagcctcatttgacttttatctttgcacattttaattgttggaggctttcacattgaattttaattattcttttgcacaattttgaggatagattttagagtcgatttgggacgcgacaaacctaccccccttaaacggaatctcgaccccgagattcggaagaactggcgaagagatcgggatgggctgccttcagctcgtcttcagcgctcccaagtagcttcttcttcggcgtggttgctccactggaccttgcaaaaacggattacccggttcctggtcctgcgctccatggcgtccaggatttttactggcttctccacgtaggtcaaatcttcgcgaacttcaatttgctctgagtcggcct

SEQ ID NO: 9667 - DNA, 11775 bp, Oryza sativa
ccgaccagcgccgttgcctccctcagctccgcaaggacgagaaggacctcggccgccgcccctcttcgcgggaaatccgccggagctcctccttcctcggtcgccgatcgaggccgagcccgtccgccccatcccgagcgacgcccgtcgccggagctccgtcgcgtcgtcttcctgaggagccccgtcgccaccgttccttgccgtcggccgcccctttgccgtcgtgcatctcggtgagcactcccctccctctcccttttcctccccttcgttggccgcttcccgggcgtcctcgcgacgcgctgccgccgccggtggccgtccgaccgggtcgctgccgccgcgctccgcgctccgtgcccgcgccgttgccggtggtgccgggcagccggttgccgcctcccccttgccgccgccgcgccttggctcggccgggccggcttcgtgccgcgcctgtgcccctggctgccgctcccctcggccgcccgatcggctcaggccgatctgggccatccacgtggtggacgcgcacccgaggccacgtgtggaccatgtccaccgtgcgccctccccctttgactcgctgacatgtggggcccgcgtgtcggcgctggccgcccctttgctgatgtcagcgaggtccatttcctctgtaaaaataaataataattgcgcaataaatcgagtttaattctagaaattcatttaaatggctcaaaacttctaaaattcatatctaattcattcgaactccgaattgagccgttcaacttgcaaaattcatctaaaattgagctctacatgtttgtttactttttatgtactgtttgtgtcacgcccagaaattcactagtaatttccgaacttatttgtgcatgaaatcctcgtccaggaatcagccgaggtacacaaactgacaatttaatatacagattcatcaaattaactaaaccgataaatacttacttaagaggcacttagtcctcaccaagaagaaaactgcagcggaaaataaaatctagcgaagctccggctccactcccacaggcagctcaactggggtataagccaaacgtcttctccttctggatcctttttcttcaactgaggttgattgattattgcaaggtgagcatatgacatactcagcaagccacacagcaaatatgcaagtgcacaaggataccaaaggatggcataatatcggctcatttgcaaaagcagcatttagcaaaacatttaagagaagtaaaacagtggagtaattaatcagaaattttaaccaacactgaacagcacacccatgctgcacaggcccaaccattctgaacaaccatacccggctgaacagatctaactccaaaccaggagctaagcaaattattaccagttataacatctataattatggtgagaggtgtgggactaatcacgaaaaacattgctcaactcgcccataaccgcgggcacggctattcgaatagttttactctggccagaggtgtaccactgtacccacaagacacagccccacatcatgtcaccatgtgcctcagtaccaccacggtacctcggaaaggggctgtgacagtaccccttgcataacacaatccaccgcagcgcaccattcctggatcataatcacccccttataaaacaaggcatggactccccagcgacccccgtgggcttatttccgccacttctcagtctggtgctccgcaatgaaccatgctatacaaaagataaagccgttgcccacgctggcttgtggttggcacggttaatgtttcacaacagtagctcgcgaaccggtccttaattgtcatgagcacgactctcaaaaccatgtgctcacaacccaccattatcaagttttagttggcaagtaattaattaaccaatcacggttgaccatcgtgagctaccattaaatataaccataagtgatagtgaaacattagttatcccaaatatgtgctaatgtttctaagcatggctaagcaatcatagctaatatctagttgaaccaatatatataaagctcaactagtccaattataatcacccaaggtatcaaggaataaagtaatcaagaacaaaagggccataacaaagaataggttaattccacccaatgacattcgaaaataaatgcacagttgaaataaatagagaatttaaatataggatcaacatgctcaaaggattgtgtttaggatctgtgtgacttgccttgcaataatcggtcttcaattaatcttcttgaatacttccggcgcactcgcgaaccttcgcaacgacggaaacgacaagctatcacgcaaaacgaggaaaaagactaataaaaaccaaataaacaatacataaaaagtaaacaaacatgtagatcatatttttagatgaattatgagacttgaacggcctcattctgacttcaaatgaatttattaagaattttacaagattaaatctatttaaagcccatttaaaaagaattaaataaatttaattcaatttatggacaattttaatatgtagatctttattttaaacaacttttgcaacttgaaccacattaaactgagttaagatgaattagatatgaatttttaaagattaaatcggattaaaacacttaaatcggtttaaattgaattatgacgcaataatgaattatttttgaaaaggaaaaggggattattgcgtcagcggctagggtttcggtggaccgggcgcacgggcggcggttcacgcgaacggacggccgagatcgaaccaatccaaaacggacggccgagatcgatcgggtccacggcggctcacggcggacgactccgatgacgtcagcgatgacgtcaccaccggcggcggcggctcggcggctcgggctcacacgctcgccggcgaacggcggcgcggcggcgcgaacggaaagcaccgggatgaagcggacgacaaggcgaactcaccggtgaccaaaggaacggcggaaaagcaacggacgacgccggcgacgaggaggaagcggcgaagctcttcggcttgacgacggcgacggcgctccggcggtcaacagcgacggcgaagcggcggacggggacggcggcgacttggcgatcccgacggtggccttcccgagtgacgacgacgaccgtagcgacggcggcgcacggctagacgaacggcggcgacggcggcgcaaaagctcccgaggctagggcgctacacacgacggcgggcgaaggcgagggaggcgacgggtagaggagagcttgggggtccttataaaggggctagcgagcggcgacggaggcccacggcgaccggcggcgagaaggaaactttagggtttgggagagagaggaatccgattcgatctcgattccatcgagtttccaaaccgaattgaccggagattccaaaagagaaaaggaagaggagatcgagaagatcatttcccctctaaagatttcaccggagaaggaaagaatcgagcggatttggaaggagaaggcggcggcggcgcgctagggttcgcgggcggcggcggcgacgcgaggaagacggatccgacaagcggggcccacctgtcagcgaccgaacgcgcgcgcgcggctgcggactgggccggctgggccgaggagggagagaagagaggttttgggccggctttcggcccaaagccaaaagaagacttttaaaacctttttcaatttaaattatttcttaaatgcaattccatttattaaaaatacttccttagctcaaataaatcccagaaaaatctaggaattatagaattaagcaaagtatttaatgaaattttatctagcccaattttatattgagatttaacaaattaaaattagatcttctcttataagcttttaaaatcatttctaataattccttttaaacaacaatttataatttaaggatttttaaacaagaaaagctcttaacaattataattagatcattaatgatcaaataattactgaactgttctttgtattattaagagttgagctctgaaaaatccgagaaaatttcagagagttgacttaatcatggagaatttaataaaaattaaatccatccatgctttatatttaggaaattttatttcccacattttacttcacttgtaaattaaagaacatttaacaaaaattctattaataatttattaaataatttataaatcctgaaacgaaaatcaggatgtgacagtttgcttggtttttattagagtttttcctcgttttgcgtgccaacgtgtagttcccgacgtttcggaagatcgcggtcgcaaggataagagttcggaagattgtttgaagaagcaaggcaagtcacacattccccttgagcatgttgatcctaatttacaaatcttttactgtttgcaaataaatatgcatgttttgctaattacacgggatcagggtttacctatctgctcgcttgtgccatgtttacttgatatctatcatttgtcaaccttgggtaataaatcgactagctcatgttacttatgtgacccagctagaactatatgcttagcgatgcttatttagcactagctcagttgatgggataattacagtattagacctttttagtatcagagtgagctgcgtgctcgagacatctggccatgcttcatggtcgtaattatccaactaaaatgcgactgaatagtgggctgtgggtgcatggttttgctggtcgcacccatggcagttaaggaccggttcgcgggatgccctggaagaacttatcgtacttaccacaagccagcgtgggcaacggctgggcttgtagtgtagctttcctctagtcgacgcatccaggcaagggtgggcgtgatggagcggggcgagccctgcgacggcctctgtcgcttccggattcacctaggcacgagaggggactgcccgttgcccgctggggacgggggtgaaacctgaggtgtggtgtgcttggctagagggggttatgcgaagggtcctgtcacggcctctttccggtatgtcgtggtggcatgtcggcgcacggaaacgtgtcgtggggctgtgtcttgtgggtacagttgtacacctctgatcagagtaaagctattcgaatagccgtgcccgcggttatgggcggtcgaccagattcaccgtgattagtcccatcttaataaatcgacccaatacactgtagttcaggtgggttggttgggcctgttcaacgtggtgtagcgttgatcagtggagtttttaatgttactttaattacccaacagttttactgttttgctcaataaaatgttttacaactgcctttatgcaaatagccacaaacccctccttgtatccctttgcacgtctgcatcgttggtgtggcttgctgagtacggtggttgtactcagtcttgctattattccccctttttcagaagtgtagtgcttctgagctgaagatggagttagaggaccaaggctcagaccccagttgagttttgactgtggagtggagctgaaaccccgctaggatcgcctttttccgctgctgtcgttctgtttcggtgtgaggactaagtgcctcttccgtaagtattttacgctttatttacgtttggaactgtatattacttgtcgttttctgtaccctggctggtcctggacagagatttaatacgcaaaatagtctagaaatttgggttaaatttctgggcgtgacaaagtggtatcagagccaacttgactgtaggttgagccaaatggtcaaaccctaaggacaagttttctgaaaaaccctatttgcaaattgtctcctctcgcccttcgacatttctttatgaaacggtttttcaaaattctcctcccagtccctccaatcctcatagttgttaaacctggaggacaaaccgtcagcttcacgcctattcggaagtcaagtcaagcttcgtgcaaagagtgagaagatcagcccagagtcaagtgaagttttcccggagttttcctaaacccaatctttccctgaagagtagtatcgttagctgctagatcgtgtgttgtttgcttgtgtgtaggggtatggtttgcatcattggtggggatgcgaccatactaggttgtttgcttaagcaacttgaatcataaaatccattcacaacagatcaataggcaagtggtttagtacctcctctctagtaacccctcctatttccccatctctctattgcctgcagcagatggtccgcatgagggacaatttcatcggatcaagaccccgtcagtttcatggggcaactcagtgcaattctaatagtattccacgtcagcctcttgaaggtcagcctcaaccccaagtcatggctaatcaaactcagacagtggaagagttgttacaacagatgcgacgtcggtaccaaatatactagatgcaacagatgcaacgacaatgtcaggagtcacgtcaatgtcacccaccgcaggtgcgagatcagatgccagcccggaacccgaatcagagtcagagtcaggagttcccaatatcggcaccgaagacccctgtcaaaatgctgtccagattcccgaagataacgacagccaagtcaacgtcagaccaaaggaaagtaagtgctacctgttatgactgtggtgagcaaggtcattatgtaaggaactgtccatggaaggtgttcgccaggtcacctgaaaaagacgagaagcagtgcccagggagtaaccaagctccaagtcagtctaccgacaagaaggatggtactttgcagcccaactctggagcgaacaggacagtgatatggaagatggataatggcaggaccatgatcatcaccggttcagaatttactcctgaagacgcagcaaggatacccaagcgtcagagaggaagaaataccttccgaggagcgcgtcagctaacccgtcatctcataaagtacggtccgcccagacccgaagatgatgaatcaggagaacggttttctgctgatgacgatgacgacaacgatgatgataatgatgagaatgatgatgcgacccttgacagtttcagggaaagagagttgaagttcaaagcatgtgctagatgtgggatagtcggacacactgctagtttatgcctccccacatgccgctgtggtgaatatacccattactcagatgcatgccctttaaggaaggtcacatgtttcttgtgtgaaggaacagatcatgtgcctaaggactgtcagttgaatgcggtcatagctaagaccaagaaagaacaagggacaaccgtgcaacccattcgtcaaccaatgacaatcgacaacagcggtcacaatccttctgctcttcctccaactccagctccagtggaagccaaccatggaagaagcaacgtcaccaaggatgttcataagtctctgcttgttcccgtttcagctgccaaagtgcataatcagaagcctgcaccctgggaccaagcaagtcgatcctgtcgcaactgtcgtaagccaggacattgtttcagtgattgccctcttccaagagcagcaaaggcagttcgtcgtgattcacaagttaccagcactgcccatgacaccaatcgacacctaaatgtgcaacctccgccccaacggattatcgtcaagggcaccgtcaaaggtcgcattgttccaccggcaatcgtttcaagcctacaacaccaacgccagcaaggtaagcaatgccaggagaataatagctcgctacagctacaaagaggcagtacactccttcgccagcacccgcggcaagcttcgtcagccccaggtcacccagcagttgtcagctctagcaatgcacctcgtattgctccaatccaaaggcccatcggcaaatcaccgctcggtaaccccgcgagcaagaagttcctacctgctgcagctgtcaagagagttgttactccaccatcgaagatcaacaagcagagcaacattcccggtgagacttcagccagtaggaattaaagaaacaagtcggttaggttcgaataatggaagcaatagcagtcctagccaagccccctacgtttcaagttcagcagcagtctacaagtgtttaaccttatagcacttctctctgtacatagatgtttatggcagttatgtaatgaaaagggaatattgaataaagtttgagtcagtcagtttctcttcttttatgattcatcttgagcatgcaaaagcaagttaaaatgtgaatctgtcggtgtcacaagaaaccaagagtttctcttctaactcatcgcaattctgttgaagctccaaaacctgtttgcgagcaaatagaggaatggttaactagcagattgaaaatggttagacgctcaacacccaacatgatgagatctctttaaaggcagtatcaatggtattcggatgaaaagagtgatggaatatttgaaagtgacatcatataaagaatcttgggaactcctctaaaccttggaagccgttagaggatggtaagcggaaatttacaccctagtggtgcgatcatggatcaattacatttttccttagttcaagacagccagtataagctccaggaatcatctcaatgtttctcagaagttgaaaaagaaattgttccatacctgggtcagaagtatacagagtcaagtccagaaatgtgtagttagcagggtatatggcatagaatcccttttaacgaatcatctttaccgaagataggaaagcgaagtggttatgatcaaaaagcagaaactctcggcagtatcaaagtcaatttccggcagtcgttcagattgtagtatttttgggaaaacaattgcagggcctatagtccgtaaacccaggaagagtcagcaaaggacgatcgacgaagtgtaatgtcatgtcaagagaaggacttttgagtttgatctgttaagtgatcagtgggtatgcaatctatttaggcatacgacaccgaagtcaggctagaagcgggacagttatgccagcagttcaattgttcccagtcaggcgaaatgtatgactactcctgtaaggggggtaggtcgcagagatgagttctggctcacctcgtcgctgtttcagttgaaggagccaattgcaaggtgtcatgcagaattacgccggtcctaggtcacttgatggaattctgagggacaccggtgaggccaggtcaacagcttagcttagagaagcaacagtgaggacagttgcggttcagacgaaagacaggtcaagcaggtttcctggaattacgtgtcactcgagtcagaacccgttcaagcggacgtaggatcaatgagttacaaaggtcagatgcaagcttcaggaacaacttcatcctcttcgagtcagcatggtgaattgtcaggttatcaaaattgctaacctcaacaattcagtccaagataagtaagttccttaagcatccacagccctgtctgggtcagttgaagtagaaccagtcagtccagtcttgcaaagcaaaggaacagaaaagttgaatcaatcagttcagtcgtgcaagtctggacaatcagtcaatcagtcagttcgagacagaaagggggcagtgcagtatgcggatccgtccgatcagtcaaaccgcccgccagctccagctttctttctagccatcccagaatctcgggacgagattcctgtaaggggggtagatttgtaacgccccgattttcgttcgggaataaaaatcaattaataatacattttctagaaattaaataaaagttaaaccaatttaatcaagtggaattatagaggaaatttgaaattttcctttaaaaatcattggccgggaatattttgtaatattctttgcgccctaatgtactctccggaattttccgtgaattttcggagctcgagaaatagttttaatagcacaaagatcattgcatcaattaaaataaaaagaaaaacaattaaaatcccccttcctctctttgggcctttttcggcccaagtcttccttccctcccgcggcccgcgcgccccttttctctccctctcgggccggcctcctccctcggcccgctcggctctctctctccctcaagtctgctttacctccctcgcccgttttcccctctctctcgtcccacctgtcatcttcttccctaacctcccgtcaccccaatggccgtcatggccgccggtttcgccccacgacgccgcggttcccgcgcttcaccccgccccacgagcgcgtggaatcgatcccctccacctcctccacttttcccccactctccccgcgaaaatcggcgccggttaacccctccaccaccccacgtcggcgccccacttcgccggccgattccgccacgtccggcctcgatcccgccttcccgagcccataaaaagcacccccgtgctcccctcgtccatttccccttgtttcccgggcccggcactctctccctcgctcttccccacgccgctcccgcgcgccgccacactccggcgaactccggccgccgtttcccgtcgctagggtcgccgccgccctgctccgccgccaccgccagctttgccgccgcccgggcaagctcggccaccgctccatttcccctctccacctctttagcgccgtagccacgcgaaccacctctctccgccgccgcccccgactccagccgcgtcgcgccgccgcttcggtcgacgccgaccagcgccgttgcctccctcagctccgcaaggacgaggaggacctcggccgccgcccctcttcgccggaaatccgccggagctcctccttcctcggtcgccgatcgaggccgagcccgtccgccccatcccgagcgacgcccgtcgccggagctccgtcacgtcgtcttcctgaggagccccgtcgccaccgttccttgccgtcggccgcccctttgccgtcgtgcatctcggtgagcactcccctccctctcccttttcctccccttcgtcggccgcctcccgggcgtcctcgcgacgcgctgccgccgccggtggccgtccgaccgggtcgacttgcaaaattcatctaaaattgagctctacatgtttgtttactttttatgtactgtttgcttggtttttataagagtttttcctcgttttgcgtgccagcgtgtagttcccgtcgtttcggaagatcgcggtcgcaaggataagagttcggaagattgtttgaagaagcaaggcaagtcacacattccccttgagcatgttgatcctaatttacaaatcttttactgtttgcaaataaatatgcatgttttgctaattacacgggatcagggtttacctatctgctcgcttgtgccatgtttacttgatatctatcatttgtcaaccttgggtaataaatcgactagctcatgttacttatttgacccagctagaactatatgcttagcgatgcttatttaccactagctcagttgatgggataattacagtattagacctttttagtatcagagtgagctgcgtgctcgagacatctggccatgcttcatggtcgtaattatccaactaaaatgcgactgaatagtgggctgtgggtgcatggttttgctggtcgcacccatggcagttaaggaccggttcgcgggatgccctggaagaacttatcgtacttaccacaagccagcgtgggcaacggctgggcttgtagtgtagctttcctctagtcgacgcatccaggcaagggtgggcgtgatggagcggggcgagccctgcgacggcctctgtcg

SEQ ID NO: 9668 - DNA, 2410 bp, Oryza sativa
tgatcatgcggcaggaacgttatttgatgacacactttgtttggatcaacgtgtgtcgctgattttgctccgccttcttcatttgtgcgctgaggacacgctgcataatgaggctctcatagtgatccgcatcttcagccccaatatgctcttcaggtggctcattatctacatggtcagcctcaagcaaagcaagtgtatcctcatcgaaatcactagtagacgagtactcaccatcattttttactaccaaaactcgcttgctagggcactcacgctgcacatgcccaaagcccttgcaacggtggcagcactgaacatctcttgttctgcccgtgaatgccattgaagaagcactcgctgctggctgagcatcctttgtcgtagagcaaactagagggccatattagtgtaatctttgtagtctatgatgtcataaatctcgcggtttaaaccacccaaaaatctagccatagcagcgtcctctgtttcctctaaattacaacgaagcaagcccatttgtaactcctgataatattcctctacactttttgcactctgtctcaattgttgcaacctattcagcaagtcacgtgcatagtaagaaggaacaaatcttgcccgcatgacccatttcaaagcatcccatgtttgtggcatgtaattaggaattttcttgccatgttctatccaccaaaccgaagcaaactaagtgaactcactagtagcagctttaactctattgttctcaggaaattcatggcatgcaaacttttggtcaacagcaatctcccaagaaaggtacgcatcaggatcatatttccatcaaaaggatgtatcttaaatttaattttagaaaaaacatcatcatggttgcatacctcgtgtcggcggtgaccgcccatacctctacgattgttgcatagcggtagacaatcacgagcatctcgctcatcttgatcagtgatgaaccctgagttcctctcgacactcaaggctgttgttggcccgatctttcggtgagttgtgataactacgatttgggagaaacgttgacgatccgactacaaccgtacgagacgttgtgttgcgccttagcgttcaatacacctctccgtggattgttgatcttgccggtgcagatcaaccctattcctgcaagcaaatcgaagaaacaagcaagaacaagataaaagcaatctaatattgcaaataggaatttaatacaaatgataagttggggttccgaagaacaagcagacggacggtctagccgacacgcgcgctgcaagcaagtagcaatggctaaactttaatctatcaaaacccgcgataccctgaaggggtaccaagctatttatagagataggaggaccctagctcgttcgccacctgattggggcgcaccctacatgggccccacttgggccggggtcccagacgaagttacaagcccataggcccattacaggtgtcgcagcaccttgtttctttagttgctgcccactgagatggaatttggtaatgaggcttgatgcattggaaagaggactccgagagctttccatcaagtactcacgggccgaaaacggaggtcgtatggagattcggcggccgtttgaagtcagcagtgtagtaggtggccgaatcggattccagcacttggaggacttgaacttgatatcttgttgttcatccatgatgtgagcaacggatgtatccgtagtagccttagtcacatcattcagtatcaccagtatattcatcctctaaattatcatcgacgtactcaccatcaatgtcatcttcattacgcccaccattgcctctagcattgagataatcaaaatgcctcacaagagcagcaaggctaatgtcaatgcgggcgatcaatgtctccaaccctgtaagcttggtgttggtggtgatctgcgtggactccaattgcccaatcttctcatttgtcacctgcaaatctgcatcaagtccttctgtgtgatgctttgcttgccttgtaaaatattgtatgatgcctttggtgcatggggaatgagacgcaccctcatcatctttatccttggacctgccatggttaataaaacaagagcaacaaaacaacatatgaggtaatttaagccctacggctattgggatgtagcttttgcaaggcgctcactctcagttcactcgaagcctgtctcacaagctcttaccaattcttaccttgcccatagaatgggatggcaacccacaagtctgcaaccatagaacgaggtgtatcggtgccgtagcaacaagacctgtcaagctgtagtcgggtttgtggtggagctggcggtgggctgaaagtaatgcgcaagaaaaaaaatagataaccacgttagccaaagaagttgaataatcactcaag

SEQ ID NO: 9669 - DNA, 11419 bp, Oryza sativa
ccggtgaaggcaaccaaccgaaggcagcaacccaacccccaaggcaacccacctccaccaccaccagcagacaccaacgccattctcacccagatcctcgcccaacaagccaacatgatgaatgctttcctccaccacctccaaaacccgccacaacagaatgctccaccaccaccaccccaacactctaaactcgccgagttcctccgcatccgcccacctaccttctctagctccaacaaccctgtagatgctttggattggttgcatgccgtggggaagaagctagacacggtgcagtgcagcgacgaagagaaagtcatcttcgccgcccaccagctgcaggggcccgcatctctatggtgggaccacttccaggctacgcagcccgaggggcagccgattacttgggctcgcttcaccgccgctttccggagaacccatgtgcccgccggagtcatggctcttaagaagagggaattccgagagttgaagcaaggcaaccgctctgtgatggagtatttgcatgagttcaacaatctagcccgttacgccccagaggatgtgcgggaagatgaggagaagcaggagaagttcttggcaggaatggaccctgagctgtctgttcgtctagtctctggggactacccggattttcaacgactggtggacaagagcatccgcttggaagccaagcacaaggagctggaatcgcacaagcgccgcttggcaaacttccgcaatcagcagggtgctaaccagagggtccgctacaccaatccctatccagggggatcctcctcgcagcagcagcaacagcagcagcaacctcgcccagcgccccgacctcaattcgtggtgcgcgtcccaccgccgcagcagcagcagaatcagcaagggactcgtgcaccccgtcctcctacgccaactgtgcagcccgttcaaggccgcagggacgctcaaggtcagcagcgtctgtgcttcaactgtttcgagcccgggcactttgcggacaaatgcccgaagccaaggcgtcagcaaggccaagcgcctccccgctccaacaacggtggcaaggatgtcatccgtggtcgagtgaatcacgtgacggccgaggacgtgctgacaactccagacgtcatcgttggtacgttcctcgtccattccatccctgctacaattttgttcgactctggagcttcccactcgtttatatctgtgccattcgtggggagaaatcagttgggggtagaaaggcttagaaaccctctgcttatcaccacccctggaggggttatgacagcaaagtattatagccctgccgttcctatagaaattcaggggattccttttccctcggatctgattcttctagacacaaagaacttggatgtgatccttgggatgaattggttggctcaattccaaggagtagtggattgcgcgaggcgcactgtcactctgtaccgagggccagaacaaccggttgttttctttgcacccccaacctctgtcagaagttcagaacttcatcagatagaactgtcagaaatccccatcgtcagagagttcggaaacgtgtttccggaagaactacctggtatgccgcccaagcgagagattgagttccggatagatcttgctccaggaaccactcctctgtacaagcgaccctaccgtatggcagcaaatgaactggccgaagtaaagaaacagttggaagagttgaaagaaaaggggtatatacgtccgagtacttccccatggggtgctcctgtgatttttgtggagaagaaagacaaaacgaagaggatgtgcgttgactacagagctctcaatgaagtcaccatcaaaaacaagtaccctcttccccggatagatgatctgttcgatcagcttaaaggtgccactgtattctccaagattgatcttcgttccggatatcaccaattacgtattcgggaagaagatattccgaagaccgcattcactacgcgatatgggctgtatgaattcacggtgatgtcgttcggtttgaccaatgcacctgccttcttcatgaacttgatgaacaaagtgttcatggaatacttggataagttcgttgtggttttcatcgatgacattctgatatactcacaatcagaggaagaccatcagcaccatctccgtctggtgttgggaaagttgcgggaacatcaattgtatgccaagcttagcaagtgtgagttctggttgtccgaagtcaaattcttgggacacgtgatatctgctaaaggagttgctgtggaccccgaaacagtaaccgccgtcaccgaatggaagcaacccaagacagttactcagattcgcagtttcttaggtttggcaggatactaccgaaggttcatcgagaacttctccaaaatcgctcgacccatgacacagttgttgaagaaagaagagaagtttgtgtggagcccgcaatgcgaaaaggcgttccaaactctcaaagaaaagctggtttcctcgccagtgttaatcttgccggatactcgcaaggatttcatggtgtattgtgatgcttcgcgccaaggattggggtgcgtgctcatgcaggacggtcatgtggtagcctatgcctcacgccagctacgtcctcatgaaggcaactaccctacacatgatttggagttagccgcagtagttcatgctctaaaaatctggcggcactatctcattgggaatcgctgtgaaatctataccgacaataagagtctgaaatacatcttcactcagtcggacctgaatcttcggcaaaggagatggttagaactcatcaaggactatgatgtgggaattcactatcatcctggtaaggctaacgtggttgccgacgctctaagtcggaagagccattgcaatactcttaacgtccgtagctttccacccgagcttaatcaacagatggaagccctgaacctcagcatagttggtcgcggattcttggctgcgttagaagccaagcccaccttgctcgatcaaatccgcgaggctcagaagaatgatccggacatgcatggactcctcaagaatatgaaacagggtaaagccgctggtttcacagaggatgaacacggaaccttatggaacggaaatcgggtatgcgtactagatagcagagaacttaaacagctgatacttcaggaagctcacgaaagtccttattccattcacccgggcagtaccaagatgtacttagacttgaaggagaaatactggtgggtcagcatgaagcgggaaattgcagagtttgtggctctatgtgatgtgtgccagcgtgtcaaggcagaacaccaacgaccggctggacttctccagcctctccaagtgccggaatggaaatgggatgaaattgggatggatttcatcaccggccttccaaaaacccaaggtggatatgactctatatgggtaatagtggatcgattaaccaaggtagctcgattcattcctgtgaagaccacctatggagggaacaaactagcggagctctacttcgctaggatcgtgagtctccatggtattcccaagaaaatcgtatctgataggggaagccaattcacctctcacttttggaagaagctccaagaagagctgggtactcgattgaatttcagcaccgcctatcacccgcagacagatggacagaccgagcgtctaaatcagatcctagaagatatgcttcgcgcatgtgtcctggacttcgggaagacttgggataagagtctcccctatgctgagttctcctacaataacagctatcaagccagcatacaaatggcaccttatgaagcgttgtacgggcgcaaatgccggacaccgctattgtgggaccaagttggagaaagccaagtgttcgggactgatatcctgagagaagctgaagctaaagtcagaatcattcgggataatctaaaggtggcacagtctcggcagaaaagttatgccgataaccgacgccgtgatctggaattcgcagtggatgactttgtgtatcttcgggtcacgccattgcgaggtgtgcacaggtttcagacgaaagggaagcttgcacctcggtatgtgggtcccttccgtatcatcgctcgacgcggagaagttgcttaccagctggagttgcccgcctccttgggcaacgtgcatgatgtgttccatgtgtcgcaactcaagaaatgtcttcgagtgccatccgagcaggccgactcagagcaaattgaagttcgcgaagacttgacctatgtggagaagccagtgaaaatcctggacgccatggagcgcaggaccaggaaccgggtaatccgtttttgcaaggtccagtggagcaaccacgccgaagaagaagctacttgggagcgcgaagacgagctgaaggcagcccatcccgatctcttcgccagttcttccgaatctcggggccgagattccgtttaaggggggtaggtttgtcgcgtcccaaatcgactctaaaatctatcctcgaaattgtgcaaagaataattaaaattcatgtgaaagcctccaacaattaaaatgtgcaaagataaaagtcaaatgaggcttggaggatttttgtatatttcctaaaagcctaaaatgcttaaataaattttagtggaattttcagagcacaaataataattgaaaagaaataaacaaagttaaaaaggttttataaaaagaaaaccctaaaagaagtcctttccccctcctcctcccttcttgggccggctcggcccatttccctctccctctctctctcctctcccgcggcccatcggctccccgcgcgcgcgcgccgctgacaggcgggcccgcccgccgctctcgctgacgggtgggacccacctgtcatctccctcctctcgccgcgcccgccgccagcgcccgtgccctagcgccgccgccgccgcgaatcccgccgctcccgtccgccccgcgtgcaatcaagaggggggaattactccccgtaatcccctcccccgtttccccctctttcccctctctctctccctcggattcgttcgaatcaagcccgtaatcgtcgccggcgcaatcaatggagccgaatcttccgcgcgcgattcctccctctccggccgctctttccttcccccggcgctatttaaaccctccccgagctccgctctttcgtttccgccgctcgccgctcgctctcgccgtcggaatcgtgctcgcgccgtgctcctctctctccgccgtcgccgccgagcttcggttcgccgccgccgccgctccggacttcctcctcactcggcgacccctccgtccgcttcgccgtgttgtcgccgaccccgtccgccgctccgcttcgcccgtcgaccgccggagcaccgtcgtcatcgtcatcccgagccgcgccgccgtcttcttccgctccggccgccgctctcgtcgtcgtcgttgtcccggggtgagccgaagaccgccgttcgccttccccctttcctcctctctctcgggtgccactccgccgcgccgttggtcgccggcggcgaccatcggggcgcgggtgcgcgccactcccgtcggccgcgccggcgaggccgccctcgggcgcgccctcgcggctgccaagtgggcccggccgtcagccgcccgcgcccgcgggtgcggctgacgcgcgggacccacggcgccgaccgccgccagccgcgtgcgcccggtccaccgtggaccgagcggctgacgcgtgggccccccaccccgtggacccggtccgcgcgcccgccccctcggctgacgcaataaacatgatttttaattgaaaattaaatgaagaaattcgcaaatatccatttaaagagcatataaacttcaaatggccatatcttggccatttgaactcggaattggaccgttcaagtctctaatttttccttaagatgtaaagaacccatttttgtgctttgtttttgctgttatgtggagttatttagtgttaaagcctttttctttttccgttggtcgtgtagacgctgcagcttcggaagatccgctcttcgtggaagtcgaagccgtcgagtgggaaaacgagcaaggcaagacacatcatcttgatcatattgaatcccattttataaaattatgttgatttaaattattgcattatcgctttatttaaattcccgcgttatcactgttttacttagccatgcctatttacctttgttatgaccatattattattgttattgttattattattaccttgttcaccctagacaaacaaaacctcaactagtggacactctattcatggttccacaagtatgaatttaggtagatgcttcgctgattaattaggcaacattaggtggttttataactttagacttgggaaattctcatatcacttggatactctggaatggttggcttatgttggaattggacacacacctctcttcctctttcaaaacccctaaaacctgttttcggtggggtttgggtgcatgccagttgtgggaagtagcaccccggccactataaggactaaagctcgggcctctgttgcaaagcactaccgtacttccacatgtctaatgggtaaggcttagtttgtggctcagtctagtcataaacaaaagtacacggattggagatggatgaagtcgggcgtcgatggacattctccagggcaaatgaaggctacacgagctgcggcccggtagtcgagatgtcatacggcggagggttggtgcccaatgctaggggctcagttctgcctgcctgtcccgggtatcccggccgtaggtaggattgggtcggtactcttgtctaaggctaggatgggttggaaactatgtcacgtcttccgtccgtataccgtggtggtatgtggcacgtggcaacacgtgaggaagatgtgtcttgtgggtaaagatgtacacctctgatcagagtaaatctattcgaatagccgagccctcggatatgggcaagcctagcaatgtacccaagtcagtgttataattcttaaaatttgctcaacaactaaaatgtggaatggttggcctgggttggcttgggacgagctgggacccaggtcgggttgccagttcggtctgaatcatcgtaggccttgggttaaggcaggttcgtgagggttcacggccttgatttaataacattggatagttctaggatcgtgtttacaaaatggccttgagcaactaaatgtctttaaatgctgtttactgcaaccctaacccctctatggtatatttcccttgtactcccttgcatttattctgcatttgtgggtgtgtcttgttgagtacggtggttgtactcagtcttgcttaattttcccaagcccagatgaggagctccttgaagatgaaggctttggtgtctagctcgtgcctgccgtcaagtgcctgtggtcgtcgccctagtcttccgctgtttctcgtttgtctttgtgtgttgggccttcgctgcccgtgtaataattttatttacgcttccgcttgttaaactctgaattgtatcaacttttggtgtaccttgcctcctgggacaaggattaatgcacgcacgtaaggaatgcccgttgggttatttccggtcgtgacaagttggtatcagagcctcccttgaccctaggacgagccgtagatcccaagccttagcaatattttcaaaaataaaaatcctttattatttgtgaaaacccgctattctctctttgtcttgctgcttcacttaccatcaaaatctgatcttttaaatgttgcttttcttttgtttgtagatggccggcagcgttacccgtcgtggtttggacatgactggcttcgtcttggagctgcggggcatgtgcgtggtcttggggtatccacatggagtggattaccaggccaggccgctcccggagcaggagggtgaggatgcagagcctcacgctggttgggaggtcactgcagtgatcctctccggctctcccgagcggacttcgctggcagtcaccgcgggtggggactccttccccgccgcttgccagaacgccgctctcctcgccatcggcacccttcaccagcgctacccggacgagttgcagcactcgccctaccgctaccaccctcgtcgcggaggagcccgcgacttcgccaccttccgagacgccagctcggaggatgacgctaccgtcgtgcacctggcacgcatggtggaggcatacgacgcagctcgtatcgacttccatcagatggtgcgtcgtggcatggtggagaacaacatgaagatcctggagctgcgtcaggagaacctgcagctcaagaaggacctcgacgcgttggaggcgcagctgcaccagctcaagatcgcccagggagaggtcagccgtcccaagcgtcgccgcgtctgccgcagccagaagatcaccgcccgcaagagcacctccaggccagagcttgtccgtcagtccctggcgtggacctgcttcgtcgagacccctcgtgccgagcctgcgcccgtggttccccaggagggggaagcctccggcgttggtagctcggagggtgcgctgttgctcaccttccgtcctggcccgtcgcagcggtagacgagcagttagtaggcttgcgcgtgtgtttttcctcgtttgtcttcttgagttgtgtggggcatggttacgccggtgtgtggtgtaactatgtcggagcctgtctttttttgtttgcctaagcaacttgaacattaatgaaccaatttaatagcagtgataaatttaagaataatggtagtcgtgggtggttagttttaatcgtcagctctcctcctctgtttgctggttctgtgtggggttttcagatggtgacgaccaggagaaatgttaacaccggtgaaggcaaccaacccgagggcagcaaccccaacccccaaggcaacccacctccaccaccaccaccagacaccaacgccattctcacccagatcctcgcccaacaagccaacatgatgaatgctttcctccaccacctccaaaacccgccacaacagaatgctccaccaccccctccccaacactccaaactcgccgagttcctccgcatccgcccacctaccttctctagctccaacaaccctgtggatgctttggattggttgcatgccgtggggaagaagctagacacggtgcagtgcagtgatgaggagaaagtcgtcttcgccgcccatcagctgcagggacccgcatctctctggtgggaccacttccaggctacgcagccagagggacagccgattacttgggcccgcttcaccgccgccttccggagaacccatgtgcccgccggagtcgtggctcttaagaaaagggaattccgggagttgaagcaaggcaaccgctccgtgatggagtatttgcatgagttcaacaatctagcccgttaggccccggaggatgtgcgggaagatgaggagaagcaggagaagttcttggcaggaatggaccctgagctgtctgttcgtctagtctctggggactatcctgattttcaacgactggtggacaagagcatccgcttggaggccaagcacaaggaactggaatcgcacaagcgccgcttggcgaacttccgcaatcagcagggtgctaaccagagggtccgctacaccaatccctatccagggggatcctcctcgcagcagcagcagcagcagcaacctcgcccagcgccccgacctcaattcgtggtgcgcgtcccacagccgcagcagcagcagaatcagcaagggactcgtgcgccccgtcctcctacgccaactgtgcagcccgttcaaggccgcagggacgctcaaggtcagcagcgtctgtgcttcaactgtttcgagcccgggcactttgcggataaatgcccgaagccaaggcgtcagcaaggccaagcgcctccccgctccaacaacggcgggaaggatgtcatccgtggtcgtgtgaatcacgtgacggccgaggacgtgctgacaactccagacgtcatcgttggtacgttcctcgtccattccatccctgctacaattttgttcgactctggagcttcccactcgtttatatctgtgccattcgtggggaaaaatcagttgggggtagaaaggcttagaaaccctctgctcatcaccacccctggcggggttatgacagcaaagtattatagccctgccgttcctatagaaattcaggggattccttttccctcggatctgattcttctagacacaaagaacttggatgtgatccttgggatgaattggttggctcaattccaaggagtagtggattgcgcgaggcgcactgtcactctgtaccgagggccagaacaaccggttgttttctttgcacccccaacctctgtcagaagttcagaacttcatcagatagaactgtcagaaatccccatagtcagagagttcggagacgtgtttccggaagaactacctggtatgccgcccaagcgagagattgagttccggatagatcttgctccaggaaccactcctctgtacaagcgaccctaccgtatggcagcaaatgaactggccgaagttaagaaacagttggaagagttgaaagaaaaggggtatatacgtccgagtacttccccttggggtgctcctgtgatttttgtagagaagaaagacaagacgaagaggatgtgcgttgatgtcacgaccggaaataacccaacgggcattccttacgtgcgtgcattaatccttgtcccaggaggcaaggtacaccaaaagttgatacaaatcagagtttaacaagcggaagcgtaaataaaattattacacgggcaacgaaggcccagcacactcaaagacaacgaaaaacagcggaagactagggcgacgaccacaggcacttgacggcaggcacgagctagacaccgaagccttcatcttcaaggagctcctcatctgggcttgggaaaattaagcaagactgagtacaaccaccgtactcaacaagacacacccacaaatgcagaataaatgcaagggagtacaagggaaatataccatagaggggttagggttgcagtaaacagcatttaaagacatttagttgctcagggctattttgtaaacacgatcctagagctatacaatgttattaaatcaaggccgtgaaccctcacgaacctgccttaacccaaggcctacgatgattcagaccgaactggcaacccgacctgggtcccagctcgtcccaagccaacccaggccacccattccacattttagttgttgagcaaattttaagaattataacactgacttgggtacattgctaggcttgcccatatccgagggctcggctattcgaatagatttactctgatcagaggtg

SEQ ID NO: 9670 - DNA, 51717 bp, Oryza sativa
catagaaaagttaaagtccattaaacatcttatgaacactcttaaattcatacatgatactataataaattagataaaatcatagaaattatgagaaaaagataaaatattacatgtttagtagtccgggaaacgttctcactataaactagatgggtaccccgcacattgctgcgggagatttgtgtgataaaatagtagatatgagctgtagaaaaaaaaatcttatttactatatgattttctttcatgtgcttgtatattttgtactttgatcaattattgaaaagttataaatggttgagttgtatggtgtggcttttggggagaagaaatgcaatttgcacccttgatgaatcatccaagggctaaaaacaattaagatgatgtggcttcatgagagaagagagaattagcattagctgcacttagtgggatgaactttacagatatattggacaagggagtagccaatccgataagctatttagaaagctactaaaacgcttaaacgcttaatatgtatactatcaattataacttatgaggtatatccacactaccactatctgctaatccccaaatcatattgcttacgaggtatccatgcacggtgcacctaacgattagctgatatccaaaaagttgcggtatatctcaatggcaataaaattaataaaatagaaataagatgcatgcgcatgtttttttccttcgcatgggatcgagaaaatcaagctgctgatgcaaaggttgtttggttaactgcagtttatttatgcaatgaaagatgatgatttcatctatgtgggttaacaaattttaacattcatattattgctgtactctgtaaaaaattcgtttactgtccaaaattcatttattcgttgtttcacacatgcatttctaacatgtttctgacttatatatttttttcaatcatgtgttggaaagaaccttcaaattctttcaccgagagacaaaagtcatgatattcaaaatcctaataacaaaaattatgatagtttaaataagatgcccgcgcaactgcgcgggctaccttcctagttggataaaaaatggtcgaagctgaaattttagtaacaaaagttgatccaaaccataattcactatatatatatatttaaataaggggtattatttatacttctttgaaacagaggagtggtggtggtttcgccacccccaacctcaccaactgcctactatttgctatactatttttaaatgttggtaatagtggtgacactgaatctatcaccatcacgtgtttcacctttgtatggaccctataatgttggtgaaacttttttgcttctcctatgattaatcaaacagaaatagctctatgcctctactctagctaattcagtaagcatcaaaaactcatggtgaagtatagcttgataggtagatagttttaggatttaaaaatgaatgcaaaagtttattttctaaaaattcagtagtaacgcacgagcaaatcagctagtaacatacggggttagagagcttacatgtggtgaaattgtgggtaataaacagaatgcatcacatcgtggagatggttaacaactagcaaatataaacttactaccatgtattagcactttatgtctggtcccatctattttttaattgtagcatgactcatgtttgaagaatttttcagatgggtcccaccttattatctactttacacatatatatattgtggtgcctcttcatcctactattaccacatggcacgagtctaccttactacctagtttacaataaacattgaggatgtctaaagaaaaaaaaagtcatgggaccaaagaatcgacatgtcagtaataaatatatataaaaagaaaataatggccacaacatactaacattacttctcttttacataaaaatttggtgccaaacacagtgacacggattaaaaggagtacaccataagtatataacctaacatagagttactttcttcggttcacaatgtaagttattttagcatttcctacattcctattgatgttaatgaatctagatagatatatatgtctaaatttattaacattagcatgaatgtgggaaatgctagaatgacttacattgtgaaacggagggagtattagctagtcatcatttgttctcttcaccgaccgaccggttgggtcaacctttctatgtacgctcttatacacgatgtcgtcattatgtgattaacacaagaacgcttgttcgtccctcgcctacaatgaaaacagaaactacaggacgcaggtgactagctctgcgtgtcgccatggtcgcgacaccatgttattttcattaccacagaacaagcatttatatgcatatatatgcccgcattttgccattcatcctccacctctcgccgccaagcagcttcaacaacagcagaagggcagacgtgagaacgatatatacatatatccaacatgcagaggaagtcgagcggcggcggcggcggcggcagcggcatgtgcgacctgccgatggactgcatcgcgtgcattgcctcgctgacgtcgcccggcgacgcgtgccggctggcggcggcggccgcggcgctccggccggtggccgactcggatgacgtgtgggggagcttcctcccgccggagtgggccggcgacggcgacgccctggacggtaagccggggggccgcgagggggagagcaagaaggagatgttcctccgcctctgcgacttgcctgtccttctcgacggcggcaagctggtaatcaaaagccatttaattccttatctgcgttgtttgttaattctttttttttacctttggttccataattattgaagttttgaacacggtttggtcaaacatttataattttgactatcaataattttataaatatttagtttataaaggcacttgagcaatatatatagtagtactatataaaaataaaaatgtatttatttattctatataatataatagaaaaacatagttaaatatatattttagaaactatgtcattgttcaaaacattaggccatttccaatccaatgactagaatggtgtcatagcattaaataaactgccacctaggataaaaaatgaggtgacaagtgaataaatgaggaaagagaaggaaaccacgtcttgcatgggacatagtttctacacaacatccaagacatcatgtgagataagtagcattaaacttaagtatggaatagtgatgtttggaagagtagtgtctagtattagtttcttaattatgtgaagtttatggaaactatatctagtgtcttgggttgggaatagccttatggaaccaaaactagagggaggaagtactatgtactactattgcctcttttgtagggcctgttaagatcaatttgctgtggtaaatttttttggtaaaagttttggtggcaaaagatttggcattgaagtttgttagttggtgtctagatgacttagatgcatggtaaagttttaccattttactagtaaagacagatagagcaatgctcccaacgtattttttggtaaaatttgctactctagacttccaaatgataaatgctaaattgctaacttttgatattagtgtttagatccattttgacaaaaagtactcaaaaacagcaaaacttatgccattttagaggaactaaacagtgccttaatctcgttctatgaaatgtttaaactctgaagctccaaatcttaactgaccaattataagtaaaaataaaggggttgacaggtaaatatggaattaataggtttgtcaaaatatattaataggtggatacaatatattacaaaactatttttatccatttggattttattgaaattctatgtaaattgtaatgattaaaaggaaaattttcatagcatatagtagttatgggtaagtttgtcaaggctattatttaataactgttatttatttaaaactgtattcaaaattgtacgtaaaaaattattgaatatttttattttcaacacatacttgtggacaattattttttctagattaattttgtgaaccttaatatatgttttctattgataaaacacaattacggaatttggaaacttttcttgatatgatctgttcttttaatctagaccttcgtaattcatttcactgactgatagcacatagatagatagatagatagatagatagatagatagatagatagataagaagaatagcacaactaaatacataaatagatagatacttcctacatttcatattataagtcgtttgtcttttgtttctaagtcaaactttattaaatttgatcaagtttataaaaaaattagcaacatctaaaatattaaattaattttattaaatctagaattgaatatattttgataatatgtttgctttgttttagaaatactactatatattttctataaatttgattaaactaaaaaaagtcaaatgacctataatataaaatgaagggagtaatagactagttcataccagttttgccttcacactaacagtactgggcattcagttcactgatatccctgctctcattgcaccagagcttttcgttggagaagcgtagtggtgccaagaaatacatgatgcgagcaagagctctcggttttggatggagcggctatccctacggaggtctcgtctggatacaaaaccatccggattccaggtttgtggttggtgcacaaaaccaatgaagaaatcccacattatatgtgttatttttgcaaggctttacggaattaaatttagaaatatattgtttacctattttttatttaaattgttcggggtgtaattattttgggagaaatatattatcaatatcgcttcgcgaaaacgaggacgtggacagtacgtggcggcgcgagaccgagcggtcttgcgcagccataccgcgagaccccgctgaaccagtcggcgatcccggactgccatgccaattcatatggttaattaattagtgattaattatcatcataaatcaggtaattaatcactaattagacggcaccgttggacaagaagttcggtctcgttggttccttatgcgagaccgttcggtctcagctgtttcctcgcacaagaccgtgcggtctcgcatctttgccgtgcgagatcgcccgtgtcgttacgcctacatcatttttacgcaacggttatgcgaggtcgacggtatatttccgccaaaacatttacattccgaatatttataagaaaaaaacaaatcaacagtatgttttcaaatttaattctggctttatgtaaatatcatttactactatctccgtcccaaaatgtaacacctttggctatgaatctggacgcacggtcatccagattaatagctaaaaatgcttatatttgggacggagggagtacaaaatatcatgcatttccttcttgaatactaagagtattatcatccgtagaaatgatcttaagtgttgatttatgaattctgctatcagtagatatggtccatattgattagaaaatctagattggttctactaccacagaacattgtaaacatgtctttttttttgtcatgggatgtactccttgttgatttttctctcccataaatagcagacaacccttctgacgattatatgtccattattttcccttctttatttctaggttttctgaggtggccatcctctcccacttgtgttggttggacatctatggtatcttcaacacaaagcatctctcaaacggtacatcctacggagcttatcttgtgtacaatgtccaattcttgcacacagaagatcaaaatggaggctacaaagaacaagatgcaacagcatctgggtcatcatccacctccagcatttgcagtcatgaatgcaaccatcttatgccgcagaaacatctgcgctcactgttgttcaacatggattatgatggatcatcatttgtaaaaaccaacaataaccagaagaaagaactgaaatatgtaggcatttgtgtaagaagtgatggatggatggagcaggaaattagtacagagatatcagtggtaaaacagaacaatgaagagaatggagacatttctattgagtttaggggcttaaccggatcgcaccaatgccaaattattgtagaggggatcgaaattaggccgaagaactaacggttctccagttcatggataatcatgtcagctttcctagttggcgcagacgccaaaaatcttgggtactttcttatatatcatgaaaggtttatatttgggtaatctttggaaataaaacagttgatgatctaaaagtagtggagtattcattttgatgatctctacctttctctcttctttgttcttccaccgctggagaagtgatcttcagatctagtttacaacgcctttagtcctaggttacaaaccgagactccgatgagcattttttaagtaccggttgaaataactgggactaaagattcatctttagtcacagttggtggtgctaccaactttagtccagattggtgttaccaaccgggactaaagttctttttctttctttttctattgttctttgctgcttgcatctattgattttgagccgaaatcaccgacgccgtcaccccaaatccccacaaatcatccacaatttataggcccatctataaaatcatccacaaatcactggcccatccacaaaatcttcccaaatctaaaaaaatctataataaaatctaaaaacaaatcagtcatagccagcagacgggggtgaggaggaggagggccccgcccggccgccgccgccgcctcctccaccgggctgccacccggccaccctcccatcctatcgcctcccctcccgccggatctggcagaggggaggccgccgcctcgtgcgccgttgcccgcctctcccgccggctcctctcccgcccgatccgacgcaagggagggtgtcgccgtggagatgggagagggagaggggaaggggaggaggggatcagacgagaggggagggggaggaggagtggaggaggaggagaagaaggcgtgaagaggggaggaggaggaggaggaggggataaggcgttgttgccgatgccgagataaggaagagagagagagggggagagagagtgagagatgccaatgacgtgggagagagatatctaatcccggttaccaaccgggattaaagatataattttttttgtcccggttggtaacgaaactagactaaagatggacttttgaaccaggactaaagatgaattagtcccagtttgttgaaaccgggactaatgtgattgtggagattatggatatcccatatctacacggcgatgatatttgggctgaatataggataccgaatatagatagaatatcttatttgtatctcgggtttgtttctcaacttgtacatcaaggaaataccttgagacttagtcggttacgactgtattttatctgtatctgcatattccgttagggatatagattatcttttgtaacacggactccctcccatatataaggggggtccgggtgcctctaggggcagaggttgattttctccaaattatacaatcaataagacactcggcggattcatccccggacaggagtagggtattacttcttgaataagaaggcctgaacctgtataaatcttttgtctccaaacccatacacttctccagcttgatagccacccccttttattattgccgaaatctagtttcgacagttggcgcgccaggtaggggttgcgtcaagcttttcgccgatcagtgcaatgggttccgtctccggcatcgacgacctcgtcttcccacctgggcagacgtttcggttcggcagcctcgacttcgtcaccaacaacttcggcaagatctctctccttgactcggtgtcagaccagtcgggagagaaccggatttcagtcccgtttggactcccaaacgcggctgaaagttacttcaagaccatctcaatcgagttggcttcaaaccacttgggtgagatcgcatcttctccaacgtcaccagatcaagatgatggggcttacccaccgatcctgatgaagctccccgacgatttggcggccgtctccatcacgacagcgtctccatcccgtaggcctaggcggaagtcggcttcaacaccgatttcgcctagcttcagggaagtcggcgtcatcctccaaccactcggcacggtttcgacggatcagctggatggctactacagctctcccaccgtcgactcgcgccccaccgacatcgtggagtacgacgagtttagctctcgctacaacgacccggatctcgacgacttcgacggaagcctagatgacaactacacccctctctacttcggcgtcttcatggccgatgacgagacggaggagcaacgccaagcccgggagaccgaagcacgtcgcgagactgagcgtcgccgactggaggaggagcatcaagcacaagaacaagaacggctacggcgtgagcagcaggagcgtgagcggaccgcgaaggaggctgaggatcgacggcagcgagctttggaagcagggcgccgagcgcgtgatctcatcggccaacaagatgttgaagggacaccggttttccgcacccctcaacagaatgcggttgccgcgatcaccctcctcgacacccttctcaaggaaaacgagctcaatcaatctgatcacgtcgtcaacatcttgaaccagacgaagaccatgattgcggcttcggtcccagttaactccgaaagcgtccatacgccgaccggcagccgagtcccccacttccgatctcatgactaccgtcatccaagcctcagcatcaccggcgcaggatccaatcgcaggagcaggggtcacgacgagcggtccgttcactcacctcccgaccatcatagggagcgccgagtggaacggcctcgctcaccacctcgtcgccgccccgtcgatcttcgcgacacaatcatacagcgccgagcagctcgaggccatcatcattcgccggaccgccacgacgacgaccttgacggagtagcagccttcaccgacgacctgcgtcgagtggattggccagccggcttcaagccgactggaatagagaagtacgacggtaccactaacccagaatcgtggcttaccgtctacggtctcgcaatccgcgcagcaggaggagacagcaaggccatggcgaactatttaccagtggctttagcggattccgcccgatcttggctccatggattgccccgtggtacaattggatcttgggctgaattacgcgaccacttcatcgccaacttccaaggcaccttcgagcgtcccggcacacaatacgacctctacaacgttattcagaagtccggagaatcccttcgagattacatccgacgattttccgaacaacgtaacaagatctccgacatcaccgacgacgttatcatcgccgcattcaccaaagggattcgccacgaagaattggtcggcaagttcgggcgtaagcctcccaggacagtcaagcttatgtttgaaaaagccaacgagtacgccaaagccgaagacgccgtcaccgcatcaaagcagtcgggtcccagttggaagccaaacaagggtacgccggctacgggaggaggtggaagtaacaaccataaggaccgcaagcgtaagcctgaggaacttgtcgcaaccgccactcactcttctcgacagcgttcgcgcgtcaacacgttcgacaagatcatgaactcccaatgcccgcaccatcctaactccaaccacgtggccaaagattgtttcgtctacaagcagtttgcggagcaatacaccaagactacacggaaaaactctgacgaagaacaaagcacgtcgaggaagaaggacgacggcgacaccccggcaggatttcaagaccaccgcaaggagctcaaccatatcttcggcggccccctggcttatgagtctaaaaggaagcaaaagttgactgaacgggagatcaatgctgttcagcccgacacgccccagtatcttcgatggtcagaaattgcaatcaagtttgaccgctcggatcatcctgaccgagtggtccatccggggcggtaccccctggtactagacccagtggtccgtaatgtcaagcttcgcagaaccctcatcgacggtggcagtgcactcaatatcctcttcgctaagaccttggatgatatgcagatccctcgctccgagctaaaaccaagcaatgcgccttttcacggagtaattccaggattatccgcaactccactcggccagatcatcctcccggtcacttttggcactcgggaaaacttccgcacagagaatatcagctttgaagtcgccgatttcgagacagcataccatgccatactcggacgcccggcgttagccaagtttatggccgtcccgcactacacttacatgatgatgaagatgcctggtccccgaggagtcctatccctacggagcgacatcaagcaagccgtcacatgcgacaaggagagttgcgacatggcccaaacccgcgagatggcgtcagcccgagaggatatccgactggctgcagccacggcgagcgaaggagaagtgcccgctaccaagatctcaaaaagtggagaaagcgaagccaagactaaaaagattcccctagatccttctgattctactaaaactgctgtaataggtgccgagttagattgtaaataggaaagcgcgctcatcacctttcttcagaacaataaagatatctttgcgtggaaaccatctgatatgcccggtattcctagagaggtgattgagcactccttacatgtcaaacaagatgccaagcctatcaaacaacgactccgccgattcgcacaagacaggaaggacgcgatcaaggaggaattaaccaagctgttagcggcaggcttcattaaagaagtccttcatcccgactggctggcaaacccggttctagtacggaagaaaacggggcaatggcgcatgtgtgttgattatactgacctcaacaaatcttgccctaaagatccttttgggttgcctcgcattgaccaggtagtcgactcgaccgctggctgtgagcttctcagttttttggactgctactcggggtatcatcagatccgactgaaggaatccgactgcttgaagacttcattcatcacgccctttggagcatactgctacgtcaccatgccgttcggactaaaaaacgcaggagcaacttatcaacgtatgatccagagatgcttctcaacgcagatcggccgcaacgttgaagcctatgtggatgatgtagttgtcaagaccaagcaaaaggatgatttgatctcggatctagaagaaaccttcgcgagcatccgcgctttcaggatgaaattaaaccctgaaaagtgcaccttcggagtaccgtcagggaagctgcttggttttatggtgtctcataggggcatccaagccaacccggagaaagttactgctatcctcaacatgaaaccgccaagtacccagaaagatgttcagaagctgactggatgcatggcggcgctcagccgatttgtttcaagacttggcgagcgggggatgcccttctttaagctactaaagaaaacagacgatttccagtggggacccgaagcacagaaggccttcgaagatttcaagaaactcctcaccgagccaccggtcttagcctcaccatacccgcaggagccgttgttgttgtatgtagcagccacctccaggttgtgagcacagtcttggtcgttgagcgcgaggaagaaggccatgtccagaaagtccagcgaccgatttactttgtcagcgaggtcctagccgactccaaaacgaggtaccctcaggttcagaagctgttatatggtattctaattactaccaggaagctatctcactactttcaaggtcactcggtaacggtggtcacatcatttccactcggtgatatactgcacaaccgcgaagcaaatggacggattgctaagtgggctttggagttgatgtctttggacatatcattcaagccccgaatttcaatcaagtcccaagcgttagctgattttgtcgccgaatggaccgagtgccaggaggatacccccgcggagaagatggagcactggaccatgcattttgacggatcaaaacgactttcgggcactggagcaggagtagttttgatttccccaactggagaaagattaagctatgtgctttggatacatttttcggcatcccacaacgttgccgagtatgaggcgctccttcatggactgcggattgcaatttccctagggataaagcgtctaatagttcgaggcgattcacagctggttgtcaaccaggttatgaaagagtggtcctgccttgacgacaatatgatggcatatcgacaagaggtacgcaaattggaagacaagttcgatggactcgagctcagtcacgttcttcgacacaacaatgaagccgccgacagacttgccaactttggatccaagcgcgaggtggcgccctccgatgttttcgtcgaacacctttatacgccgacagtacctcacaaagatactactcaagttgcgggcactcatgatgtagctatggttgaagccgattggcgagagcccctcatacgatttttgacttctcaagaactcccccaagataaagatgaagccgagcggatttcaaggcggagcaaactttacgttatgcatgaagctgagttgtacaagaaaagcccttcagggattctgcaacgctgcgtatctttagaggaagggagacaattgctgaaagacatacattctgggatatgcggaaaccatgctgccgcacgcaccattgtcggcaaagcttaccggcagggttttttttggcctactgcagtgtccgacgccgacaaaattgtgcgcacgtgcgaaggttgccaatttttcgccagacaaattcatctaccagctcaagagttgcagaccatcccactgtcttggccgtttgcggtttgggggctcgacatggttggcccgtttaaaaaggcagtcggcggttacacgcacctctttgtggccattgataaattctccaagtggattgaagctaaaccggttgtcacaatcacagcagataacgctcgagacttcttcatcaacattgtgcatagatttggagtgcccaatcggatcatcactgataatggcagataattcactggcggagtttttaaagacttttgtgaagactttggaattaagatctgctatgcctcagtggtgcctcccatgagcaatggacaggtggagcgagccaatggcatgatacttcaagggattaaagcgcgtgtttttgaccggctaaaaccctatgccggcaaatgggtgaaacagctgccatcagtactttggtctttgcgaactacacccagtcgggccacaggccagtcaccttttttccttgtttatggggcagaagcaatgttgccgagtgaagttgaattcgagtctttgcgctttcgaaatttccgtgaagaacgctacgaagaggaccgagtggatgacttgcaccgattggaagaagtccgcgaaacggctttgattcagtcggctcgatacttacaagggctgcgacgttatcataatcgcaatgttcgatcccgtgcctttctagtcggcgacctggttttgaggaaaattcaaactacacaagatcggcacaagttatctcctctatgggaagggccatttatcatctctgaagtcacccgaccaggttcctatcgactcaagcgcgaagacggtacacttgtcgacaactcttggaacattgaacatcttcgtcgtttctacgcttaagcttatcattgtacttccctatcttgactgtcaacatcaagttttcttcttgacgttgtcagtcaggggctatcatcataataatggagtgtgattttttatcactttaatttgcttacttggtctatcattgccttgtttggtttttctacttagtctgcgaggactgaaagtttttaatagcttatttgggttttaggctcaacaaagcttgataaaagcttttaagaaatcaaagacttggctagatttatcaagcacagcataaatacaccagtattgtacaagttatgcctccatttgctacatttatactcagtcagaatcagtcttttcatcatcagagttattactacttggctgaaggtcggtattgcggaattgatctacaacgtcacttgcaatcttgtcagccgcgttttgagcattgctgataagatcaagagcagcttcttcgcttgtcccgtctgcaaagccatcaatggcgtcaatttcaatccttgggtacaaggatttggtcatcgccaatgccatgctagctcccatacttccagctttcttgatattcttgaaatatacatccggagcaactctcagcttgtcgaagatttcggttgcgtcgagtgcactcggaccactgttattgaggaacatagcttggacgagtggtgtagcgacattagcgacttcatctcttgctccttcaagcctcttgatcttaccaaccaggacgtcaaattgagcttgagatttgattttgcggtctacaaaacacatttatgatcaaaatctactgcattaaaaagagagaagttcagattgttagctggcagtaccttcaacctccttcaaggccgagtccctttgcgcagccagtcctaccttgtctctttccagggctttaatttgtttctccatttgagccattctggcggcttgcgctgtttgaaatccaaatggttgaggatacagttacgacagcgtaaattaatggggcagatctagagattaccttttgatgaaccactcagctcgaagtttgaatcctggagctgagcaattcggtcccttaattccttctctgtctttttggcgagctccttggcctcatgtagctgatccctaactgcttcaagagttcccaaatgaggaaccagcttttctaaagttacggtcttggcctcattgcgaagatggattctctgcatgatgattcatggtttagttttgctgaagagaaaacaaagtcatcaaaggcagtcacccggaagatttacattcacaatgcgagtggcttctccaagtgccttcttcagctggcacacttcctcatcttctttttgacgatttatgacgatgccggcagcttgtgagttctcgtcccaccatttgagcaagataggaggacgagagtcatcagtcacctttatgcgaggaatttcttcttcgtcatcgcctggtggtcctgatgtatttccaagacattagacaaataagctgaagttatttaaatcggcatcacttgagaagatgagttacttgaggatgttcctagctgagcgtggggagatccttgttctttatctggagacccgatcatcgagtcgttaccagcctccggttcttgagaagttgtcgtctgcgcttcaacttcgggagtttcttgatctagacctacatccgactggtttccagtcgggggctcttgggttgttgtagtttcagttgctgccgactggtttccagtcggaggctggtcactcggattggcattatcacctgaagtatgggcgccagtcggctggctttcggcagtcggctcagaatccttggatgaacttggttctgtcacagtcggatcaggatcttttccagttggatctatgtcggatggtttcctgcaaagtgttctttcaatattcagtattatttccatgagagaagcatgtcgaagtgaaatggtaccaagaggtttatacctggaagatgttctaatctttggccttggacgactagccagttttttcctgggagtggtatgctttgggagtttattgggcgagcctttgtccccagatttgttgccgtcatcaccttcgtcgtcattaagcaccagctttctcttgcgagaacttatctgcccagtcggattggaggtttgaggttgcggatctgatctgattgtcggccctccacctccctgaacggtgtgctggcgaggagaccggcgctgagtgattggggggtcagacttcatcaatacatattcctgaatgagatgcctccacggttagttaactcaatatgaagacaagattatgttttggtcatgagttgaagatttcggatacgtacctgcggaggcagattgaatgcgttatatggcacaactggcagctgatgtgagtagctgacgacgatagcgtttgagaagattttatacattctctccttcatgattttaaaatccagagaatctggttcttcacgattaggatcatgattgccatcaaactcgaatgctgcacgggatctttctttaattggtgccagtcggcatttgatgaagtgccgagtaatctgctctccttgtaagccttgttctttgagttttagcatgcgatccatcagctccaaggcttgggctgcttcatccccaatcggaagcgagttccaggtatcttggtacaccggaggaagacaagagtactcgggaagagcaggctcaggattctgaatataaaaccagtttgcatgccaccctttgtttgaggtcttgaagggcatagagaaatacttctggctcagagtccccctcagctgaaatccggcccctccgactacacatggcttactcttgtttggttggggcttgagaaagaagattcggcgaaacagagcgaagtggggcttaattcccaagaaggcttcacaaacatggacgaaattggcgatgtggactatggaatttgggtttaggtgatgcaagctgattccatagaagcttaatatcccgcggaaaaattttgaggtcggaagagcgaagccgccatagaagaaatgggagaagaccacaacctcgtgtgtatcgggggtcggaaaagcctcaccacatgctggccgccacccgatgatttccttggcagggagaacgccgtgcgccaccatctccttcaggttctcctccgtgacgtcggatggcgcccattggccttcaaagctttccttctcttccgccattaatttcacccgaatgtgctgatttgattcgagggatggctggggagaagtgagggattgaggcggtggatcacgggaaggattttgatgaacttttcgaaggtggattcgagtggaatggtgaaccctagtttgccggcgcagctttgtactgtagcagggagtggggaaaatggcgagagttccggcggggaagatgaagagtcgcttggatcttgggttttcttgttaagggtatcggaggtgcaaatgggcttaggcctgaacagtacctcagcccagtacttttaacagcgtggcccattgtgctccttagggacttaggcatttttttttgctttggcaatttatgcgcacaatagtgttgcccaatgctgataaaatcctttttacgcggtcatataattctttggaattattgcaatgcaaattaaaatgtgcccgacagaaaggtgttatgctgtttttgtaagcttttttaggctacaaaagctgtctgggttaacttggaatggcttgtttttaccatagtcatttccctggtatgttatatgcctgttttcattatggtaaatagtcatagcctaggctattagacttattcattaccataatttttataatatttggtgggtaatctttagagttttttattcggatgcctgtcaagtgtgttcattcgtgaaccttttagagtgttaaccactcggattccttttaattgtggctaaaaagcagtcggctaagaatgcctctttaggcgccgtgtatgcttttgtcatatgatgcatgattgtgctattattttgttctcaactatatgtttagtttgttaactaatcacatagttgggggctacacctaattaggtgcatctattcgatgcaccatattctttatcttttcgccctttacagtcttcgtcttcgctactcggcaggccttggcatgaaaagtttgaagcactcggattattatctttgagaaggctatgatggttgactgcaaaggtctcgggggctactgtggagattatggatatcccatatctacacggcgatgatatttgggctgaatataggataccgaatatagatagaatatcttatttgtatctcgggtttgtttctcaacttgtacatcaaggaaataccttgagacttagtcggttacgactgtattttatctgtatctgcatattccgttagggatatagattatcttttgtaacacggactccctcccatatataaggggggtccgggtgcctctaggggcagaggttgattttctccaaattatacaatcaataagacactcggcggattcatccccggacaggagtagggtattacttcttgaataagaaggcctgaacctgtataaatcttttgtctccaaacccatacacttctccagcttgatagccacccccttttattattgccgaaatctagtttcgacaatgatttttgccatccagataaagatcaattctccagtagtgttccttccaaatataaaattctaactatcattaaccttttttttatcattttcttatcacacctgatttaatttttacaacatgagatatcatcccttgaaactaattatctcacagatgctcaaaacacaattaatcgacaacactacccatctcgcccatatatgtatccgctctcacttctcctggagcttgaagaaggccatgagaggcgcatacaccctctccccggcgttccgggccatgacgaagtcggcgtgcgcgtagtcggcgaggtactgcacggtgagcttgtcgccgtcgcgcgagtgcgactggcccagggcccgcaggaggcggctcacgtcctggacgtcggagaggctgtccctgccgccgtagctgaggaagagagggaagtcgcccgggatcgccgtcacgtcgtacgctggcggcgtcgcctgcccgtagtgctccctgttgtcgccggcattgccgtagtcgtacttggcgatcgtgcctcctctaatcactgcttggcacaagcattttggttttaggaaaaatgcggataagatattatatttttcagcgtaaaatttaatatctctatatagctatgccaaaattattgcacatctttctggagtataggtatttgattttagaaaaaaataatatggacacttgaaataaaaagtatgatgataagttttttttagtgcgaaggtattgacgtatctagttaataattgtatggtttctcaagagatatcgggcagtaacacaattttaatgttgatttgttatactacctcttgttatcttcgtcatattatagagtgatgattatgtatctcgtgacaccctctcaaagccctcaaaaattctctaaatactgatgctaaaagtgtggtaccttgtgttaccttctcaaatactacggatgactaaagatgggaaaactgtcatattctttcaggtggtaggattctttaaaaatcatttgtacagactatttgtcagttctcatactcactctgagccaggtggatcatgttcttggtggctgtagcttgaggctcatgggcaaggaagacctgaacagaggagttgtcgaggcagcagttgtcacctgctccaatcgtcaaaatgcaggtcaataacatattagatttgaaaaaagaacacaattatattcggtcgtgacaacttatgcatatagctactattacctgtgaatgctgacatcagattgtagcaatcgatgcctggttgcttgcaaatgtcagtgaccaagctgtgaacgtattctctgcatagaaatataaattgtcacttgtcagcaagaaatgaatgaacagtaataaacacaattcaccaaacctcgtaaatatcgatataaataggaattctgaaaacatcttggtctgaagattggagaaatcgaaggcttgaaactaccttaaaattccacggtacttgagaggtaaaaaactatcaattgtttttaaaaaaattggtacccataattaccgaaggtactgagagatactaaaattttttaacatttaaaaatatggtatcttctggtactttattaaggactgtaaaatcactcaatttgaaattgtattttgtttaaaatttctgatttttttagaacttatttctgaaattttagatctaccgttggaccctacaagtgcctgtagcaaacagaactgcatttgctcgaatgaagcctatactatttgttcaaatttagcaaactaaacttcaaactttatctgaaaattcctttcatctccttgaattttttgaaactcggttttctgaaaagcaatgggaagaaattgagctttaccctgtaggatcgaactcactgagccccagccagtagagtgcctgcacaagcagagaacacacagaatcaatcagcaagctagcccgtttaatggccacgccattcgtcgtcgtagtcgtcggcgtcggcggcgtcagctccggcgaacttacctcagccaagaagacgtcggccgccgcgcgcgccagcggcgacgacatcttgtcgaggaaggcgatggggctgagcagaccggccgaccgcagcatcccgatctgctgctgctgatcgctcagggcagccaacgcgatcaacgtgccctgcatccacagttcagaagatcaaccaagggcaaaggatcgatttgtctgtgtgcctaaacttggtggttgattatcgagcggattatctactcaatcaattatagtgataaatttaatattttaaaaaataaacttgatatatagtttaaaataagttgtctaagcaatactgtagaagtacgtttacgtttaagagaacatatttgttcagaacgtgaagtacataatccgtttaaataagctgaaaaatagagttaagttaaaaattttttaaggatgaccaaaattcgtttggctgcgggaatttttacccatgtggtactgaaactgaaatgcattttttttttgttcctaacgccatttcacttaccaaagagtggcctacgtagtgcatcttctgctggccggcttggctgtacacgtactgcactactgctgataggtccttgctggacagctcgtcccatgaccagttccagtatgcctaggtttcatatgccaataaatttgtaaaatttcccattttaattagcggcataagcaagagcaagtaaaataaacacaaaagtattagtcctaagacgcaacataggttcagacgataaggtgaaatagagaagggatgagggagaggagccgtgtctactagtagtataatattttatatgaacaggctgatcgagagttttttcttcacgggaatccaataattataattttcttttctgaacaaacaaccaaataatatttctatttccaaacaaactaacccgaactgtcgagcgcacgctgtgcactgaatccttgtagtagcaagtatccataaaattaaataagtgtacaccataagattggcatgatacgatcatagataaatagataaagagtagcgtcctcaaaataaggtacgtctatattgcataataagtgagtgaagtctggacggtagagaatcagactataaaagtattaaagaattaattgataataatgtattgtatgtactggagagaatatatatactattttcagcttaactaatccctaatcaaaaggagcacgggtctttgcccgtgacccataacaacctctttttttttcttatataacaatacattttgttaatcatgtgtattatttacatcattagatggctatcatctcaaatttctaaaatattacttaatacttttaagatagatagtttgtttctcattttgctaagatctactccctccgtcccagaatatagcaacctatgatcggatgggacgtatcctaatactacgaatctgaacatcccggagaagttttttttctaattgttgcctatttatttagacttttcgcctagaagatattatcaccgtttatgatccatttgcacagtattcttatcgctaaatctattatatactaaaagtccattaaacttcattcaaacgctctcaagtcagcacgtgacactcctacaaacgctccaaggtcgtcatgtggcactttaaaaatcataaaaaatctaagaaaaaaataaaacatctagccattgattttcatttaatctggtaggaccattatttttaaccattagatctatcctctaaattaacaatcaaatttatatctccaaagatctaaattgttccatatctgtacgtgagtacgtacatttgtatcccgaaacccacacccgacccaaaaaaaattgtacgtgcacttctctttcctttttttttaatttctcacttagttgaaaaaccaatctaataattagcacatcttaactataatttaagttgtaaaaataaaaatatatgttatttcaagttatgttcaaataaaaaatatatctcatggaaacattcatgaaaaatataaataaattaaaattatagatatatcacttaacaacatgtataattctattagatttttatttttaaaagtaaaacaacttcgactgtgagtagcattctcaaaatttactcaatacctactagaaaaaaatattgatatgttaaaatgacattactaaatttattttgaatagtttcttttcatatattgctagaaaatcaacgacgaaatatattcttttgataccgtgtcgatgtcttttatctcctacctaggctttcaatggatctggctgagtttatttaggacacacaaaatgatgcacgtcataaaaaaaggattaattaggtattaaatattacaaaattgaaaatgggtttatttcatgttttaaaaatacttttgtatagaaagtatttagaaaacacgcatcgtttagctcaagaaacttctgtagtttgggaaacacgctcatcttaaataacaaagtagccaatcagataagcactttcgaagtcaaccttacatactaaaacacttaatatgaagtacataatatactttgtcaatcaggaacaagccaaatatatcaatcttatgctcccactaatcctatgtatataagttatatatagaaaccactgtccaccaatcgccaagtcataatagttatgaggcatccatgcattgtgcaactaataattagctgataaccaataagcacatgtgttatcaagtacaaaagataaaggaagtactaagtgagaaccatcaataaatgatatgtaagtagagatacaccaagctggaacaaataatagttgattacaagtagactacgactattatcaatagtgttcctacacacctgcatatacttctaagataccacaaagacactctaataaaatagagaaaatgtaagaaaattataataaatagaaaaaaacatttagccattgatttacacttagactagtggatccattattatcaaccattagaatatatctatgtaatccctcactcctaaataccggctaatccctccctatgtacgtacgtacacaagagatgtcaaaaagaagaaaaagtgtgtataatcaactcatcaagtagttttctctttctttctttgcagctctaaggttttttctgaaattatgtatatatatagtgaccacttctggtgaggttgtcgaagaagccacgccgctgcagtgctgcttcacaccatcccaccaaatctcttcaaagtatttattttaataatggtataaaagggaattgtgagcactcatataaatacatgcacatccaacttataaatacaattacacacctatcttatcagagaaaaatatttatcaaaaaaggaaaaagtacattcgtacaggtgactactatttgctagaaaaaacatacatacttacaataaaaaatatcacatggaaccacattatatcccatttaattatgacattctcatccaaatagtgttgataattagcacaaataattttgccaataaagattattccatcgtatattacctatgaatatgcatagatgaatcggatgtataatgaaagagaaaacaaacacatattaactcatacttttgtgaagaatgatgataggcgagttcacatataactgggatataaatatttctatatttactattacaatctattttcttataaaaaatagtgagatctgacttcttttagtattctttttacaaacaattaaataaatttcccgcgcatctgcgcgggttttctttctagttgaaataaacaagtatatgcaatatggcaatctgcctattgttcttttgtgttataatgttcttttacattgatacgatatattattacctacaaaaaaccactatttttgtttataatcgtgattgatcagttgtcaagttggcccctcatgtttaaatcttggcttcaccaatgcatgttaccatgatatggtactcctaacttttaaacataactttgtatagacatgtgttttaattttatagccaaatgttggttacgttagagaataaattgaagaatgtaccgagtcactagagacgagcgaagtgtggtggcggctatagacggtgccacggctattggcaatccagacatcgtacccattgtccgctagaatgtatcctagcgactcattgggcgagttcataagccaagtcaccccatcctgcaaagcaaacagtaattaactttggtgcaaaacatataggctctatccataacattaatttcctatctatcccatcaactgaatatatttttgtcgtaaaatcaagacaagtaagactaattcaatatttggcttcgaaaattctttaaaagatcattttttaaaacaaaattctcaaccacttgatttaactactcacagattctaaatttattcacacaccaatgtttacgtgctgttaattcctccacacgtaccatcatgagtccgtgctgcagaagcaccggcaccttgcctccgccgccgccgccggctgccgtctcgccgcggccgctcgggatcctctgcaggcttaggatgtacccatcttccgtcgtcacctgcacaaattattcccccaaatcaatcgattaattaattactataacacccgatcattctcaatttctcatcacgattgagtgctccgattacgatgatcacacgtatatacaccatccgtcccacaaagactagatatttgtgtttaacatttaaccgttcatcttatttaaaaaacttatgaaaaaaataaaaaaaatagccacgcgtaaagtcacctaataacaatcatataaaatttttaagtaagacgaagaaacaaaagatatatcaaaaacaaaaaaatagagtgtctgtgaaatcaacccgatgcattataaattaagcaattgattaattaccgtgtgctcttcacacgcgtagccaaacggtgccacccttgactggcacgtgccattggccgccgccacacgcgacgtcgacgacgacgtcccggcgatcggagccagccatgctgcagctgctgctgctgcgacggcgaggataattgttgccagagcctgcaggaggctaattggctgcaaaccgcatctgttgcctcctcctggcattgttttgtatagtgacagtgtgtgtgatcagtaagtagtatggttcgatgtgaaattaatttcagtttggtttcctgctgtgataaccttttatagctggatgactaggattatatcaggattaatttagttatgtacgtccatatgtgtgttctatgcatgtatattatatcgtctgtcattttcttcttggattaacgtgcgggcgcttcatgcgagatattatacatacatatgtgtacattgtgtcagagtcatatctcaatctataataaactactccagcttgcaggacgtttgttacaatttatttttcttacatgttgattttctttttaagaaatgggaaaataactatttccaatcaatagagataactaaaatatatgtcaatcaattctttggctctcttaataaaacatcaaatttagccattttcttagtaatgtccctccagtcaaaaatttcgctttaattcatgcaaattttgacccctcccacatgaggatgttaaggtggaccagtgattagcagggaagttgcaaagaaaatagtagttaaagcagcttttttattagaaacactcaattattgaatgacaattaattaattagctaatcctatatatctatatagttaatccccacttagtgcaattaatatgattttcctgcaatgtggttgttccacgtcaccttgattgcttttgaactgttggattgaagttatacggtaggattagatcgtttttgattggtctgctgctgtaaaacgtgagttgaaccatggtccaggcccaccaggcaaagcattgaaatttctcgcgtgcatgtgcgtctctgtgtcttccaagcgcctcatcttttccaataccgttgatctagctcgccccactataaattcttcattgacgtggtctacagaatcacaggtactatttttttacctcttttccagttcttgtgctttgcctcttctgatcgactgttcatgttcttctttttatttgctttcttaaactgccacatgctatattgccaatctttgtttcttttgagattatgttttccgattattgcatcatatatcatgtaaaattatgctaattatactcttctcatattaatcttataatatagctttgtcatcatatattttccatatgaatagatgcagaaatctatttgattccagattcaatagtgagccaaaagcccacaggttagactactaaactccctgtttattaagtttgcatcattttaagacacggtaagcataatataggcctaccatctcctttcttgacttttcaagttatattttggtaaaatagacagtttacctgtttatttaggttgcaaacaaaattagaaaatctcttcaaaggaaatgaaaggattgccaaggtagcccctcagcttcatgaagaaataaatgttaattaagaaggcatatgtttattagacaacatttttttttcctcttggagagatgaacagtgcccatgattttcctgctctttccttgattacctaagtaacatatgggtacccgcgcgttgctgctctttccttgattacctaagtaacatatgtgataatatagtatatgtgagttctaaaattttctttcctacctactatataattttttccatgtgtttatatattttttttacctttatcagttatccaaaggttataaatgattaggttgtatggtgtgccttttagaaaaaaagagatgcaatttatacacccttgatgaattatccaaagtctagaaacaattgagatgatatgaagatatgcaatttacaaccttgataaatcatctaaaggttaaaaataattgaggtgatatagcttcacgacagaaaagaaaattagcactaactacacttagttgggatgaactaagtgttgcgttttctagataagtggtattaaatacaaagatagagactactgaaacagtctagttaactaactttagaatatgggttgtatactttttagcacatagcatttcttctttcaattagtgaacaagccaccttacatttctttactgtcatacatttatataaataagtttccgcagcaacgcgcggagtaattttctagtatcaattaagacgcaaatcactaaatccatatatattgaatggcatatgaaataatcaaacaaacaacttcgtatatatgcagtagattttcgtttctattacacaagagacacacatgtatgtaggtgagttggtacatgtgtaggtgagttggtaaagataggtgcacgtgagggagatgtctcgggatcaaatccctacctgacaaaaattatatttgacttagaaaaaaagttactagtggttggggcttcgtatatgttgagattataggcatataatgatttaatatattccataaataaatcatggcattgcagatatatactagcattaacgcatcattagatctacacatgtaaactaagcagtaaaacatgaacagatcaaatatgcgcaacatattgaacacgtaccgaggtggtagaaagaccggctactcggcaggaacttttcgtgattgcaggcgtctacgaaggcgcgcaacacgcgagcgaagaggaagacgagccgtcgcggacgaacagggagcagtcgcgctaagcgcttcccaaaaaccttattgtcgccttctcccggtgcaggacgtcgaaggcagaggttccggagacctgctctcccgattgccggtgcacgccggcgagcgggatagagtaatctacgagcgacggcgtagcacagagtaggaggcaaaccctagattgattttgcgtgtgttgcgtgaagacggcgggtcggtttatatagagaagggttgcttgatcatggcgcccgcacgatctccactgcgcataaccgaaccggataagtcgcgcgtaacttatccggactccacgccgttttcacgcaccggatttttcggaacatttccaaaacaaaaacgaatccgaatttgcagcaaaataagactgcaaaaggaggctgcatctgcgcaaggtgaggaaccaatttttggcggaccattcgacgcgtacatcgtgcacgcgcgccgcctgccctgcccggccaggcgaggtgagcgagcgcgcgtgtgttccccctcttctctccaccacacatgcttcaagtggctaggagggcatcctcccttttaaggaggtccctctctcctagaataagcaaggtggtactaaactccacatgcatgccattccatgaggtgggcttttgtgattttccaaagaattaatcttcgagtgggctaaggcccatccattaattccaacaatcccccaccaaatctcaaaatcccactgagatttgccttttccaatgtactgtctatataccagcggttcgatggagaccgattaaggttgaacttctatctagaactccaagctacacttactcacaactttaacaatggattacgccttgaattgtaagtcttgtgcaagcaagtttcactcaaagtcttatctggtactagaccgtctgtagactacccctcgggtggagcgtataagtcatactgctaggtctttagtaagcttcctagaagattcacccaaaatcttcatagactgcgaccagcagtcaagctcacaaaggtgagttctttcaagaatgctctgcaggacagcatcttcgctaattaaagtcaacagaactcattaaggcatagccaacctgccttgcagctcacgagagtacatgcatcttcacttagagagggtatatatcggtactctcctctagtttactaatggtttgttcttccgaggatctaattcacgggatctccaatcacatagacttggttaccgccatagtataactcacatgggtctcaaacccatctccttcgatgcattgtctatcatatttcgtgatagtcccttcgtgaagggatctgccaggtttctagttatttggatgtaatccaacgttataactccggagtttctcaacttcctgacagacttcaatcgtcttttgacatgtctagacgatttcatattatccttagaactattcactttgacaattaccgtttgattgtcacagttcataaggatagccggcaccgttttttcaacaataggcagatccattaatagatcacgcagccattctgcctcaacagtagcagtatccagtgccatcaactctgcttccatggttgacctcgtcaaaatggtctgtttgcaagacctccacgaagcagcaccaccacctagtataaagacatatccactagtggctttgatctcatccacatcagagatctagttagaatcactatatccttccagtaccgtagggtacccagaatagtgaagcctcaattccatagtacctctcagatagcgcattactcgctcaagtgcacgccagtgatcatctcctggattagaggtaaaccggctcaacttgctcacagcaaaggagatatcaggcctaattgcactagctaggtacatcagcgagccattgatttgggagtattccagttgattcctaacaattctcttgttcttgcgaagcaacaagctaggatcataaggcgttggagaaggcttactatcaatgtagccaaagcgattcaagatcttctccacataatgagactgcaagagtgtaatcccattctcacctctaattagcttgatgtttaggataacatcagctactcccaaatcctttatatcaaatttttgagacaagaatgatttaacctcatttatcacctcaagatttgtcccaaatatcagtatgtcatcaacatacaatcacagaataactccctcacccccaccatggcgatagtatacacatttatctgcctcattgactgcgaagcctgcagatgtcaatgttctatcaaatttctcatgccattgcttaggagcttgtttcagaccatacaaagacttcaacaatttgcacaccttatcttcttgaccttcaactacaaacccatcaggttgatccatatagatctcctcatccagctctccattaagaaaagctgtcttaacgtccatttgatgaacgagaagaccatgtgaggctgctagggaaagtagcacacgaattgtggtcaatctggcaacaggtgagtaagtgtcaaagaaatattcgccttctttctgagtatagcccttagcaacaagccgagccttgtacttttcaatggtaccgtcaggcctcagcttctttttgaacacccacttgcaccccataggtttacacccacttgtcacctcccaagttccgttagcgataatggaatccatttcactacggacagcctccttccagtagtcagcatcaggagatgcatatgcttctgaaattgacttaggagtgtcgtcgacgaggtacacagtgaaatcatcaccaaaggacttaaccgtcctttgtcttttactccttcgaggagcttcactgtcatcctcctcagtgacatgttcatgtgtatattcagtttgttctggtggtgtgattgaactgggaattatttcagaaggttgactagaactactatgtgtatccttcattgggaaaaagctctcaaagaagatagcatcacgagactccataattgtaccaacatacatgtcaggtacctcggatttaactattaaaaatctataggcaatgctgtggtgagcatatcctggaaagacacagtctacagtcttagatccaagtttgcgcttctttgttattggtacattgactttcgccaagcacccccatgtgcgcaagtaagaaagtgatggttttctcccaatacatatctcatatggtgttttgtccttatttctgttaggaactctgtttaacacatgattcgaggtcaacaatgcctccccccaccatgccttaggtagtcccgcggtgtccaacatggcattcaccaagtcaggcagtgtgcggttcttcctttcggcaatcccattagactcgggagaatagggaggcgtcctctcatgtataatgccatattcctcacagaataagtcaaactcgtttgagaaaaactctccaccacgatcagacctaagtctttttatctttctgtcaagttgatttttaacttctgccttataaattttaaaatagtctagagcctcgtctttcgttttcaacaagtacacatagcaaaatctagtagcatcatcaatcaacgtcatgaaatatcattttccaccctttgtcaacaccccattcatttcacaaagatctgaatgtaggagttctagaggtgccaagtttctctcctcagcagccttgtgaggcctgcgaggttgctttgattgcacacaactatggcacttagaacctttgacaatggaaaacttaggaattaaacacatgttggaaagccgagacatcaagccaaaattaatatgacataaacgtgagtgccagacattagcctcatcatccacactggcacaaatatggttcatagacttattgcagaaatcagaaagggaaaagcggaacaggcctccgcactcataacctttaccaataaaatatccatgtttagacacgactactttattagactcaaaaaccaacttaaatccgtctctagttagacgggagccactaacaagattcctgtcgatagaagggacatgctacacgttcttcagctgcacgatctttcccgaagtaaacttcagatctaccgtgccaacaccatgaacagaagcatgtgacccattccccattaggacggtggaaccccgtgcgacctgataagaagaaaacaatgagatgtcagcacaaacatgtacattggccccagtatcaacccaccaattagtagactgattaactgaaaaaacagtacgtaaattaccatacccgcttccatctccagtgttgccaatggtcacattagcagacttagaagtctgccctgcaggtgccttcatccccttgcgctgtggacacttcctagccagatgaccaggttggccacacacaaagcaagtcctctcatcctgattaggattgttgttgttcttcttctgcttcttgaagttggtggtctgctgagctttgtatttccccttgctcttgttctgggccttgtgcacaacattggcactggactgcccaccatggcccttagacgcagcatctttttcccgagcttcctcctcaacatcaagagacgctatcaacccctcaacagagtattcctgtctcttgtgtttgagtgcagtaccgaaacttctccaagatggaggaagtttcgcaataatgcacccggccacaaatttgtcgggtaagacacacttaaggagttcgagttccttagccatggtttgtatctcatgagcctgttcgactacagaacggttgtcagccatcttgtagtcatgaaattgttccatgatatacagatcattgctagcatcagtagcaccgaatttagtattcagtgcatcctacagctccttagcgtcggtcatatgcatatacacctcgaccagacgatcgccaagaacactaagaatgcatcccacaaagagagtagtggcttcctcgaattgcttctgctgttcagcagtaagaactccttcaggtttgctagtactcacccagaagcatttcatagctgtcagccacagagtgaccctgatctgccatctcttaaagtgcacaccggtgaatttatccgacctcagtgcatcggcaaaactagccatagtaaaatcacattgcctataataaggtttttggattgttgagattataggcatataatgatttaatatattctataaataaatcatggcattgcagatgtatactagtattaacgcatcattagatctacacatgtaaactaagcagtaaaacatgaacagatcaaatatgcgcaacatattgaacacgtaccgaggtggtagaaagaccggctgctcggcaggaacttttcgcgattgcaggcgcacgcgagcgaagaggatcccaaaaaccttattgtcgccttctcccggtgcaggacgtcgaaggcagaggttccggagacctgctctcccgatcgccggtgcacgccggcgagcgggatggagtaatctacgagcgacggcgcagcacagagtaggaggcaaatcctagattgattttgcgtgtgttgcgtgaagacggcgggtcggtttatatagagaagggtcgcttgatcaggacgccacagagttggaggcaaaccctagattgattttgcgtgtgttgcgtgaagacggcgggtcggtttatatagagaagggtcgcttgatcaggacgcccgcacgataaatcctagattgattttgcgtgtgttgcgtgaagatggcgggtcggtttatatagagaagggtcgcttgatcaggacgccacagagttggaggcaaaccctagattgattttgcgtgtgttgcgtgaagacggcgggtcggtttatatagagaagggtcgcttgatcaggacgccacagagttggaggcaaaccctagattgattttgcgtgtgttgcgtgaagacggtgggtcggtttatatagagaagggtcgcttgatcaggacgcccgcacgataaatcctagattgattttgcgtgtgttgcgtgaagacggcgggtcggtttatatagagaagggtcgcttgatcaggacgccacagagttggaggcaaaccctagattgattttgcgtgtgttgcgtgaagacggcgggtcggtttatatagagaagggtcgcttgatcaggacgcccgcacgatctccactgcgccctgccaggcgaggcgagcaagcgcgcgcgtgttccccctcttctctccaccacacatgcttcaagttgctaggagggcatcctcccttttaaggaggtccccctctcctagaataagtaaggtggtactaaactccatatgcatgccatcccatgaggtgggttttcgtgattttccaaagaattaatcttcgagtgggctaaggcccatccattaattccaacagtatatacacaggtaataatgggtgccgggtacagaacatccaacagagatgagttttgtgtcggattcattttcgtacaccgataccaagttacgaaaaagcactgatgccattttctgtcgtagtgacacaccactatacggatgtcacttgtcactcacacataccatgagagtgtctccctaacacttactcacagagacacagatctaacggcatattcttagccttactaaaaattcctactgaaatcccattcatttgtgtataatatttgtggaactgaaatttgatttttgatggataatgtcatgcacctacgacctcaccacctcagcaccgcatcaacatgtgtaatcggtggactccgtctctcatatatcgacctgtgtttgtcacagcatggagacaagacaaaagatttgatgattgcaatgagaacgctaaccaatcaggttcttgatcatgagttcttgtgcctgtaggagtattttattagcaaagaggttaacatcatcttggttagttacggccttatagcgtactctattactactgttattgcacgcacaagtatacgtcgaattgaagctttttattctgagaaacagaagaacgcaaaaacaaatttctagttaatcttttaattctacaactacattttcataaaacctagacaaaaaactagattatttaaagaatttttttatttttgaataagttacagcagtcagaaactctaccctattttgcaatatatcatgcgagtgcatttctggtattggtaatgcgcacggtgaacctaaaacacccacagagtgagcttcaccagttttttaacgggtgaaccctcccgagagcggtgtatgcactttcgtacaataaaaaaaaatgtccaatcactaattacgtgcgtagcctttttctaggattaaagtactcacgggaaagactaattgccaaattatttttgtgttatttcgttgggtgcctcatcgtttggcaaattcatatgcttatcagccaaaatttaaattttcaacgttaaatttggagctgattttaggggtttttttcatcgaagtttatttttcagcctttgtttttagatcgctaagaacacatatataaaagttttattcacaaattgattttcgtttgcaaatatgccatttggcatctttagaaaatattcagaaaatatatctagaactactttgatcgaatctctctatatttgataagaaatatcaaaatgtgttttaaactttttttaagcaatgacaaacgaacaatacccataagacttgcggcctatcttaaaatcacatatagatcgttcttaaattagccaaagaaagcaaaaaaacaaaaacttatatccgtttttgctatagtaattcctatttttttaatatatgacgtcattgtctttttagatacgtttgaacattcgtcttagtcttatttcaaaaaattatgtaattatcatttatttttattgtgacttgatttatcgttaaatgttctttaagcattattaacttaaatttcttcatatttgcaaaaggaataaggaaacgaatgataaatgtttataaaaaaattaataacattatatattaaaaaaggtagtagtaaattaacgaatatgtgcatgctagtaccttaggtgtagtccttggctcctggcttcttcattgggcctaggaagtaaaacctaataacttctttttatttataagtgatatgtactttaaatgagcttttattaccgaagttttatattagaccactatttatcatttttttactttggacaatgtatttccttttacttttaaaataagacttcattacagagaaaatttatggtccttgagacaaagtatacctcagactacctaaactttgccctaaaaaaattttggtacctcaacgtatccgaagatactaattttaaataaaaaatacggtacccccagtactttcccaagaatggtaaaactacccttcattataaattcattactatgcaaatgattttcatggctgagcaccctttggaggtagatcataagtgtttgcgtctgcaaaattgacccatattttcgcatacagctcctcaagagacccacatgtaaaaatctatcttcgcaggcatacctcttaagaagccttatgcgaaaataggactacggacctcttaaaggtccgcctagatgtctgacttacctcctcgtgtccttcttagcacttcaaatttttcaagtcattcttgtcccctcttgtctgtctcacctcctcttctctctctctctctctcaaattcctctctcccgggagagaactttctctcctctctctctctccccaactcccctcctgggtggcagcggccactgggcgcacgacggcgggcagcggtggacgacaacggcggccatcccccgctttggtccacgcggatctagcgaaagagcacagcggacggcgagcggatccagcgagggcatgtggcaggcggacaggccttgcccggatccggcaacagggttcacagttccgacgaaaaccagtcgaattccgagaaattttgaggtttcgacaaagctcgaaagtagaagccgtctgagatttcgatgagtttcatccaaattcaaatttgaattgataaaaaaagaaaaaatcaaataaaatcttataaaaagtatgatatgcatatagaacctactgggatataactttttgaaaaaaatgattcatttcgtgtatttactgaaatttatagtaggaaagaaaagaataatgaattaaaaaaaataaaaaaaatcactttacctccttttctagttaccgattgaaattttgatgatttcgctcggaatttcataaaagccgactggttttcgcgagcgtatcggtaaactcaaggaatttgaattcaaattttagtttatgaaatttgttcggaatctagcagttttccaccggattttgcgaaaaccgtcattctaccatagcccaaaacagaaggccatctcggaatcgtaaaccctggcagggttcacaattccgacgaaaaccggttgaattccgcaaaaattcaaggtttcgacgaggctcaaaagtagaagacgtctgagatttcgatgagtttcatccaaatttaaatttgaattgataaaaaagaaaaaatcgaataatatcttataaatagtatgatattcgtagaacctattggaatataaattttttaaaaaaattgatgtatttcgtgtatttactgaaatttacagtaggaaagaaaagaataatggattaaaaaaagaaaaacaattttagtttaacttttttttaagtttccgattgaaatttcgatgatttcgctcggaatttcgacagtacactccagtcttaagtaggctcaactaaaacactcggtaggtccaaattaaacattccaatcttcagtaggcttgaatagaacaaccccaaaagaccaaaacccagaaaatgggtcgatcctgtcccaatccagcaatcctcctcattcctcgatctccaaaatcaataccagtaaccctagcggccacccaacgctgtggctgcgtgcgtggctgcacctcgtgcttgcgctcccaccatcctaccgcgagctcatggcgacgcggcctcaccgcagcttgcccgtcgccgtcggcctcgcggattacgaccagggccggccctggccctatgcagcgaggtgaccaccgggggctcatgatgatggggggcccataatggtgaggggccaacacctaatactagtaatctagtacgtcatccgatgttgagatcaatgatttttattctgaattaaaggtgttgcaggtgagtttgctagattctttgatgtccgcgtctgagattctgaagtttgttatggatgtagatttatatccaaatatttcagttgccaatcgaattctcttaaccgtacctgtgacggtagcttcagctgaaagaagtttctcaaaattaaagttgttgaagaactatttgagatcaactatgtcgcaagaaatattaaatggcttggctatgtgctcaatagagaaggatatcttggacactattgatcttaataccgttcttgatgattttacatcaagaaatgtcagaagaagtatctttccataggaagcaatggaatagggttctattcttcattaagttaataaataatgatattagttccaagttacaaatatattattattttagtcgactttatttcttgataattatcaagcatgttaaatttaatatatagatgtacttgttttcgttttgcaagtaaaattagcgtttatatatatcaataaattttatatgtagcttagagggcccatcacgatgagttcgcctagggccctcaaaatcataggaccggccctgattacgactctcacaaggtcgcgcctgccccactacacccatgcggctgctggccgtgcatcctgccatggccatggaggatgaagaagaaaggaagctttgtgctctcttattttccgtcgtcgctcgactttctactctcttcgggttctccttcggtggttcaaaccaagaaagtactgaactgatgaatgatgttgcgtttgtttgttggggtggtacttagatcatttgcaaattgacttagattgcatattttctagctgcagacttttgatttgaagtcttcactcacgagttaaatgagctggctcgagctgaacagggtttctagctagctcattaggccgactcgttatccaaacgagttgagccgagctgactcgttatcctaacgagccataccgagctgacctgaaccgagtcagttggatattcacccctagatatataaaatactgaatatatggtatatcaagtcatctttgtgtgtcatcaccgttagtcaaaatttattaagtgaatctggttttcttgtaaagtccaaaatgcccatacttctctttacataaacaagctagtgaaccataacaatgtacgttacaatatctgaaatgagaatatccggtcaattgaacatatatactccctttaaaagatattaatagttctgacagtggatctgccatcacctcatcaaatatgctattttttttatttaccaactacgtactctgtcatgttttctaccaactactctatatgctttattgttataaaataatttctctacacaaacgactctatcttatcttacatttgcaaaaataaaattacaaaaaaataatcataatttgttttagctagtaaaaggaaaatgcaacaatggcaaagttcacacttggttcccgtggctagcttcttcttagcgattaccaacggtcttcaactcttcatgttgctgttttttcttttaaccaagctaccgcagtggactagtagtctagtactggaggtccccgcagtccatgtgcgtaatttattctcacatgaaaaattgtctccttgacctgtctctcattacaacagtgaagctagaaaagttactatcaagagtaattgaaatgatcagggtcgtccgtcccggtgcaaataattaagtccatttccagtaaaatgtatcatttttatgttttcaagagtatcacataaataataaggtatttaattgatgattaaaatatcttatacaacgttgtttcaactttgttgtttcgtacatagtacatgcaagagataaatagtgttaaaaacagtggagacataatttcatccagatgaaactcatttcatctcttacttccttaatttcttacaacatcattaacattgctgacatagtaacctatttaatgagaataaaactcccactaaaaatagcccaaaacaaaatataaggatttatatttagcaagctaactttaaaaaaatagtctatgtgtaatacgaaacacccccaaccattcttgcataacagaaacacactcacatgtttaaatcagtgacgaagctatacagtgtttgggggtgcacatgaacctctaaattcctaatttctcacttaaaaagactacaatatacagtgttgtaataaaatgttctagattttcaatgatagtatacccccttgtcttcccccttatcttgatgctagcttcgcccctgctttctgcaaccccccctccccattagggccaatgaacctgtgaagttcaattttcgaattttgctttggcaatatgagcccgggcaatactcaatccaattttcgtctagggcactgcctgctggcaatgatgcgaacgatcgagcgtgggtggagtcaaagcctttagtacgacgtgggggcatgggccgaggcatgcatggcccgttggcctgggaataggatgataagcacgtgtgctttcattggtcttggtgccaatctaaaatacgacgataaaaataaatggagaaagtatatagaattattattgaggtatatgcatgtacgcaagtatcggttctaaatatggcttgacgaggcctaccaggtcgtataccaaattctatatggaatcaagctttatacatatggcagaggacttaagtagataaggaaagagttccgataagaaaagaaaaacagtcctactcgagcattataaatttataagatttactcggatcgtatctatatttgcctccctaattctatccagacaatggagcatccaagggtgtaaatataaaacccccagaactagagaggacacaccgagactaaaacaatacaagtcaacataaagctacaaaagtcaacacatatgaccacacaagaactatatgatccacaagtgccacaaaagcctatataagttcaatcgcacactctatatatgctaatgtaaggtcctcatcagtggcgaagccagcgatgccatcaaagtccggatgattaatagtgtttttcggtgatcgattaatctttatagatgtcaatggctattgatagtaaagatggtaccggcgaaacccgggcagtcgcccgacctgcccgagagatggctccgccactaggcctcatactttggcctaccagttgaaggtggttgtcacgtccggaaattcactagtaatttccgaacttatttgtgcataaaaccctcgtccaggaatcagccgaggtacacaaactgacaatttaatatacaaatccatcataataataacgttacatacttacagaagaaaaaaaacagcagcggaattaacggtctagcgatggcttcagctccactcccacaggcagctcaactgggatataagccaaacgtcttctccttctggatcctttttcttcaactgaggttgattgattattgcaagaatgagcatatgatatactcaacaagccacacagcaaatatgcaagtgcacaaggataccaaatgatggcataatataggctcatttgcaaaagcagcatttagcaaacatttaagagtagtaaaacagtagagtaattaatcatcaattttaaccaacactgtacagcaccccaatgctgcacaggcccaaccatcctgaataaccatacccggctgtacagatctaactctaaaccaggagctaaacaaattattaccagttatagcatcaataattattgtgagaggtgtgagactaaccacgaaaaacattgctcaacctgcccatgaccgcgggcacggctattcgaatagttttactctggccagaggtgtaccactgtacccacaagacacagcctcaacatcatgtctaccatgcgtcgcgatactggaaagtacccgaatagaggctgtgacaataccccctacacaacacaactcaccacagtgcaccattcctggatcataatcacccctctataaatataaccataggcatggactccccagcgacccccacggacttctcgccgcttctcagtctggtgccccgcaatgaatcatgctgtacaaaaggtaaagccgttgcccacgctggcttgtggttggtacggttaatgtctcacaacagtagctcgcgaaccggtccttaattgtcatgagcacgaccttcaaaaccatgtgctcacaacccaccattgacaagttttaattatcaattaattatcataacacgattaaccatcgtgagctaccattaaatataatcataaataataacgtagtatgattcatcccattaatgagctaatgtttctaagcatggctaagcaattatatatatttatagcttttagctgaaccaaaccaatatataaggttcaagctaatcaatttgttacccaagatatcaaggaataaagtaatcaatgcaaattggccataacaaaggaataggttcacaccacccggtgacattcgaaaataaatgcacagttgaaataaatagagaatttaaatataggatcaacatgctcaaaggatttgtgtttagtatctgtgtgacttgccttgcaataatcggtcttcaattaatcttcttgaacacttccgacgcactcacgaaccttcgcaacgacggaaacagcaagctaacacgcaaaacggagaaaaaactaataaaaaccaaataaacagtatataaaaaataaacaaacatgtagatcatgattttagatgaatttagagactcgaacggcctcattccgagttcatatgaattagttatgaattttacaagattaaactgattttaagatttatttttagaagggaaaagggctttatgacatcatcgatgatgtcatcaacggcctctcgggacattacggtcaccggcgatctaggtcacggcggcgagaacggagggcaccaacgcgacgagcacgacgcggggaactcactgaggggcggcacgacgacgaacgaagacggaagacggccggcgacaaactccgaaggcggcaaggtactgatcgacgacggcagcggcttttcggcgacgagcagcggcaacggaggggtggacgggcttctccttggtgctgcgatgccgagggaggtggcggcacaagtcggggacgaccgaggcgacggcacggcgcggatggaggcgaagcagatcggtttgacgtcggcaatggccttccggttgtcttcggcttcggggaagtggaggccgctcttcctctcttcgatgcggtcccgatggaggcgacggcgctgaccggtgatggcggagccgacggctatagccggctggagcggcggccggaggaggagagagatggctagcgtggggagagagatcgggcttggaacgcaaggaatcgcgccgggaaaacctgggtttggtggagagataaactcgaatcgagctcgattccgcgttgatttcttcgggataaagtccaattcttgggggaaaagatagaggaggataggaagaatatttcccctcaactaattcaagaaacggctcagagaatcgagcgaatcgggcggaggaatcggcagcggtacacacggctcggcggctgcacgggttatgtccaagcttgaagacgacactgtagcagggacgcgaattagactttgactgggcttctttttctccagcccgattgaaggagggacaagaaatggacttcagaggaggaataaagccagctgaaaggaagggagaatgggccgaggactgaaggtgaacttttccagtttcagccggaaaaggaaaaggggatttgaattacttttccaattaaattaatcactgaaatgatctttgaattgttaaaaatacttccaatgctcaaataattccaagaaaattcttgaacatacttggacactcaaagtatttaggaatattaaaaacagaccatttaattattaatttaatatgtggataattactgaaatgttctttgtatgattaaaattaggaattgagctccgagaaatccgagaaaattccagagagtataattaactatggagaatttaataaaaaataaatccatccatgctttatatttaggaaattttatttcccgcatttaacttctcttataaattaatgaatatttaatataaattctaataataatttattaaataatttataaattctaaaacgaaaatcaggatgtgacagtgatctagtgaaaacattgtcctcgggactagccatccatctccatcctattcaatgggtttactaaacagtcgtaattataggtccaaatgagaagactaacaaactggaggttaatttaatgttgacgtacggatcatatatcgaacctcgttgtatgcattgaacttgatcggcttccttcgattcgaacttttatgacttacttctgttcgagcaattgtaaaagatgagtgaccattgaccagttttcactcatcctataattgatgttacagtatcagtgtattatccatatctttctgatccttaataagaaaaggttaattagattcgtgctattataattttcatgattttaaaatatatcattataattcatctatttaaaaccatacgattataatttgacaagtattcgaaatataccactgcttaccccttcaacacattgaaagagaattttggacaaaattacccatttcttcttccttaatccatcccattctccttccaatcttcctcccatctctctcggatctgctcgactcgtcgcttgtgttgcagatggctgctgcttcgcgtggaggtggcaggggccggtgttagggaggatgcgaacgtggtagctcacgcatgcccccgtggagggtgaatcgcttagggaagcccggggaggagctagttgtgcccaggaggacttcagtagctttaattcttctgtgctgtggggttaactagtggcggaatagattgcatttactagatgcttaatcgcaagaaaatggcaggcatccgtgctttggaagtggtagcgaaatactgaaatagcagctggggtagtggaacgggaaaaaaaaataaatagtgattccactgctgcaccgtggacgatggacgttggtggcgacgggccacctggcagggctcagaagcaggaagcggggcttccgctgcagctccggcgattgcacgctgtaacgaggtcgcgcgtggagaccgggccacggtagaccaccaccggtgccgccagatttcctggccgacttcatttcttgctcatgtgcatctttatccagctgcataactctcattgtattccggaagctcgtaacatggggcctgataagtcccaatttacagtttcttctccgctaataaaaccaactccctcaactcgttcaaaaaaatgagattctgtataataagttgttgatattcaataactcctcgtaaaaaataatcagagaaatctaaacatttatcgatccatccataaggcagatcggcagcaactcctccgatgcgaaagtaattatgcatcattcgcatacatgtagcagcttcaaatagatcatatattaattttctctctctaaaaatatataaaaaaaggagtctgcgcaccgagatctgccataaaaggtctaagccataactctcactactagaaaaatcatttgttgccacgaaaaaaatcgtggcatcaatattaaaattatgacaatagatacatgttgccacaattttaaaatcattgctagccatggtaagaaataacgtggtaataggttattgcaactatttttatttagtggtaataaattatattgcaacacttcacatcgttataataaaaattattgtcaccactccatatgtggcattagttctacgtaccaaattaaaagttcaaatattaatctatcatcctatctatttatttcacgcgtgctctcctttaccaactcacctacgcatcaattctgttagaaaatgcatatcgttccatttgagcctacctaactgagatttaaatcatagatttgaatatctaaaagatttcaaatgaaaaagttatcacctataaaattgtagatctcgtcgagagctgtaatttccaccaacgagatcaaccccccatgcatccgaccaccaacgaggtcgtcatactcatcctggctagggtgctttgccatagctgccgcatccactgggtcgctcggaactcgtcgagctcatcagtggggaagagataggacgaaccaacgaagagaggcaccaggagagaatgggatgaatggaggaagaagaaagggcaatccagtccaaaatttaatttcaatgtatcgaagggtaagtagtgacacaatttaaatacctatcaaattataatggcatgactccaaataggtaaattgtaatggtatatttcaaaacagtaaaatttataatggcgtggattcaattaaccctaaaaatattagtttttctagcaagataggtataaaccaatgaagacagtcaaagactcaacgggataggctaaaattggtggagatgggtgaacgccgaggagagttaaggaagacttgtagatatgtgtgaagaccagggtttaaagtttcggtttgaaatttccaatattttcgaaatttcggttcaaaatttccaatatttctgaattttcggtaatttcgcccccccccatggcaagcccacatttcacccaaattttttttttttgcattttttgtgaatttggttaaattttattcaaattcattcaaaatcagtcaaaatttcaaataatgtaggccaaacaatttccaaaattttgaaattgaaaactctggtgaagacttgtgaggacttcataggagtgcaaaggtggatggagagaaggtgaaaattgggttgggtaccctaccagcaattttgaaagggcgaaagatgtgtagatgcattttaaatgatgtcttataagtgtttttagcgaattatctcttgaaaccaagaggtattttataaaatgtctatataagaaaatagaggcactttctagatacatgtgtgcggcaacttctgagtaataattgttatcccttgcaaatccttaaacacattacctcttgagtaatatttttttaatgcactaaccatcttaacccatcttaatctcaggtcattattataaatgtgtgtcttgcaatagttatatataattgcttagcatacgttggtacttgaagaagtgtctctacttatgttaaaacacctttaaaaatacctttacatatgaggcgaattttaacgtaccaaactgacgcctctacaacaaaaatttcataaacatacttaatagtacctctaaattatctctagagtaaaagtattctagacgattttaaaagtacctctgatatctctaagatatggaacttctgattttagtagcaaattaaaaaccgtttttactaaagtgactttatctaatgtttttgttgtagtggccgcctaatgaaatgtgacactgaaaatatattataattcaaaatatttttaaaaaaattatgactaagaacttctattctatgtttactttatgcttatgatttatctagtgtccagatattcttttccaaatttgtcgatcatctaaaatattctcattttcttcatttttcacaaataactttgctgtgtattttcaaagcaaaaccaaccatttgatgaaggatcgaagaaaaaaaaataattgtaggtgtagaaaatttacttatggtaaacacatcaacatagttaaacgccccttcaaaacgatggttattaacaataatctccaaaataaattcacattcattaatgtatttttttaattacgtacactagctccatttaactctgtagttaagccgacaacggtttatttattgtcgtgattaattgcaattaatgcattaccgctgttccgtatgcagttgacacgtacgtctccctgactagaacacgaaatcaaggatcgagttcatgaggggagccggtcgccgtcgatcatttttcaagagacaggcacgcatgcaggtcgctgatcgaaattaaaccagctctagcttcgtgtttgatctgtgactagtagttgtgattaatccgtcactagctagtaattaggcttagtcctgtgcccctgtcaatgcatgtttgcaaaattgcaagcggatggatatatgtactatgcgagagagcgacgcagatggatgaatggatcatagatcggagaaggctgaggtcgcttcagagtttgaggtggtaatttttctcttttttcattagcacgctttggctgtgttggagggagagaggattgagatgattaggaagatacgtaaaacgaggtgagccattagtgcatgattaattgagtattaactattttaaacttcaaaaatggattaatataattttttcaagcaattttctatagaaaatttttacaaaaagcgcaccgtttagtagtttaaaaagcgtgcgcgtggaaaacgagtgataatctcccctatcacctgtgaacgaacggagcctttgtaagcttctaaacaaacttctagacagtgtggttttttttaaaaaaacttttttgtttatagaagtcttcttaaaagcaaatagacttatttgctaaatttataacaactaatacttaactaattataacttaattatagaagttgtcgtctcttaagatccaaacgaattcagcctaagatcaggtacaataacaaactataaatcagctataagcacatgcggagaagataaaagatgggagagaagagaagctgggtaaatatttgtgctagctacagcacggactgttagtgatatagtatatatttgtagttaactattgtatgaattatctattagattgactatagatgatttggagttagtagttgtgtgtatggcatatgggaccgatattaataatgtagaagtatatatttgtagttaactattatataaattggctattaaattgattatagatgatttggagttagtagttggctatactattaaacttgctctaagaccttgtttagttcctacacaaaatttttacaccctgtcatatcgaacgtttgaacacttgcataatgtattaaatatatgctaaaaataactaattgcacatattgcgactaattttgcgaggtgaatcttttaagcctaattacttcatgatttaaaaatgttgtgctaagtaaatatttgctaatgatgaattatttaggcttaataaatttatctcactgtttactaacgaactatgtaactagtttttttattagcgtccaaataccccatgcgacactctatataatacccgatgtggtgtgtcaaaactttacgcccgtggatcaaacacccctaaactggtcaattaagctagcaggtggtcgttgattaataatgtttgaagcattagttgcttagttggggagaagaggtatgaccagtaataaatgggatttattatcagcatttgtatcacacattcgtctctctcttgattgctccatcgatctagctactagtagtgggctagtggctgtggtcgcagcgctgatcgatggtcctaggcatggggggatatatgatgatgaattgatgatgcgtgcccatagcgtggagagagacatggatggatcaacgggtggatggttaagggtgctttactattatttttttccctcaggctccacgtagccatgctttactattatttttttccctccggacttcaggtcaaaattgccggtgcgaggttttttaatcgaagtttatttttagtctttgcttaataagtaagaatacatatataaaatttttatttacaattttttttaaaaatatgtcgcttggcttattctccgaataaactaaacgatagggcatttaagtacatgctcggttaattaagagaaatatctcgattcaaaaccctgagcacaccaaaattactacctagcaaacctaattaactattacaacaagactagcaagctcaacacataacgagtttgtttccttttacattggtaatgaccgtcattgtcatcccatcgttgcacctatgatcaggcggcttagcccgtcgaaaagaagaactaggaatgtaacccgacttgcaccgaagcccaagttaattggatccatgtcatcattacgtacattgcgctctatcaacaccacaactccaacttcacaatcaccagcttcatcgaggtaggactaggctaaacaagccccgtcagcctatatagtatagttgtcagtcctgcatccccttaggaaggaagtgccgactgaaaggcgctatcgttgctcccattttgaccagtctagccaatgtatatatagcttgaggtggaaatccaaaacgatgcttaattctatgaagatatattaatggtccaatgttatcggtcaatctagtaagccaaatcaatctatgtttggcaaaattaaaatcgccaaattccacttgcaaaattttgtttccaaggcgagaagcttcaggaccccttcgggtagaactttgaaaaattctacatgcttcataatttgtccatttgagctaagaatttctgtggttggttccagtgtgctgtgagttgtgaaaaaaatatcaaaaaaagaaaaataaaaagtcgcatttctctcctcagcactagagagagaaagcaaaaaacaagaagaagaggagccgaacttgtgtgagcattcctgccccccccccccccccccaaatccctgttgtcatccccaccttcttgttatcat

SEQ ID NO: 9671 - DNA, 812 bp, Oryza sativa
ttcatcatgactacagaaatgaacaatgttgctacatcttgtaataatttgtggttttcaattgaacaaaacatccatcaaatgatatctacagcaatatattttgcacttctgagcacacaataggtttgagtgtattcgagtcatggtcattgatttaagctttttatttcactacataaccattgatttgagtgtatctaaggagttctgtttccacaagtactttatgttaatggtgtctccttatgctttggccatccaaactcattactgttgtttaatatttttagtggttagtggtgtccaaatctttctttgtgtacatcatactatgtttttgtagtctattaaacttccatcctatcatctgacttgttatattccaggatgcttgtatacgaatatgtgaataacgggaacttagaacagtggcttcatggtgccatgcgccaacatggtgttcttacctgggaagcccgaatgaaagttgttcttggaattgctaaagcgtaagaaacaaaccatcgtccccgtcaaaaagaaaagaattgttcttcactttagctcttttatatgtatatgtttagttgcataacccattttccataactgaattggtatacaggcttgcttatttacatgaagcaatagagccaaaagttgtacaccgggatatcaaatcaagcaacatactaatcgatgaagaattcaatggcaaactttctgattttggcttggctaagatgctgggtgcagggaagagccatatcacaactcgagttatgggaacttttgggtatgttgatatt

SEQ ID NO: 9672 - DNA, 13406 bp, Oryza sativa
cgtcgagggaatggagaacctgccaccgaatagtagccctgctgtctatgttgcgaaccatcagagtttcttggatatctatacccttctaactctaggaaggtgtttcaagtttataagcaagacaagtatatttatgttcccaattattggatgggcaatgtatctcttaggagtaattcctttgcggcgtatggacagcaggagccagctggtatggctgtagtctcatccctgctttcttaagtagacatatatacatttacagtatttggtaaataaacaagattttatgaatcatatatgattttggggaaaacacaaaactctctttgttggctgccttgaacatagttctgttcacacagttatagcaccttctttaaaatgaagaactttgttgcatacacataaggccaaaccacataatgaattttgtttatttctatctttgaatgttagcatcgtttttgtttaatgcatgatcgccttcctatatatttgtagtatgtcaacattgtattccatgctgagcataacaaatggtttgttaaaattcaggactgtcttaaacggtgtgtggatttggtgaaaaaaggagcatctgtatttttctttccagaggggactagaagcaaagatggaaagctaggtgcatttaaggttcagtaaccaaacttaggttacattacatctaatgagatttttatattcagtatataatgttaaccttctcatggtgtactgacgtggttataaatgtccccagagaggtgcattcagtgtggctacaaagaccggtgctcctgtgatacctattactcttctcgggacagggaaactgatgccttctggaatggaaggcatccttaattcaggttcagtaaagctcattattcaccatccaattgaagggaatgatgctgagaaattatgttctgaagcaaggaaggtgatagctgacactcttattctaaacggttatggagtgcactaaagaaagatggtgtttttttttattatatggaacctattcaaaggcacagacaggctttcaaggctaagcttgttacaggtactgatactagttactaattactttcgtaatcagtataaataagcttgtgtagtgtaatggcattgtacatttctgcacttggtaaatttacagaagaggcaagtaatattttagaggattgagtttattcacccagtcatatagttgaagaggcaagtaacctgtaagagaggactgaacattaacacctcttgttcgattaaaaatgaccaaagagcatcaaacatgtattcgaggctgttactttagatatggcccattaatttgtttagttgtctatgtacatcctagttggtgtaaatgccagttaccatttctatgatctaaaacaatcaactcttttagtatattttcaaaaacgaaaattcagtacacatgtatgaatcttaatattcttctctagctcgttacaaaagcaacaaaggcaccgtgtcagctggttcacattagctagtttgtacttagcattatccactagcaccttattttcatgcatatcatgctaatttgcttgcccacgttgagtgggaatttttttcatgttttataatttatatatgttttagacttctagtccacaatttatgtacttcatgttcctgagcctctagtatggctgatagcagactaggtgctgagtgctgtccttttttgcagactgaagagagaagaaatacaagactgtccattgttagtcagatttgtaaaaatagactctgatgtagtttacttttgcccctattttatttttaacaatacaaatatataacagatcctaagaacttatcttaatttaggagaagttgctcgtttcattaaattaaattgtgaagtaaaaatgtgtgctcgagtctgtcaatgcaatcctgtgttcttgtttgaagatatggtgtagggcaggccaggattgaacactgaatggtaagactgcttctgccttcagacgttattgctaaatttttagctacttgcagttagtgctgccacgccgattaagcagtagaacaaagtagttttgtcgtgcacaaatgagttatatttcattggaaatcgaagcgaaaacgaatcaaaagttagaagaaaaggggaaacttggtaattactccataaagagagtgcattttattggtaagatggtatccggaagctgtgagctccgggctgtatgtattctggcaaatttgatatgagatgctcgattattggcttaagttagcgatatcaaatttggggaagcaccaaaggaattattgtgaaggagttatgggtgcgtgacgttatctgctaggttcaaatccttgtggctatgaatatttatctgctaggttcaaatcctagtgactatgaatattaatgggtaaggtaagggatttattgttaattttagtttctttaagattgtgccatcggacgccattcggtaactgtaataatgctttgtattggattcacttgtgttacatgcacgcactaaacatgtgctttaccttttcatctgtttttgcgttctgggctagaaactcaaacgttgaattttccatggtctgctcaacttgacaattactgcgtgtcaagcgatcttatacgcatactatgcgcacaagtgattgtatacggatatgatgacagtataacgtgtgatattgatttttttaataaaaaaatgatgttcctttccttgatgaaggaacaaagactttttttaaaagaagggtattactaaaaacaaaaatgacaaaaacaaaatatcagtgcacatggcaagtgtgctcggcaattttttctctgtactttaaacaaaaatacttctatatgttcttttttataagggtggcacaaatcttttaaatgagccaaatatctacattggatttattaaaaactgtataaattataatttatactctgaaaggttgtgtgcatctctcttggagaaaatgtataagttgcaaacaaacattaatccacgttatgtaactttttttcgccggaaaggccgaaggaggcctgacggagcgtggggctcctcaccgggagaccgcgcaggcccccctttgccggttcggccggggactcagggtgaaattctaagctctctgtatgtggaaggttcgcgaccgtcgaaagagcataagacacgggcgatgtatacaggttcgggccgctgagaagcgtaataccctactcctgtgttttggggggatctgtgtatgaaggagctacaaagtatgagccagcctctcccttgttctgggttccgaatctggaaaagtccagtccagtccccccctctaagtgggcaaggtcctccttttatatcttaaggggataccacatgcaccatctccctcctttctgtggggacttaccctaccttttcataaatggacggagatttgtatagttgccgtccgaatgaccttctgataggacggcccatacctacctccacttccgccgaaagcaggtgcgacgtgggattatggctgtctgctgacgacatgaccagtgtcagactggtcacaaattgctcattcctgtccaccacgcgtcagtttagcaatctacatgttggcccttcttcacacaacatcttgcctgtaatggttaggatgaagcctggcatatatctaaccaggactaacgtgccatctctaggaggtaacacgctagctccagctggggacgagcgcctagaagccctcgtcctgacgggatggggcgaggcgtgcgtcagatcgcctgtcgccacctaacccgcgatctgaccggtctgtgactggtcacagaccggataaacgagtgcactgcacttcgttacatgccgcgtgacacgctcagccaaaccgcaataaatgtggttaggtgagccccggtgtgctcacctaacccatacacgcggagcaaaaacccacgaggggtcggggcgcctcggccctcggggccgaggcgggtgcggtccgaccccctcggggggactaagaggagggcgaacacatcaccctcgggcccgacgtcccccgagggtgccaggccacgtgggcgattgtgtctgcctcaaacctctagtcatgatactcctgatcccatgtcaccgacagtagcccccggcgttatgccagggcgatcgccctctttaagggaagcggtcgggcgtgacgccactcctaaggcctggtgacaggtgggaccggtctccacaattgggcagaaacccaacggtcacaaatcacgcacatcggcaatggtaactctactatcaataatgagcggtctcttcaagactgccacattactcgagtagcacacgaatctggacatggcgattcgtttcgtctggagatatggtaacgtcgctttggtcggcgagcgtaattaacgcgcgcacgatatgatctatctcgactgccacaaccgcatatccacctcatgcgccgcaagcgggcgaatgggattagtggaagcgtgggcgcgagaaacgagggggcgaaatagtgggcgcgagaagcgaggagccgggcacagcgttggcaagagtataaaggcactgaggaaaggatctgtttccttcctttcgccatcatttcccttgtcttcgccgcttgcgccctaactccttctttcctgtgctctactttcgccacacgcgctcgctctcaatcttctcttcctccggcgccatggcacggggctccgctctgctcgatggtagcgtgctgccgccttcccgcatcgtgagcgagaggcaggctgggctgccgcgccgcttcatgccggaatctgccaccggccgggagatagtcacgctgggtgagggacgcccggcgccagactacccggggcggtccgtcttctttctcccctttgcaatggcagggctggttccgccattttcttctttcttcatggatgttctgaagttctacgatctccagatggcgcacctcacccccaacgcggtgatgacattggccatcttcgcgcatctgtgcgagatgttcattggggtgcgcccatctcttcggctgttccggtggttcttcaccgtgcagtcggtgtcgccgccatcggtagttggtggctgctacttccagccatgggggccggtgctgaatcgctacatcccctgcgccctccgcaagaagtgggacgactggaagagcgactggttctacacccccctcgccgacgaagcgcgcctctgacttccgagccagcccccggcgcaggcctccagctggcgggcgccggtagatctgggggatggctatgacgccgtcctcgaccgcctggcgggcctacgatcccaggggctcacaggggccatggtgtacggcgactacctccgtcgtcggattgcgccgctccagcggcgcgctcggggcgcctgggagtacaccgggtccgaagactacatgaggacccaccagggagtcagatgggactgggctcctgaggatttcaagatagtggtccaacgggtgctgaatctcaactccatggaggcgtccctcattccccaaggaatcctccctctctgcagcgatccagaccgcgcctccatcctgaccattatgacggcggtcggggcctcagaggagtgagctccaaagggccacgacggcgcaggcgggagccgtaggggggatcaatctaccccgggagggggtcgtgcttctgggtctcgcgacggaggcccgaggagcagccgccctgccgacgcccgggggaagaggaagcagggaggaacacctcccccatctcctccccgagggggcggggcggtgcgtgccaacagcaggcgcccggagggggccgcgccgacatcgcagcccgagggggagcgcaagaagaagcggctccgcaagatgggggagacagaaccatctcggggaaaccttatttcccctccaaagtggtcgtttaaccgaccccctcgcaggttcgtctctcacccatcgtggctgtattcattctctcaacgcgagttttcactcacccatcttgttcgtcttctggtcttttcttctgtttcagcgagatcccgtcgcgtccctcccgccattccaagtccggccagtctgaggccgaggatccggcggccgcagaggcccggaggcgggaatctgaccggcgagaggccgcggatcgcctacgggaagccgaggaggccgcccaggaggccgcccgggctcgccagggcgaggaaaccgctcgggaggaggccgcccgggcccgccaggccgaggaagccgctcgggaggaggccgcccgagcccaccaggccgaggaagccgctcgggagaaagccggatttcgccaggacgaggcaatggcgacttccgaggcagctcgcgatgaggtcgcgggcgcgtcgcttgagcccgcttcctcgggcgacgctcaggcgacaacttccggggcagctggcgacgaggctgcgggcgcgtcgcttgggcccactccctcaggcgacgcccaggaccaaccaggtctgagggacatccccgagtccggcacttccatcggcggcccgagccgcgtggcatcctctccaaggcggctcttccccacgccttctatcgccccgctgagcgcagagccccttctgcaggccttggccgccgcaaacatcgcggtgttggacgggcttagtgcccaggtggaggccctgcaagcagagtgggcggagctcgacgccgcgtgggcgcgtgtcgaggaggggcggcgctcagtggaggccatggtggaggtgggccgcaaggcacaccgccggcatgtctcggagcttgaagcccgtaagaaggtgttggcggaaatcgccaaggaagtggaggaggagcggggggctgccctcattgccaccagcgtgatgaacgaggcgcaggacaccctccgccttcaatacgggagctgggaggcggagctagggaaaaagctcgacgccgcccagggggtgcttgacgttgccgctgcccgagaacagcgggcgggggagaccgaagcggcgtcccgacggcgcgaagagacccttgaggcgcgcgccatggcgctggaagagcgcgcctgcgtcgtggagagggatctggcggaccgcgaggccgccgtcactatccgggaggcaacactggcggcgcacgagtccgcctgtgccgaagaggagtccgcactccgcctccacgaggacgcgctcaccgagcgggagcgagctctcgaggaggccgaggccgcggcgcaacggctggcggacagcctgtccctccgcgaggcagcgcaggaggagcaggcgcgccgcactctggaatgtgtccgcgccgagaggaccgcactaaaccagcgggccgctgacctcgaggcgcgggagaaggagctggacgcgagggcgcgcagcggcggggcggctgcgggcgaaaacgacttagccgcccgcctcgctgctgccgaacataccatcgccgatctgcagggcacgctaaactcgtccgccggggaggtcgaggccctccgcttggcaggcgaggtagggcccggcatgctttgggacgccgtctcccgcctagatcgcgccggtcggcaggtgggcctctggagagggcggaccgtaaagtacgccgccaaccatggaggcctcgcccagcgcctctcgaagatggccggggctctccaacggctccccgaggagctcgagaagacaattaagtcatcctcgagggacctcgcccaaggagcggtggagctcgtactggcgagttaccaggccagggaccccaatttctccatggatggcgctggatgagttccctcctgggaccgaggacagcgcgcgcgcaggtccgggatgccgccgaccatatcgtccacagcttcgagggctcagcccctcggctcgcgttcgcccccaactccgacgaggaggacaatgccggtggtgcagacgacagtgacgatgaggccggcgacccgggcgtatcggattgatcccccaagcccccgccattcttcagttttttcttcttttccttcttctaaggccttcgggcctcttttttgtatagatcaacttaatctgtaatcaaaaatgaagaaatttttgtgtcaatttcatcttgctgtgtgtatgagatgaggatgatctgtgacgtggtccttttgcgtcttagcttgattaagggctcgtgcccaggtcccagtcctcaaaaggcgtgggtcggggctagtgcctggggagatccacatgtcgagactggccaggccgggaacgtggtgaccgagggttatgggtgacccgattgtgggtttttgccgattcccccccggagttcaccacgccccggggcacggctcggttctgggccccgtttggcgattttagccgacccgagcccccgagggcaggattgagcacgagtgacctatttcaagtcaagattcttcaaaaggaaaaaaaaacacagatacagcctttaggaaattgaaactgcttttattgaaatactgaaataagagaaataagaatgtgcatgtgtggcagcccccggccaaccctgcacgcccgagggggtgcggggttggcccgagcccgaaacctgacacccgacccccccctcaggggtagaagcgacgaaggtgttcgatgttccacgggttaggcagctcaatgccgtcgcccgtggccagccgtatggagcccggccgggggacgccgaccactcgatacggaccctcccacattggtgagagcttgctcaatccagcacgcgtttggacgcggcgtaggacgaggtcgtcgacgcagagtgatcgggcccggacgtgacgctgatggtagcgccgcaggctctgctggtagcgcgcggctctgagggccgcgcgtcgccttcgctcttccaagtagtcgaggtcatctctgcgaagctgatcttgatcagcctcgcagtacatggtggcccgaggagacctcagggtgagctcggatgggagaaccgcttccgcgccgtagacgaggaagaaaggcgtttccccggttgctcggcttggtgtagttcggtttgcccagagcaccgctggcaactcctcgatccatgaatcgccgtgcttcttgagtatgttgaaggtcttggttttaaggcctttgaggatttctgaattggcgcgctccacttggccattgcttctggggtgggcaggtgaggcgaagcagagcttgatgcccatgtcttcgcagtagtcgccgaagagttcactagtgaattgggtgccattatccgtaataatacggttaggcactccaaaccgggccgtgatgcccttaatgaatttaagtgcggagtgcttatcgatcttgacgaccggataagcctcgggccacttagtgaacttgtcgatcgcgacatacagatactcaaacccgcccggggcccgcctaaacggtcccaggatatcgagcccccagacagcaaatggccacgaaagtggtatggtctgcagggcctgggccggctgatggatttgcttggcgtggaattgacacgctctacatcgccggaccaggtcgaccgcatcattgagagctgtcggccaatagaaaccctggcgaaaagctttaccaaccaaggtgcgcgaggcggagtgggctccgcattcgccttcatggatatcggcaagaagcacaacgccttgttcccgaggaatgcacttcaggaggattccattagccgcgcgccgatagagggtcccttctaccagcacgtagcgtttggagatgcgatggacgcgttcactcccttcgcggtcctcgggtaaagtcttatctgtgaggtatgcttggatctcggcaatccaagcaatcaatctaagggagctgggagcgctcccctcgggtcccgaggcctggacttcaacgggcctcgggggccggtcaggcgcgtccgtctcccctaaggggtcgggtcgcgccgacggctgggcaagcctttcttcaaaggcgcccggtggggtctgggctcgcgtggacgcgagccgtgagagttcgtcggcaatcatgttatcccgtctgggcacatgccgaagctcaatcccgtcaaaatggcgctccatacgccgtacttggcgcacgtaggcgtccatctgcgggtcagagcaccggtactccttacagacttggttaacgaccagctgggagtcgcctaacaccaggaggcggcggatccccagtccagctgccactctgagtccggcaaggagtccctcgtactctgccatattgttggtcgctcgaaagtcgaggcggaccaagtatctgaggacgtctccgctcggagaggtcaacgtgacccccgcaccggcgccctgaagagacagggagccgtcgaactgcattacccagtgggcggtgtgaggcagctgcgaggggtccgtgctggcctcggggattgagacgggctcgggagccggggtccactctgccacaaaatcggcgagagcctggctcttgatagcgtggcgtggttcaaagtgcaaatcgaactcagaaagttcgattgcccatttcaccacccgtcctgtaccgtctcgattatgcaagatttgaccgagggggtaagacgtaaccacagtgacccgatgcgcctggaaataatggcgcagtttcctcgaggccatcagaatagcgtaaagcatcttctgggcctgagggtatcgggttttggcgtcccggagggcctcactaacaaagtagacgggccgctgcacctttcggtggggccgatcctcttcgctaggggccgcatccctggggcactcttcgtccaagcagcctcgcggggcgcacttgtcttctgtgctgatgacctcggggtcggaggataacaggggcggccttcccacagtggctttggggccgtcctgggggtcaggggctcctggcgtcgtcggacaagcgggcaaagggccaactccggtcgtcaggggccttaggcctccgttcggctcgggggcctcttctccctgctctttcccgggtcgagtcagcacagggttagcctcggggtcaaagggcgataggtgcggccttcccacagtggcctcagggccttcctgggggtcgggggctcctagcaccgtctgacaagcgggcagagggccaactccggtcgtcgggggcctcgggccaccgttcggctcgggggcctctcctccctgctctctcccgggccaagtcggcacagggtggggaagcgcgaaatgagaattgtcctcatcgcgctccacaaccaatgccgcactaactacttgcggggtcgccgctaagtagagtagcaagggctcgtctggctccggggcgaccagaactgggggagagcttagatacgccttcaactgggtgagggcattttcagcttccttcgtccaggtaaacggtccggagcgtttgagaagcttaaataagggtaacgccttctctcccagcctcgatatgaaccgacttagggcggccatgcaaccggtgacgtattgcacatccctaagtttgctgggggggcgcatccgctctatagcccgtatcttctcggggttggcctcaatgccccgggcagagaccaagaacccgagaagcttgcccgcaggtacaccgaacacacacttatcggggtttaattttatgcgggcggagcggagactctcaaaagtttccgctagatctatgagtaacgtttcctggttgcgcgtctttacaaccaagtcatcgacataagcttcaatattacgtcctaattggctacccaaagaaattcgagtagtacgttgaaaagtaggacctgcattctttaacccgaagggcattgtcgtataacaataggttcctatgggggtaatgaacgcagttttttcctcatcctccctagccatgcgaatctgatggtaaccagagtatgcatctagaaaacacaaaaggtcgcaccccgcagtggagtcgacaatctgatctatgcgaggcagggggtaaggatccttaggacatgccttgttaaggtcggtgtagtcgatgcacatccgaagcttgccgttcgccttgggaacgaccaccgggttcgctagccactcggcggggttgacgctgccatcatatttttcggcgatggtgggccggaaccttgggggccaacggacattccgaagactcgccacaaaggctctacagccgacaccaccaaccgggggcacggagggctgattcccgcgtccgtgttgaggtgacactctggacgaggaagcgccctccgttgcgtgggcagcacttcggtcattacgccggcgctcgatgctggtgcgggcgtccggccccccacgcagatctttctgggtcgaaggagtcgacgaaggagtggcggccgaatggcgaacagcggctgccgctcgtcgtgccctccgtcttgacgacgcggagccggtggtagcagcaccagaggccttggtggcggaggaccgcccaccagcatctaggcgctgccgtaccgtcatgactaatttggccacgtcgtccagccatcgttgggctggagactccgggtcagggacgacaggcgggtgacgtaagagcgcgcccgcagcttggagcgcgccctggggcgtgctgccgtcgccgtagacgaggaggcgacgctccccatctcgccgttcttctccatcgcccgcgatcggtgaagtcgcggatctttcgaccctctcgagcgcctccccccgcttaggactttggcgtggagggagcggtggagtacgagctcgacggcgtgggttcggctccccgtcgtcgccactcacactcggagagaggtcgtgcgcctttgcttgctcggccatcaggctgaacaggaaaagcttggcgcacacggaagagtacgagagctcagaaaaacacacactgagtcccctacctggcgcgccagatgacggagcgtggggctcctcaccgggagaccgcgcaggcccccctttgccggttcggccggggactcagggtgaaattctaagctctctgtatgtggaaggttcgcgaccgtcgaaagagcataagacacgggcgatgtatacaggttcgggccgctgagaagcgtaataccctactcctgtgttttggggggatctgtgtatgaaggagctacaaagtatgagccagcctctcccttgttctgggttccgaatctggaaaagtccagtccagtccccccctctaagtgggcaaggtcctccttttatatcttaaggggataccacatgcaccatctccctctttttggggggacttaccctaccttttataaagggccgg

SEQ ID NO: 9673 - DNA, 17634 bp, Oryza sativa
ctgtgtttaccaaatagtcagaaagaataaaaacttgatcgatgagtgtttaattaatttaccctccatctgtgtatgtaaaatccctcaggaagtccactgaaactgaggctttccacaagaggtggcacacctaagctcacaataccacatacgcggtccggatggcagagggcaagatcatatgctggtttgactccaaaatcctttgcaacaaggaacacctttcaaccatgaaatgatcgtcactcgtcaggatacagtacttcttttcaaaaattaagccaatttacaaacttatcaataatcaagtaaaataatgcatggatgaaaccataaccaattttgccaatggggcaagttctaatttacatcagcttctgacttatttcatgtttgccatagttatcaaaatgcgttagagacttggggttcatcttagcatttgcataaacttttattggatctcaatgttttctcctgcctgtactcaccttgggaatcgacagcgagtctagaatggccaagaggtcattcatcaggccctgccatgacgcctgtgttaggtcagccggtggctccgagaggccatagcctgggaaatcaagtgcaatagcacggaacccggctgctgctgctgcaatcatctggtgcctccatgagtaccacacctcagggaagccatgaacgaagagcagagttgcagcttcacctggaataaccaaatcaagaagctgagctgcattctttcggaagagcaaaaaaaagcagagagatgctgatgtcaacaaaaatgaggtaagattcagaccttttccaatgtgagctatgtgaagcttcaggcctctgatgggcaggtaggagtgctcaatcctctgatccattgatatgttctctccaacgtcagtctgatttgcttgagattatataggattatagcaatttatgggccgaacttttggtcaggctagtaacggatggatggcacaaagatgcgcacactttgtgtgaagcatcttctgctgatgtcttctgctgtttttgtcagtttgtggtagccagagacaagatgctgatgtcttctgctgtctgtattttaatactccaagcaacgctgcaaaatgttaactgaaaaagattccctctgtacgttcatcagtcaaataacgttactgaattttcatggtctatattactcgattttgactattacttgttcaaatacagtcattaaattgatttatgttatctttcacatgtgctgaagctttggtttgaagcaattgtttgcataaagaaaccagcagtaacaaatagcaaacagttcgttttactatctgcttcattctgataaagtagggctgtaaaaaaagctcgaagctcgcgagctgcttgagctcggctcgctgtagactcggctcgagctcgattcgtcaacaattcgagccgaactcaagcctagctccaagcttgcgagcttgacgagccgagctcaaatagctcgtcgagcccaaatttccctctgtcaagttcttaaattttcaatacaacagctagtactactcctactcccaatgaaaagctgtatagaaacagagcgtgcagggctgcaccgtgcaggcactagcctactagtactactttactctgcagcactagcctattagtactactagcatgcatgcagctctatttaatagtactactagttgtcatatcatgtttgaaaaagctactagtactagtagtactcgacaagcatgcatgcagcctcctttcatctgtattggttatttgagggcacacgagttaggctcaagaaagctcgaggctcgagcgagccgagctcgagcccatttctaagcttgcagtttaaacaggctcgactcgagctcggcttgagttggtgccgagctcaagcctatataggtaagctcgctcgagctcggctcgttgacagccctatgataaagtctcttttttttggaaggtgataaagtctgtcttttaagatttatcctgatagtcagttgcaaagatagtactaacatgctaagtataatgaaaagtttgagaaattctcaagcaattggcaaattttgattgactgacagttgatggttgcaaacaaatcaagacatttgcaataaaagaaggggagaaggcattcgtgatcctcaccttgactattttaaagatgtaattaccattatcttaaaatagaaaccgagtaataaatgagacacgaccgagtgaatttttgtataggggattgagcgttgtctttaatctgattagtttactatatttagggcatttctaaccctccacctagaatggtgtctatgacattaactacattgtcatgtaggacttttagtttatgtgacactatattaattaagagagagagagtggagagaggaagaaactgggtctcatgcaagacacagcttcaacacgagaacctatgcactagacactatcaagttttacatttggagagaatagtgtcttcataatagatgaagaataaatatgattggtagagaaaagagatgatgtatttattaatggcatactttaagaatccatgggttgtagagtgtagtttctattgtgatgtcttattgacatggcactatagacactgcttatgaatactatgggtttggactgcccttagaattgaaaagtaatagctaatcacaatttcaaaatgtcggaatccagtcatcacaaatgacgatcgaagatggaagcagctgtagaatgtcaacaggttacaggcccctaatgtcattttcgctctaatgttacagttcatcaatgtcaatcaatgaatatggtttaggccatgcttagaaggtgggttttttattgcgagtttgtacggaagtttgagttaggcttttcgagtatgacatatgttgttttaattaaggccctgtttagatgggactaaaacttttaagtccctatcacatcggatgtttgaaaattaattataaatattaaacgtagactattaataaaacccatccataatcttggactaatttgcgagacgaatctaatgagcctaattaatccatgattagcctatgtgatgctacagtaaacattctctaattatagattaattaggcttaaaaaatttgtctcgtgaattagcttttatttatgtaattagttttgtaagcagtatatatttaatactctaaattagtgtctaaagacagggacttaagttaagtccctggatgtaaacaccacctaaatgttggcagtttgacattcagtgcatttcaataaatagccggtgtggtatgtaagtacataaccaactagtagaagattttaatgcacatgacgggtctataattcaattttttgcagaccggaaaaacaataacgttacagcaaaatatgatggttagtcctaaatacatctaattattatcaaacgcaataatcttcaaccacatatgctaagttattttaagctataattacccatggttatagtcactaatcacagcgtccaatagtcacaaatgaggataaagaagatggaagcagcaacatgtaacaggcaaagataagcatttcactccactttgcagcaaagtcaatccatgaacatcagtacatcacataggtcatgtttagaaggctggatatttttatgagtttctgtagaagactgagcaggttcaactaaaacctaacttgccaagtgccaactcaggcaacgtaatcatcaacaacaagtcgcatgtggtgatttcatcaatcttaagatatgtcggctctgttttcaaaggtgtttataggggtagcgcgtttataggagtaaatgtgcacgtgcatataggcgtatgcgtttgtgtttcgaaaaaaaaaagttaatccataaatatgatataggtcatgttcgaaaggctagatacttttatgagtttctgcagaagattgagcaagttcaactgaaacctaactcgacaagtgccaaccaaggtaacgtaaccatcgacaacaagtcgcttgtggtgatttcatcaattttaagatacgccggctcggttttcggaggtgttcgtaggggtagcttgtttataggagtgagtgtgcacgtatgtgtaggcgtatgtatttgtgttttgaaaaaaaaaagttaatccataaatatgatgatataggtcatgtttagaagtctggatatttttatgagtttctctagaagattgagcaggttctactgaatcccaacttgcaaggtgccaaaccttgatgattttatttataaaggtatcagttccaggctacttcttggattccagttcataaaccgtttgtcctgaatccctgaccttcagacaaatcagaaggtgccaatgcagaagagacactaaatcttggtttgttttcatcacctccaagaaacagaaaattctcctataaaaccgaagtgatcactctcctcccgagctcgaaggagcaacaatggcggatcagatcgagcacctccacctccccatccgtggcctcaacctccacatcgctcaagtcggcaaaggcgagatctccttgtgtatctacggacattgaactgttccatgtgttcttcacaaattttaggtgagattttgcgttttgggtggtgaattttgattttgattcttttttttttctggatgcagatgagctcgggacggtggtgttcttgcacgggttcccggagatatggtactcgtggcgccaccagatgctcgccgcggcggccgccgggtaccgcgccgtcgcgccggactggcgcgggtacgggctgtcggggcagccgccggagcaggaggaggcgacatgggacgacctcgtcgccgacgtgcttgccatcctcgacgcgctcgccgtgcccggggcgttcctggtgggcaaggacttcggcgccatgcccgcctacgacttcgcgctccgccacccggcgcgcacccgcggcgtggcgtgcctcggcgtccccttcagccccgccccggcctccttcgacgccatgcccgagggcttctacgtcctccgctggcgcgtacgtgctcgccgccgccgccgccattgccgccgtcgccgtctgttcttgctgctgacgcgaacgcgatgtgtgtgtggtggcaggaggcggggagggcggaggcggacttcgggcggcacgatgtgcggcgggtggtgcgcaccatctacatcctcttctccggcgccgacatccccgtcgccaaggaagggcaggagatcatggacctcgccgacgcctccacgccgctgccgccgtggctcaccgaggccgacctcgacgtctacgcctcgctctacgagaactccggcttccgcttccccctccagatgccttacaggtacacaagccgccgccgccgccgccgcggcggcgcagccaccgtgtccaccattgtcagcgacgaacctcgaaaaaaattacctggctccaatagatagtaattatttaattattgacttatatattactccattcgtttctaaatatttgacaccgttaactttctagcacatgtttaaccattcgtcttatttaaaaacttttgtgattgtaagtatatttaacaatgaatcaaatgttaggaaaagaattaataattacttaaatttatttaataaaacgagcagtcaaacatatttaaaaaaatcaacgatgttaaatatttagaaacagagggagtagtaattactattatgcaatttagttagtactcccttgtcccttcgttccattttaagtgcagccatgattttatcatccttcttatttaaaaaatttttgaaaaaaaaattaaaaacataagtcacacataaacaactatttatgttttatacagactcatggttacatttaaaataaaacggagggagtattggataatttacatggatcctatgaccccgggatgttgaacatgagatcgtcactggccattgctgatcgttgcatgtctccatggatggatcgtacgtgcagggcggtacataggaggccaagccggaaggacgcgaggttcgaggtgccggtgctgatggtgattggggagaaggactacgcgttcaagttcccggggttcgaggccgccgtgcggggcggcgccatggagaggttcgcgccggagctgaagatcgagttcctcccggaggggagccacttcgcgcaggagcagctcccggagcaggtcaaccggctcctcctcggcttcttcaccgagcacccggttgccgccgattgagatcctctctctaccttcgaagtgatcacgcgtttatcactgacatgtgaatctagagtttactggactcactcacatgttagtaataaagtcacgtaacttacaagatagactatcttaacgtaataaaatagggacgtctagaagcaaagtgtaatattgggatcaagtattgtactcgcacacaatttataatccacgtgtaatagtgggagtgaatgtgaccgtgggaataatttgtaatttaataattttaaagtttaaaattagtactacctctattttatattgtaagtcattttaatttttttgggttaaacttctttagatttaactaactttgcagaaaaatatagtaatattttcgaaaaaactatcaagttcaatgttaaatttaaggaaacttatttagtgttataggttgttaaatttaaggaaacttatttagtgttataggtgttaccatattcttttttataaatttggataaatttatataatgtttgataagaaaaatttgaaacgagttataatatgaatcgatggagacaaatatatctcaattaaggaagaagaaagatggtgagcaccaaccagggctagcttcctgccagctatctgccgatctatttaatgcaccgttttctattatggaaaaattagtaaatgaactactctcccgtgtgatattaagttcatattttgacttcttccattcattccaaaataaatttattttttaagtaatcattgcatctaaatttgtaaatttagataataattgaattcggagtagataaaatagagaatagttgctttgggatttgataaatagggtattttatctttttatttcgcattggtatgtgtcggtgacatggggccgggggtatcgtgactagaggcttgggtagccgcggtcacccacgtggcctgaccccctcgggggggtcgggcccgagggtgacgtggccacccctccctctgtctccccgaggggtcgggccgctcccgtttcggccccgagggctggggcgccccgaccccctgtggttttggcgccacgtgtgtgggttaggtgagcaccgcatttatagcaggttggacgagcgcgtcacgccgcatttaatgcagcgcagcgcacgcttatccggtccgtgaccggtcgcggtgtgtgaccggtcacagaccggtcagatcgcgggttaggtggcaacaggcggcctgtcacacgcctcgccccgtcccgtcggaatgatgagagcttcctggctctcgtccctagccggagccggcgtgctaactcctggagttggtatgtcagtcccggtcagatccattccaggcttcagcgcaagtatggcaaggaagtcgctggccattaaatgaaggttgaaatgggcgtccaccgggaaagcgggcgagcggggcaggaggcgtgcgcactgcttgtcagaggtcacttccggctgtagactagccctcattgtaaaaagcatgtttcccttcttaggcagcgagaggcccatgtggtgacccctgaccagagaaaaaggaggcccaggcttagaaagagagaaaaaaaaggagaggggagttgggactctggcgaatgggttctagagcctgaactctctctcgctctccggctctctgtattccttcacatacagatccaccagaacacaggagtagggtgttacgcttctcagcggcccgaacctgtctacgtcgcccgtgtctcgtgcacttcctctctcgctgacgttcctcagatcgagggcgaagaacctcacttagcgcccccggccgaaccggcaaaggggggcctgcgcggtctcccggtgaggagccccacgctccgtcagtatgtatgggatggatgaaaaataaactcattttagaactaagtgagtataataacaacgtttgatttttaatgtatgaattaatagcgtcaaaaatattaaggatgatggtagtatatgcggtaaaaacgtaaagataattcacacaccacgaacgaaaccttctccaccttctgtccacgagttggacatgcaccagcagctagccagtacaaagaaaaaaaaacgtacagcaggtgcggcatccccatctgaccccgcgcgactcacctcacctcccccgtgagttgggatcctctcctgtaatgtatgtgcggtaagtgccaatgacatgtgggcccggaataggtgggacccacatgccagtgacacgtactgcaggtgcagtacagcagtggatttgcatcccccacctcacactcccaccaccgtcacgtcgcccctctgctctctgcactgctgcggcgaggagctagctcgagccggccggaagccatggccacggcggagcagcggcagatcgagcacgtccacctccccgtgcgggggctcaccctccacgtcgcgcaagccggcaaaggtttgccctgcgcgcgcgcgcctcgccgccgccgccgccgccgacgatcgtcgggtgaatgattgttgggctgctggtggtttgcaggggagctcgggacggtggtgttcctgcacgggttcccggagatatggtactcgtggcgccaccagatgctcgccgtcgccgccgcagggtaccgcgccgtcgcgccggactggcgtgggtacgggctctccgaccagccgccggagccggaggcggcggtgtacgacgacctcatcgaggatctcctcgccatcctcgacgccctcgccgtgcccaaggtgacgatgaagtttgatttttcacagatttttatcctcttttcgtagcttcagattaagaaaaaaaacttcagattttcagttttgagtgcgtggccttttgctatagctcgtaaaatgtaaggtataattcataattggttgaacaaaggttcgagatttcgattttttttgtagtttttttttaatcctggataatttgtaagtagaacgcataaactttcagtgtcgtgatccgtaaggtagaaatttggagaggataatttgtctgctattattttcgtcagttgatactactatcagttccaccgaattgatttgaagctggtaaaaaacccacgttggtagcaccaacaaccaagagtgtattgaaggtcagaaaattcagtgcaacatattaaggtgccatttttctattcattctaatataatcggcaatgcttttgccgcctacctttaaagaaagtgccatttttctgtctaaaagataaggatatcaatttctccctaataaagaaatcagctccttataaatttgaaaataaataatgcctatttggtttcttcttgataatttatatgtttctttgggttaggcattccttgttggaaaggattttggggcaatgccagcttacgactttgctctccgtcacccaaaccgcacatgtggtgtgatgtgtctgggcatccccttaggcactgctggtttgtcctttgacacattgccagaaggattctacattttacgttgggcggtaactccgaaactgtcatgataatttttttagtgcactatttgcttataatgaccatgaaaaagaaaaatatatcttacagcaaccaggaagagcagaagctgactttggcaagtatgatgtaaagagagttgtgcgcaccatctacatactattctctaggagcgagatccccatagctaaggaaaatcaagagatcatggatcttgcagacttatcgacaccccttcccgagtggtttagtgaggaggatcttgatgtctactcatccctctatgagaattctggttttagatatccgctacagatgccatataggtaaaaatattttcttcggatatttgtactcgatggtactaagttcaccaatatttgatagttcgagatttgtgccatgcttgttaggtctctgcaccagagaaaaccaattggagatgcaaaattccaagtcccagtgtttattgtcatgggagaaaaagattatgtctttaagttccctggtatcgagtctgctatgaaagacggaactatggagaagcatgcaccaaacataaagatcacctacatccctgaaggagggcattttgtgcaggagcagttccgtgactatgtgaatgagctccttcttggcttcttgaaagatcatcctgtggttatataaatgctattgtagcctcagttgtgcttcacccgtagttcaagttggcttagaaaacgttgtgctatatcatggtatgaatttgtcaacaaactaaggatcagctatggctagtttgttactttcagtaatgcctatttgagcttgttgtatctaggttgtcctgctggtgttactagcaatgtaaagactaaacccattgctatacttctaccatgacttttgcaagccaatgatgtgaacttataccatgattttagaaagtcttactgtaaaagacggagtacgtagttactatgtatacggatgattaatcataattatataaaaaattaaaaaattaacaatcactgtaataagtacttatcttttatgattgatttagttttagagaaatgtttgtagatcacctatctcatattagagaaattttgacctaatcctcttatattagagaaatattattccggtggccgtgcttcctcccttcctcatccttgtaccaaacacaataactcaaactgtcatccctctttcagcctcatcaacccaataaataaataaatatagacttaagtctactttaacccaaaaattttgtgtgtgcgcgtgcttgtgcgtgtgcgggggagtggtggtgggggttgggggccgtggttgaatctttttttaaatactaaaatgagtactcatattcgttttctttttttctgttaaatactaaaatgagtacgaatagctcgaatacaaaaataatcatggattatctcgaatccagataagggcaaaatataattagacacaaaaagaacaaataattaaaaaaatcatattgttttggtgtaaacatataaaggcaattctgaaatgtcatctactccctctgtttcaggttataagacgttttgacatttggtcaaactcaaactgtttcaagtttaactaagtttatagataaatatagtgatatttataatactaaattagtttcatcaaatcaataattgaatatattttcataataaatttgtcttgagttgaaaatgttactactttttcctataaacttaatcaaacttaaaatagtttgactttgactaaagtaaaaaatatcttataacctaaaacggaaggagtagataactaagagtgccaggtagaaggaaaaccttctctacctggcgtccactagttcgatatgtagcagtacaaaaacgtactctctccagactgataatacttgttgttttagataagggtgaggtcaaactttagaatagttgattagaattatttttaaagtatttgtttttcaaatatcactatagattaataaaatcatatatttgttaacatttatatatatatatatatatatatatatatattataataaaaaataatggtcaaagttgtttttttagaccgtatccttatccaaaacgacaattattatcaacccgtagagatgacgcatccccacctcacactcgcactgtcacgacgtcgcctctgcaatctgaacttctgcggcgaggagggagctcgagccgcccggaagccatggccacggcggagcagcagcagcagatcgagcacgtccacctccccgtgcggggctcaccctccacgtcgcgcaagccggcaaaggtttggccgcctcaatttgcgttgcctgcgcgcgcgcctcgccgccgccggcgatcgtcgggtgaacgattgttcggctgctggtcgttgcaggcgagctcgggacggtggtgttcctgcacgggttcccggagatatggtactcgtggcgccaccagatgctcgccgtcgccgccgccgggtaccgcgccgtcgcgccggactggcgcgggtacgggctctccgaccagccgccggagccggaggcggcggagtacgacgacctcgtcgaggatctcctcgccatcctcgacgccctcgccgtgcccaaggtacgtaagctcctcagtttaatcgatccttttacgaatttttttagcaggtttccagttttgagtcctactcgtgcatgcagactgtgaagctgtgtaaggccttcttgctataaaacttgcaaacggaaggcataattcaaaacagaatttttcacttcttgtgtgcatcctggttagcaatttgtaacgaaacatataaacttccactgtcatacacagcaagggagatatttggagaggataatttgttttctgtcgttaactagtactgtagtctagtattcagttggtaccacgtcggtaagcaccaagccaccaacaatcaagattcaagagtatgttagaggcatgaaaaatgagtgcaagatattaaggtgccctttttctgagtaaaagataaaagataagggtttcaatttctccataatgaaaccagctgcttataaatgtcttgccttcagtaaaaaaatcctttagtttgttgtttgctcctgatagtttatatgtttcttctgtcaggcctttcttgttgggaaggactttggggccatgccagcttatagttttgctctctgtcatccaaatcgtacatgtggtgtgatgtgtttgggcatccctttcggcgttaatagttcatccttaaacaccttaccagaaggattctacattttacgttgggcggtaattctctaactatcatgccaaaatattgtgtgcaagattcgcttatagtgacagtggaagaactcgtcttgcagcaaccaggaagagcagaagctgactttggcaagtatgatatcaggagagtcgtgcgcactatctacatactcttctctaggaacgagatccccatagctaaggaagatcaagagatcatggatcttgcagacttatcgacacccctccccgagtggtttagtgaggaggatcttgatgtctactcatccctctatgagaagtctggttttcgatatccgctacagatgccatataggtaaacatcaattcatcagttgtcagcactcataacactaagtttatcagtgtttgatagtttgggatttgtgctatgctttgttaggtccatgcatcaaaacaaaccaattggagatgcaaaatttcaagtcccggtgtttgttgtcatgggagagaaagattatgtcttcaagatacctggtatcgagtctgttatgaaagacggcagcatggagaagcatgcaccagacctaaagatcacctacattcctgaaggaagccattttgtgcaggagcagttccctgagtttgtgaatgagcttcttcttagcttcttgaaagaccatcctatggctgtttagaaactccacattgtgcctcacccttactacaacttcgctacaagaacactatattgttcgatattatgatgtgaattatcaatgaaggaactggtatggttgatgttactttcagcaacgccagttatgtttgaacttgttataccctgtgtctgcggctagtgttgtcagcaatgggaagattttttttgtttttttctcctggctgttaatgttataccctgatcttagcaaatcaaggcattagtactttgacacaaaaacatgcttagagaatcaccaacggttcccttattccatcccaatcctagttttttggaattttggtgaaaaataatgcctccaatagatgtcctatttgaatcctaattgtttggaaaccctttgccgcatcctttgttctatttacttgagggagagcgacgtcgtgtctgtcgtcccctatctctcattcgcacgagatttttctcaagggtgagcgtcacgagcgcatgtgagcgccaggagcacgtgtgagagggaggaaaacgggaaaattggtgttagtttaacagaagtgcccacctttagttttgggatattttaggctttctcttggagagatcaattttttggctacctattttcacttcaataagccaaaaaagaaatctttgggggaagattatacataatctcctagtgatgttcttagggactctttgaaatacagggttccaataatctaggtgattttagtgccacattttcctgaatttgggttatcccaggatcggatcctatatcccttattaacactcccgataatctgggtgattttagtgccacattttccagaatttgggttatcccaggatccgatcctatatccctaattaacactcccggcgattctacccaactaggattaaaaaaacgcgaatattagggaaggacctaatatcaaataattagaaggggtgaggcttcgaacccaggtcgtctattccaccaccttgtggagctagtcggaagactacttgagtgtttctcaaaagagggatgcaacaaaggacttttaaggaggtcacctatcctagtactctaggattactatatgattcttgaaaatccaactaattaacattctttgaactaaatacaccctataagcgtacatatataaataaaaaacaaatctataaattaaatgttgtgtcgtttaaattccaattatatcttgaaccacatgaaaaactcacgttacctcttgggtcacttgattacatgcaaaaagaacaaattttaagacaataaggcctggtttagttcctaactttttctttaaatttttaacttttccatcacatcaaagctttcctacacatacaaatttccattttttccgtttcatcgttccaatttcaatcaaactttcaattttgtcgtgaactaaacacatcctaattagaaataaatgatgtgaaacccaatgcgtatttcttagtatttattgggaaaagaaaatacttcctccgtcctttaatataagggattttgatatttttgtttttaccatttatcttattaaaaacttgtgtaaatataaaaaaataaaaagttgtacttaaaatactatggttaataaagtaagtcacaaataaaataattaataatttttaaaaaaaattaataagacgaatagttaaaccgtacgaatagttaagaggacagagcctacttttgtcaacgagttggagttcgacgtggagcagcaatgaatagccgcaaagtacggtagcttttcccatccacgtcacacttcacgctgtcacgtcgcgatctgctctctcttcccactgcagtgctgccgcgtgagcgtgaccgcgtcgtcgtccacggcgagctcgacaccatggccgccgccacggagcagccgcagcagatcaccgagatcgagcacgcccacctccccgtgcgtgggctcagcctccacgtcgcgcaggcgggcaaaggtacggccgcctccgcgcgctagccctcctcccccccccccccccccccgaccacttcgttcgattccttggcttgctttgcccgcccgccgcgccgcgccgcgcgcgccgccgtagctagcccaccaggtgtttgtttggctgtcgcatgcaggggagctcgggacggtggtgttcctgcacgggttcccggagatatggtactcgtggcgccaccagatgctcgccgtcgccgccgccgggtaccgcgccgtcgcgcccgactggcgcgggtacgggctctccgaccagccgccggagccggaggcggcggagtacgacgacctcatcgaggatctcctcgccatcctcgacgccctcgccgtgcccaaggtaagcgcctggatcagtttggctttttcacaaattttatcctctttgagttactgagtaaatgagaggcaaaattcataattggttggacaaagtttagaagtttcgatggatttttgtagtgtattgtttgagtcatggataggttgtgaccaaacaaacaaactttcaatatcgtaagggagagatttggagaggataattgataacactatcagttctaccgaattgatctgaagctggtagatgtagcaccaacaatcaagagtatattagaggcctgaaaaatgattacaagatattaaggggcacttttttttctgtataaaggatggaaggatatcaattattccctactaaaccaattcctctttttttttttattttcttgtgataacttatacggttcttcgtgtcaggcattccttgttgcaaaggattttggggccttggtagcttatgattttgctctgtgtcacccaaaccgcacatgtggtgtgatgggtttgggcatccctttcggtaacgatgcttcatccattaacaccttgccagaaggactctacatttttcgttgggcggtaattgtcagactgtcatgataaaacaataagtgcatggtttgcttgtaatgacagtaaaaaaaactcatcttgcagcaaccaggaagagcggaggctgactttggcaggtataatattaagagagttgtgcgcactatctatattctcttttctaagagcgagatccccatggctaaggaagatcaagagatcatggatcttgcagacttgtcaacaccccttcctgagtggtttactgaggaggatcttgatgtatactcatctctctatgagaaatccggttttcgatatccactacagatgccatataggtaaacatcaagtcattaattgtccatactaagtagtactgagcttaacaatatttgatagttcgagattttgtgctatgcttgttaggtctctccataagaggaaaccaattggagatgcaaaattccaagtcccagtgtttgttgtcatgggggagaaagattatgtctacaagttccctggcgtcgagtctgctatcaaagacggcactatggagaggcatgcaccagacatgaagatcacctatatccctgaagggagccattttgtgcaggagcaattccctgactatgtgaatgagctccttcttgcattcttgaaagatcatcccgtggataaatagatgttattgtagactcaattgtgcttcacccgtagtacaagttggcgatggaaacattgtgctatatcatgatatgaattgtcaacaaataaaggatatattatggatggtttgttactttcagtaatgcatgtttgagcttgtgttgcgtttagtttctcctgctaatgttgtcagcaatgcaaaggccaaaatgttattatattttaacctagtattgcacttaaaccatcattttagcaagccaatgatgtgaa

SEQ ID NO: 9674 - DNA, 5552 bp, Oryza sativa
ttggttggaaaaagtcagcttgcaactcagtaatcaatgttagcattgacacacttcaacatagaattgccacattccccaaatacttcagtcaaggtgatacagtcaatcaaggagtaaaacaacaccaattcttcaaccaaaacataaatcaagctgaaggcaacaagtatattctttcaatcttaaggccatgacagcatcaacatgattataatttatatgtcatagataactgggcatatgtgcacagcagattaatacagcatgaacagattctgcatagtttacatacagaactcatatttttagactacccatgcacctagtagatttaagctaaggtttacttaatgataaccaacaaaataaatgataatgctgcttgtctcaaacaaattaattgcaactcaaatattaagaactcttcgcaatatttattacatgatactcaaatattaagatcttatagctgaccaatagaatagacactgaaaagcatttcaatatgagacatcataaagcatggaaatacgggaacacaatagcaaagttctttatcagaagagtataatgataacagattgcaataccttatcaaaagttaaaagtgagacaaactagggatctgcagcatttggattttcttcctggccaagagccaacacagctttcttcagaagggcctcaattgacagatgtgagttctcaacagcctttgttattgcttgccatctctctccatgctttggttctgctgcaacacatctttgtaggacatccttttgtgtatcagcatttccatgttgcagttcaaatttgtagtacaaggcccaaaaatctccaatgtctggagcaagagtaacagctctattcaaccaacttctagctttatcaaccttcctatcatgccagaaaagtttggccacagctgcaatgacatggggatcatggtcacatcgttttatagcatctgagctctttgctttacgctggggacgtggcaccatctctatagctgcagcccacaaaataccacttgtcgggcattcctgtaatgccttggctagtagagcatcagcttccttcttgttcccatgtctcaattcagccctaactgctgcaagccagagttcaggtgtagctgggttcttctttcttgccatggtgaggacagcacgtgacttgctcaagccatttatcttctcctctagattagctagagagagccaaagagggatgcaactcgggcagtgcttcagtgcattctcgtaaacctcctttgccttggatccatggccaagccggtcttccatttgtccaagcattaaccacagcttgaagaatgaggggaataacttcagaccttcctccaacagcttcctttcttcgtctacattccctaactccctttcaacaatcgcagatttcatccagaccctctcagtgcctcctctttccctggcctttgacaaaagaattcttgctctctctggttcattgttctcaaactcaagcttgaaggcagctagccagatctcctctgaattggggagagaagcataagcttcctgaagaatggctcgggcagccgggacatctccagccagccatttctcctttgcactcataagccataaaacttctgcacgtggattgtaggtaacagcctttctgaggagattataaagagactccttggttccatggctcttctcaagctgagccgctttcagccaaatactcttcttggaaacgaagacactgagtgcatgcgcatagatggcacgggctgtctcaattgaaccacgcttcttgcattcctcagcatcggcaacccatgtgcgttttctgtcttcctcatcaacaccaatgccaatagtgctcttaacaatagcctggcaagtcaatacagatccagcacgctcagcagcttctgcttcctttagccatgcctccctgtcaatatccaatccttctctctgtaaagtttttatacttctctcaatcaccttgattactgactgggtgtttccattagcttcctccagctttgcagctgtaatccagatggcaggttccttaggaagcttttctcttgccttgttaagtaccttctttgcttggtcatatgtctccagccttgctagggcaagccacagttccacatggagtgggcagcactccacagccctgtgaagcaacagtcttgcatcctcctcatttgcaagctctactactgctttccacagtctgactgaatcaggaatgtgttccaacccttttctcaaaaccctgctcttattcaaatcactagtttccaactttgctgcctgcaaccacagcttcacagaattgggaattgccttcacgcccctagcaatcactgcctttgcctcgtctgggctggccagccggcatgcctcgacccaaacatcctcatttgtggggcactcctcacagccacgctggataagctgccgagcaacctgaagcttgccagcaacctcttcaagcctagcagcagcaatccatcctggtggatgcttcgggtttgtctgtgtcactgacttaagcaacaatcgcgcctttttaatgtcagaaatctcagcatcactagtaatcttcatacttttcaggtccgtcaagtaaccctttggatcaacaacagtaagaccagataccgaatccgacaacctgtccagcttcaaggagagcacggtgccacgaccttcgcccacagccgtcagatcggtaaccggagtctgcgcccatggcgtctcggtgccaccagctgcacggctcttgggatccagtgccgtgacatgctcctgctcctgccgagccttctcgagcagggtgtccggcacgggaacgaagctctcaaatcgcttcttcttgttgcgcagcgagtagtccccaatttcaggtatgctttcccactcctgcgccgacaaatcgaccaacttacgcttcaaatcagcgaattgctcggtgatcttagggttggaagcacggtacttctcgatctcctgcttcagccgcgcctcccgccgatccttccggcgagagtccatcctctggtcgatgctctcccagaccgcatccgcctcgcggtcgtcgtcgtcgtagtcggcgttggagaacagcccggcgtcgttgccctcgaactcgtcgaacttctggttctcgtcgtaccccttctcctcgtcgccgccatcgtcgtcgccgtcgtcgtccccgggtggcttcccacggccgcgcccgacggcgggggcggcggcggcggcggcggaccggtcaggcagatcgggcgccgcgcgggccggcccgatatccgaacgggtggtgaacccggtggcgccacgccccagaccggccacgtagttcgggggcggcttggagttgaggaagtcgtagcgcgcggggcgggcgggcggctgcgccgacggcggcggcgggggcgggggtgccgcgggggtcgtcgtcgggccggtcatccctccgagcagggggaggtggagtagcagggaggaggaggccgagacccggagggaggacagcagcggggacggctcggccgggaggaggcggcggtgggcgaggtagagccgcagctgctccggcgggacgccgccgcagacgcgggaggcggaggccgtgaggtcggcgagcgtggcggtggaggggtcgaggtcgacgtggtgggtcctcccgtccggcgcgcggacgaacaccatcgcggcggcggcggcggagtagattggtttgggtttttgaggtcgtgaggaagaatacggaatcgtggaattggtttaactattttgtgacggtttgggacctttgggtgaattgagtcggtggcgaggagaggcggtgggctacgtgggccgttccatggtgggctgatcacctgcatatgggccgtacaagggctcatgggcctgtttggctcgtgtttgggcccatcgcctgaccttcccttcttttgggttgggtttctttggatttatttttaagatgggcttgttgttttatcgacttatttgttgcgaataaaatcttaccgtgccgtatcatcaatttcataggtcatgactctgctgcatctattggaaaaaaaacatatttatattgtataaacaaagaaaacatgcgtagttaggatgggctatcgacgatcacgacaacaatgataataacctaaatagagagctagagattcttataaagattcttataagacgcttgtgattagtcggctgatgataatctgaaagggttaagtttcaagtttctagctccaagttcataatctcaatttttatgtacatatatgtgctagcacactacaatttctatatgtacataaaaatcgagacaatgatgtaatgaaagttgtggcctagagagatatcatttaaagtaaaatgatggaataatacaatttaattaaagattcgatacataaacaattgatgaaatttgtaaccgagggagataaattttaactgaaattgtcaaactataaatctgacgaaagattcattcaaattcccaaaaaggcatacattcactcattttatctgccttggtgccaaatttaacgaaatttatgtacccagtttcaaataaatagacgactatccccattttcttacaagttacaatccaccgcaagaccacaacaccaagattacccgcctccatgccaatttcaatgaaattcgtgtatccaattttaaatagacagacaacactctttatttcgttacaagttagtacatctaggtactatacaagagtaatattggagtgtgtaaaaaactgccgtagattttttaagtgtaaaacttcgagattaaattatattataattgaagtatagttgtactgtaactgtattgtaactacggtataacttatataaaacatgtatttaaccgtggtttggctgactagcaccgagatcttgcacataacatgtatgatatttttgtagcaatgttatctcttgaatgtacaaatctccagtaacccgatgaccataaatctgaaagttttgagagaaaaagggtgtgtttagttcacgctaaaattagaagtttggttgaaattgaaacgatgtgacagaaaagttagaagtttgtatgtgtaggaaagttttgatgcgatggaaagttaaaaatttttttaaaaaagtttggaactaaactccacggaacttgcaaaagttttctagcaatttcgatccaaaattcaacggaattcgtacatacccagagctcaccactcccgaaacgccaccaaaagaccaaacccactcgtttcccctccccccctccctctgactctctccccgtcgtcgtcatcgtcatcgtcgttcgtcgtcgtcgtctcccctttccacggccgcatcccattccccacccaacctgaaagcgacgccgccgcagcgcacacgcaggaggcagcagcaaagcgaggaggggaggaaaccctccccccgcgacagcaacgggcggtcgcttccagtgacctaagcctccccc

SEQ ID NO: 9675 - DNA, 25206 bp, Oryza sativa
  unsure (1)..(25206): unsure at all n locations
aagcagatggtgcagctttgctacttccactagggtactctcttttagagaagtactctacaggatacacggtgtaaggatcatgagcagggccggtcctgagattctgaaggcccagcgtgaaactaaaaacggaggcctttattataaaccttcaaataataattaccatataatataaatatctttaaatagcaatcaatattcgtatttaaaaaatcatacgcattatattaaaattttctttgaagatttgtaggcgcagaattattgatgatgtcctgataatatcagaattattgaagtggctgtattactcttgagcatcctcaacacacctacttgtttttgttatctattgcatactttctcaacagcataatatcaaggaacaggctaatacttaagaaaatattaatactagattcgtaaattacaaggctacagaagtaccaaattagttgaaacaaatctaaccaatgtgaaaccagcaaatcactgaagtttgtacggttataaccttaaattatcaattgataccttgtaattttgttataaacagataattccactatgtaatctcgatctagatctagataggcagtatagcgtacttactgatggcggctagagcccagcaggcagcagtgccgtggttgttcttcacttccgcgacgacaatcgatcgattcagcaccagcacatatatagcagtcagcagttgatgcgacaacagatgtgctcgtccagcatgccgatcaaccaagataaggctgatatgctgcgcttgcgtgtggcatcagcatggcagtcggcagatgagatcgatcggctgatcgttatactcgcgatctcgcagttgcaggccggcgaaatcacggagaaacatcgcctcacgttgcgcgctggaagatcgctactactcgttgcacagataggtgggggccctgggaatcgggggcccggagcgatcgccccattcgacccccctcaggaccgggcctgatcacgaggcccatcattgtccaaccctcaatatgatgtatcattgacaggtcttctatatggtggatcattggcaggtcttccatattgtggatattggtcttccatatggtggatcaatggcaggtcttccatatggtggatcattagcaggccctccatatgggggactattagcagatcgtccatatagcatgaattccttgttaggcaagatatcaacaggaggaccatcaacaggggcaaaaggtgtcggattattggaagaacttccatctctgagtgtcctagttcaaagcctcgaagcaatctctgtcagggctcctctttcaatagctggaagcccagcaacctgaaagcttggaacaaatgtaaaagcacaatgaaatgttaacaagtaaaaactgcagttataaaagtaatatatggatctctggtgtaggtatggccaaataaattacctgcacaagctcctcatcaaaagacaggtacttaggtttatctgcttttgagtagactcggatttcagccccagtccgtcttctcatttcagtaattacctttccaccttccccaagaatacaaccaactttgtttgatggtacaacaagccgtgttgtcaactggtggttctcagcaagtgtacttgctttactatggagcaaaataagcgcctcaattgttggagacactggatcatctggaatctggaaagaatatgtaggaggatataaaattgtaaagactcgtgataaaaatggcaaggcaatgccaattggaataatcatctgcatattacctcctgagatgaaacaacaattaacctttcttcagaagcatttttgccaacttctttaacctgaccgcaagcacctgtctgcacctaaaatattggattggatgcaggttcaaattgaatgaacaggttttataaaatttagaagcgcggaaatgcaccatgccacacactaacaacttttattcaggaaacaggatttagttctgtatttattccagaaaagaatgtcttccatgtaatcagaaaataagctaatggaataaatttagttctttgacaaaatccattcacactggaaggtgggtctccgccatgatcaagtgccacaatatattgaaagaaattaagggaggtagcagcgaagaatcaagagagtgcttaaggtgaaaaaaaaaaggaaaggagaagtgatccgtaccagaaattgatcagttcggagcagttggccttgatgcagcggagtcccctacggacgggaggccttgatcttgccctccactgagtatgccttgtagctcaccacgcgccgtcccctcctctctgggtcactgaagatctgggggatcacatgccaccatcaccgtcaccaaccttggccactactatattctccttcaaagcaacagatcaagtggtcaacaaggtattcactgcagcttcatgaaaattacaagcagagaagcagtagaacctgaattttatctgtggatccttccataccagaacagcaccaaagaagcattctcttcactctcttaaatgctcgcacaacaaaacatggtcaaaggagcttccactagcattcaaacttcatagatacaatcatttaatcagaatatttgcattaacccttctttataagactagcaaaatgcatttgcgttgttacggaattaaaaatcataacagcacaatgcagagaggaaatctattttgaatcctagagcttaattttagaattaatttgagttttttgcttgccaagtttacgctccatttgttattaactcgcaaggatgattatggttgagagctccatggtctgtccgtgatttccactgttctatcatacaattggtttggagaagggattgacagtgattaaanatgtattggaaaaggnattnacantgattnaanangtnannannntnanantnnnnnnnnnnnnnnnnnanattnnnnnntnaccaccaccactactccttttaaagtagtatagatttacagctattatctgtgggtagccaaaagattatagagacaaagaaatcatgctgtcatcctttattccatgtttaagaatgagacagatcatgatactgaatgtcccaggattaagctcaaaacccatcgagcacaggttgtgaaacatctttggaacgcttcttgagcacaacagtattgttctagaataataatgtactccccaaaatataacaacttctctaccaacattctcttcccaaccaatcacaaccctccaccattcacttttcccacctacctccactactcatgcaatcacaaccctccactactcacttctacctactttcttaataatcgtgtccaactctaaaacttcttatattctaggatagagggagtatgtggtgttatccatctcactccttgctgcctcacacaggtaaatagaaacatcattccatcagatatttcatgattagtacatgtgcataataatacgttgagataagataatcagatcggaaaccattctatacaatccaatcttgttccataaaaaatatattgtgatgatcagtactgcatttggtaaagaacaaagcttcagacatatcttttgttcagttaaaaaacaagtcaaactattcaacacctaaacagtacacatagatgaaatttaatgaaaccctataaattgttttggatctaatgtcaaaattactgcctagacacattaagtttgaaactccagtcacaaatccctttatgatccgttagtagagataacgacaaacttttatgttttttctggcatcaacagcataacataattgcttgtttacagtctaggaaccacagtaaaaataattcggagaggtggcatacatacctcgctatttacacatacagagaagatccctcctctaataggactgtaggagaaaagaattccaacacagaatttcaaagctgcaaaatgcttcagcagctcaaagattctataaaggacttgtatttttcagggagaaacctataatattcttgatattttcccccagacaaaagatctataaacaaggaagcagtggatgcttcgagggaaaagtgcttctcatcaatcatggaaaggtaagtgccagccctggttatctcacctctctgcaacagttccctaacaatgaaatttagcatgccagagtcaacagtacagccattgtcctccattgaaagaaagagttgatccaattcttctagcaacccctgtcctataatattttcagccatcaacctgtacgtccaataattcggcactaaaccgttagacgagaaagcaacaaacaaatccttggcttcatcatttctgccaactttaagcaatgcatcaatcataatgttgaaagtcctagcctcaagcttcaaatccatcaaacataggttctgaaacatctgaagtgcatcatcagtgagtttgtttttgcaaagtccatgaaggattatgttgtatgtgctaagttcaatctgcgttccactttcggtaatcctgacatagagttcttttgcagcagcagttcttctggtttgaaataaaccttgcagaattatgttatacgtaataatatcaggactaacaccactgctctccatctccttaaaaagaactaacgcgtcttccatcctactaattttgcagtagccattaatcaaagtgctataagtaacagtattaggtttcaacccaactgagaccatgccagaaagtaacttcattgcttcatccatcttacctgccaagcaatatccatcgatgagtgtactgtatgtaatgatatcaggcttcacaccaatacgtaccatcaggtcaaagagtttttcagattctataaccctcccttctttgcaatgactgtcaattattgaattaaagaaaatagtgtccagacaaatgcctcgatccaacatttcaagaaataactattatatgtcatgcaatcaggcatgacaccattcttaaccatcgtggtaagtacctccatggcttgtccatagcttgacccttgcataacgcagcaataatagagctgtaggtcacaacatcaggtaaaatcccccggtccagcatttcatggtatgtactgtaagctttgtctgaatccccctctttgaagaagccattgatgacagtggtatacgacaccacatcaggtgggctacctcctcctcgatcatcagccatcatgtgcagcaactcgagagcttcttggcttctgttctcatcacacagcccgttgagaagattattgtaggagaagacatttggtatgcaaccgagctcggtcattctgcggagcactatgtccattgcgtcgctcgtcctcttgtcggcacagaggcccttgagcagaggagtgaaggtgatggcttccactctaaatcccttcttaatgacattgcccaaggccgcgaaaccgaggtccaagcggcccgcgcggcagcagcaaccgatgagaatgccgtaggtgcacaagtcgggagttacctcgtcggcgccagctcgggccatgcggttgtagcgggacacggcggccgcggggctgtgacgcgcgacgtcggcgagggcgcggttcaagccgtagatcgaggcgcccctgccacgccggagcaattcgtcgaacacgtggcgtgcgtcctcggcgccactgccccccgcgcggcctcctcgcccttggatcgagccgtccgagcgaagggcgccaacagcgcgggaagcggcgcggcgcgccatgcccgccctagctgacaggtgcagcagcagcgccggcggaaaccaacgccgcaacgcagtttgtcttatacggagaggtgggcggcaccagtggaggatagaggggaggggaaggaggagatggcagggatggtgtaggagatcggcgacgagcagggcgtggagagaatgagagatcggccggcgacgtcggggcagggagatcgcgatcgatctcttctgcgcggcgctcttggggaaaaaaaagacagaaaaaaactaatgctataataatgattatatttattttaaagttccatgggagttataaaagatagttctgaaaataaacaatgtcccttctctcccaccgtaagcgacaacagctgcgcattttcctactgcgcgccgtgaaataatatgatatggttggatttaatttttattaaattaatcatgattaataatgctctttgaatattttttaaaattttcggagcttaatttctaattttgataatataaacaccttttcaacatttatttaaataaaattcccaatttctctatgggccattttcagtccatttactatctcagcccgcaaataaattctactttacctcctccaactcctcctctgactacgtttgttcgaccctccggccttccctcggcccatcaagcatgcgcggcctgaagatggaggcgttctgagccgtctgatctgatggacagcttggatcgcctccgtgtcgctgaagatacgaatggggaaaaacctaaccctccctcacatttccttctctctccatatcctatctcccaagcagcggcggcggcgccctcccataccacgtgcgatagcagcgacatcgttccccgtgagcggcggcggcggcgctcgagcggattcggcggcatcggcagcttcccgcgggattgagataagatttgtgtgctttttattattttttctgttctttttctctattttttggattgtctagttggatttcaatcggatttacggacgaaaatttaatgtgacgaaaggaaaattatgaatattttaattagttaagataagatttaggctatctcttttggtgatgctctaaaataaaagcatagtttaaatttgctatagtctgctacatcctcagtttcatattatatgtcattttgattttttttcgtaatcaaacttctttaaatttggctacatttatagaaaaatatagtagcattttaataaaaaaacaaacatattataaaaatatattccatgctacatttaatgaaactaatgtggtgcttaaatgttgctaattttttttctataaatttagtcaaactcaataaaatttgactaagaaaaaagtcaaaacaacttataatatgaaacagagggagtacgaaataaaaactactccctccatccaaagaggtaataacctattaccgaattagacattacatacgactacaaatctagatagcctaatcaaattcgtgaatccaaataatatctaatctagtactagattcttatattttggaaggaaagaagtacttcatccgtcccgtaatatagcaatatagtatggaacgagattgttatattatggggcggagaagtagtaaaaatgttattgcaagtttgcaactgtgccaaaaccggtgtggtgttgaatgaaacatatgttaacgtgataaaatgacattattaaactgtacaaacagtttaataaccgatgtattgattattgggtagttagtagtagtgcatgctaaataatgaacgtaagggcaagctattgctcgttgtgctctgtgctaaggggctcaaattgtggtgtagatgacggttcaagctaaagtttcagcagaggataatgagaaggatatcatcttaagatcataagatgtaggatcaatatatacctactgcctagataccttaagtttgaaactccagttacaaacccctttatgatccgttagtagagataacgacaaacttttgtgttttttctggcatcaacaccagaagataatagcttgtttacagtccaggaaccacagtcaaaataattcggagaggtgacatacatacctcgctatttacacatacagagaagatccctcctctaatcggactgtaggagaaaagaattccaacacagaatttcaaagctgcaaaatgcttcagcagctcaaagattctataaaggacttgtatttttcagggagaaatatatgatattcttgatattttcccccagacaaaagatctataaacaaggaagcagtggatgcttcgagggaaaagtgcttctcatcaatcatggaaaggtaagtgccagccctggttatctcacctctctgcaacagttccctaacaatgaaatttagcatgccagagtcaacagtacagccattgtcctccattgaaagaaagagttgatccaattcttctagcaacccctgtcctataatattttcagccatcaatctgtacgtccaataattcggcactaaaccgttagacgagaaagcaacaaacaaatccttggcttcatcatttctgccaactttaagcaatgcatcaatcataatgttgaaagtcctagcctcaagcttcaaatccatcaaacataggttctgaaacattcgaagtgcatcatcagtgagtttgtttttgcaaagtccatgaaggattatgttgtatgtgctaagtttgttggaaatttggtcataattcggcatattttaatccaaaataacaagataataaacatgatatttacaataggatttgatccagtgatagtggtgaatgtaatcaacatgagcatgcttaacgttgaataagcatcaacaatcacataatgacacaatgttgacattgcgatgaacattaacagtaaaacttctaattgaaataatgtaataaggttataccccaagaatggtcctccgctggagtttgaggcagtattgcctccgttggtgttgacgggagtctccttctccttgtctccagtgttcgacatgttggtgaagatgaagtagatgttgacgaacagtgagtagtcgcgccttgcgctccccaaaaacctgatcgcccgcccgtctgtgcaaacgtcgcagcaacgcgtggtttcggaggcctactctcccaacgcgtgtgcacacactcgtcgggatgggattaccgtagcagcaacagcttttgaaaatggatgaaagtgtgtcttcttcttctcgcgggagatcaaatccattctcattttataagaggaatggaagatgaagagtaagagtcatggaataggaagaggaatggagcaactaattgtcatcaactagccatgaaccatcctccactacacaaccatcaaccaacaatcaattaagagtaattgatgtaagttaccaatggaataggaagaggaatagagcaactaattgtcatcaactagccatgaaccatcctccactacacaaccatcaaccatccatcaattaggattaattgatataagttaccaattccttaatcaaatggattaattctcaaaactcttcatcccattgatatcccatagaagaatgaattcacatgaattcctagcataatgagccttggaatttatttgatttaattgatttaaatggattaattatccaattaaatctaacaaagttcaatctgcattccactttcggtaatcctgacatagagttcttttgcagcagcagttcttctggtttgaaataaaccttgcagaattatgttatacgtaataatatcaggactaacaccactgctctccatctccttaaaaagaactaacgcgtcttccatcctactaattttgcagtagccattaatcaaagtgctataagtaacagtattaggtttcaacccaactgagaccatgccagaaagtaacttcattgcttcatccatcttacctgccaagggtaatgatatcgggcttcacaccaattcgtaccatcaagtcaaagagttttccagattctataaccctcccttctttgcaatgactgtcaattattgaattaaagaaaatagtgctaagacagatgcctcgatccaacatttcaagaaataactcttcagccttctcccatttgtcaaagatacagagactatgaattagggagttataaacaatgctgtcaggtcttagtccttcatcgatcatctgctcaaaataaagcatagcatcttctactctacctgacttgcaaagtacatctataactgttccataggtcactgcattcggattcaatccttgctgcctcattttgctgaatacaagcattgcctcttctactttctcttgtttagcgtatgcacatactagaatgctgaaaacataatgattagggtggataccgtttcgtaccatcaaatccaagagaccatgcatctcaacaagggctcctttggtagcatacccctgaagcagggtaccataggtagtaatatcaggctttaggcccctcttggtcatagaatcaaaaatctttcttgcttccgtgcatcttccgttcttgcaaagataatccatgagcgagttataagtaacaacatctggttcgacaccatcactgcgcatctttttgagaaatacaatagcctctttcggctgccctgaagagcaaaacccatgcacaatactattatatgtcatgcaatcaggcatgacaccactcttaaccatggtggtaagtacctccatggccttgtccacagtttgagccttgcatagcgcagcaataatagagttgtaggtcacaacatttggcgaaatcctctggtcaagcattttgtccagatccccctccttgaagaagccattgatgacggtgctgtacgacaccacatcaggtgggcagtcacctccatcatcagccattatgtgcagtaactcgagagcttcttggcttctgttctcatcacacagcccgttgagaagaatattgtaggagaagacatctggtatgccacgacggagcaattcgtcgaacacgtggcgtgcgtcctccgcgccaccgccactgccccccgcgcggccccctcgcccttggatcgagccctccgagcgaagggcgccagcagcgcgggaagcggcgcggcgcgccatgcccgccctagctgacaggtgcagcagcagccagtggaggggaaggagatggcagggatggtgtaggagatcggcgacgagcagggtgatcgcgatcgatctcttgcgcagttgtgtgcggcgctcttgggaaaaaaaaccagaaatttccgttcagaatggcccacttttattttttttattgtactgaaaaattacccttgcgttgcaatggaaaaaaaactaatgttatgataatgattatatttattttatagtttcatgggagttataagagatagttataaaaataaacaatgccccttctctcccaccgtaagtgatagcagctgccatttcctcatcacggaccgtgaaataatatgatatggttagatttaatttttaattaaattaaccatgattaataaatctcttttaatttttttttgaaattttgggagctttattgctaattttcataataaaaacatcatttcagcatttatttaaataaaaatctaaataacagttagtgatgctctaaaatgaaagcacagtttaaattctatagtctgctacatccttcgtttcatattatatgtcactagcaaatatgcccgtgagttgcaatgggtgaactaaaaattaaagatttgcactggttttaggagtttgaggggacaaattaagggagctaaagcgaaattattctgtgcggagcgtacacatggcctatggggtggcccaatagtgcggccggcctgggaacaattcagaggcaacttaaaggacctaaagtgaacttatttcacgcggagcgtacatgtggcccaatagtgtgggcaacctaggagtggcacccggcccaacgcgggagaagccgtagttgtccgatctgatggacggtcctgattgatcccgatctatataaaaactcagcagcccaaaccctaactctaaaatcatttttcctcccccctatctctctcaaagccaccactccccttcccttcctcaccggcgtcgccgctcccccccgcgcgcgcgccctcaccggcggcgccgctccatatccccctcttcctcctgtctcgccggcgcggccacggggaggcggcgacggggagggcaccctactggttcccctcgaccactccctccccctttctccaccggcggcgctctccctcccggcgtggaggcggtgatacattctagtataatgaatttggatagatgtgtcacattcacctaaaatctcttatgctatgtaacgaagggagtattgcaactttgcaagtttgtaaatgtgccaaaaccggtgtgttgaatgaaacatatgttaacgtgctaaaatgatgttaacagtttaataatcggtgaattgatttttgcgtagttagtagtagtacatgctaaataatgaacgtaagggcaagctattgctcgtgcacacttgccatgtgcactgatattttgtttttgacattttggtttttagtaataccccttcttttttttaaaaaagtctttgttcctttataaaggaaaggaacatcgtatcaatatcacacgttatactgtcatatccgtatacaatcgcttgtgcgcataccatataagatcgcttgacacgcagtaactgatatgttgagctgaccatggaatctcgtcaaattcatacccagaacgcagaaacaaatgaaaaggtaaatcacatgcacgtaacacaagtgaatccaatacaaaacattattacacttaccgaatggtgtacccggacacaatcttaaagaaactaaaattaacaataaatcccttaccttactcattaatattcatagtcactaggatttgaacctagtagataacgttatgcacccacaactccttcacaataattcctttggtgcttccccaaatttgatatccttaacttaagccaagtaatcgagcgtctaatatcaaatcttaccaataaatttgtggagtatataattaccaagtttccccttttcttctatcttttggttcattttcacttcgattttcaatgaaatataactcatttgtgcacgacaaaattactttgttctactgcttaatcggcgtggcagcaccaagtgcacaaatgaaggcagaagcagtcttaccattcagtgttcgatcctagcctgccctacaccatatcttcaaacaagaacacaggattgcattgacagactcgagcacacatttttacttcacagtttaatttaatgaaacgagcaacttctcctaaattacgataagttcttaggatacgttatatatttgtattgttaaatataaaataggggctaaaataaactacatcagagtctatttttacaaatctgactaacaacggacagtcctgtatttctcctctcttcagtctgcaaaaatggacagcactcagcacctagtctgctaccagccatactagaggctcaggaacatgaagtagataaattgtggactagaagtctagaacatatataaattataaaacatggaaaaaaattcccactcaacgtgggcaagcaaattagcatgatatgcatgaaaataaggtgctaacattcaaagatagaaataaacaaaattcattatgtggtttggccatatgtgtatgcaacaaagttcttcattttaaagaaggtgctataactgtgtgaatagaactatgttcaaggcagccaccaaagagagtttggtgttttccccaaaatcatatatgattcataaaatcttgtttgtttaccaaattctgtaattgcatatatgtctacttaagaaagcagggatgagactacagccataccagctggctcctgctgtccatacgccgcaaaggaattactcctaagagatacattgcccatcaaataattcggaacataaatatacttgtcttgcttataaacttgaaacaccttcctagagttagaagggtatagatatccaaaaaactctgatggttcgcaacatagatagcagggctactattcggtggcaggttctccattccctcgacgtcaagcttgtagaacatggaaattgtcagagttgcccaaatctttgcaatgtagtgctgagctctcgaaaaaaatttgcaaatatacttattttttcaataatttatgtttatatacatgcatggagaggttttataaaaatatacgcatcccgcgaaacggaaacgcgggacagcgacggttccgcagattcaaaatacgggaccgacgatcctgcgcggaaccgtcatggtccggcagctccaaaacgcggaatcgcgacggtcccgcggttccaaaacgcggaaccgcagtggccagcgactccagcactgtgcagcgcagtttatacactgttttaaccctgtgcagcactgttcacacattgttcatggtcggtgccgcgcctccattgtgcggaactgacccgggaactgtgtaaaacagtaccagaaacagtgtcaaacagtattaaacacagtgccatgcagtaaaaaaatgttggcgccgcggttccgcacactggcgctgcgggagcgtaccggttccgcgttaccggcaagcgagactggctcggtcccgcagccccattccgcgcgaacgcctcggccgtccactccgcgccgccacgccatacttttgttgcgctcccgcataaccgatctgcggattagttatattttcgcaaattcttcatactagtgtatataaacgtaaatctttttcaaaaaatgggtattttcaaatttttttcctgaactctcctccggtatcggtcaaataggagcacaagtggatgaaccacaaccatggcgacaaacaaaaagattgctgcaactgcagccaccgcgtagaagcaaacccctctgacccttgaaatcacatcgatgtctggtaaccaaatcaacaacaaaagtaaccacataagaaatgcaattctggaattcggtatgaatcccatgagtttgtccatgtacatgattttatttgcatccgcacattacatgtaaactgtatagacatagttttttgttttgcatcatacatcttagtaagaaatatccattgctgctcaaattccatgaaacacaaatgcacaatagctagtattagctgctacaagttctttagaaagtcttaacaactgcctgttctcctcaatttatactaaacattctattgacaccttcaaggttggtgtggagctaactgttataaccaacaatatatcatggtggttaacaagaatgatgcgctggcaatgattatgtttgatttccacaccttcagttttaaaattagagatggcaattttgtcactgcaggttcaaatgatttttctcccctccacaattccacattttgtcaagcaattgccaacaacgttccaaatgtaaatgttccagcaaactacattaatggctatgaggcctgcccagcgagacgaacatcacaacacattttgcgagaaaaaaaaataaaaaagggaagagagtggaggaggctgcaaacctgagagcgcctgcggcgaatcccccatggtagcgacaccaccagcggcgaaatccgatctcaccacagtctccctccgccgccagctcgccgccaaagcctgcggaccagggcggagcagcgcggccgatacaccctgatgcggatggcactccacgcctcggccacggtcgccccccgccatcaccactgcaaaaacgccaaaatcacaaatcaaccggatgagaagatatcagctagcggcggcctcgagatgcgtgtgattaccgtgcgcggtcgacgacgtggcagcgggggcagcgacgtgggcgattacgtggtggcgacgccgacgcggcggtcaaatgcaaaagggtcatcaccaccaccactgtcggtgattacattttaagatagacggagtctttttgccatttctctggagttcccatcagaactgtgcgctcttattgaaatccatccagttgagcctctaattggatttgcattgccacgatccttttttatattcaacttcaaaccactaccattgctgtgcctctcgcctaatgaaccacttgatgccccattgcttgatataaatggagaacaattgaatgccttctgtgacagaccagcatcactaccagaagatatagtaatatgagaaacttctgattttgaagataagcaacaatgacgtgtctggttcgacaaaagtttttttttttcgagttcttgctctttccatcattaaatgaagttccccccatgacatctgctgcataacaaagcttcaagaatgtcactaattaaacttatacgaggaaccaacaagataatctgggtcaggaaacatgaaatattaaaaatatcaggtagcattttataaatatttggtgtcaggccaagttcaacatctgtagtgagacttgaatggcgaccaaactatattgagacagtgcatagaaaagccaacgagatcaactgatcaaacaaaattggtgtttgttattaccagagtaactctgttgagagactttagacgatttcggatatgtagagctggaaacaacagaagaattctgaagtattgaaagagctgcagcaaaacaaaataggcgtcagactgcaactttaacatactggatgtttaaaacattttattgtgttagcgaacacattgtattattaagaaaaatacctgataataactcaatagtattgataatgacaccaacaaaagaaagcaaggagcgtttcgggttcaattttctactcatattaagcaaatgggtctgcaagaagcaaaatgaatgtaagagttcatattgctttttcaggaagaaaagaaaattgttaagcagacatacaaagtcgcactgtttgcacattttgcacagaacaaatcaggagagaagatagtacagaagaaggaaatgggtactaaactgaaacagaacatataaggagcattaccttgttatcatcgcttagaaatatggcattttccaatattttcaaacatttcaagaggagagcagcactttgcaaagatgttccttcatttcggtccaaagctgaagtggatgtatcctttatgagattctgatacacaaggtttgccaccagaagtatattgttaatttatttattcagtttatcagcgtaatatgattgcattattagttggggaataaaaagtacacagataggaacaccaagcatttaaattaatgcgcaatttactccaaacttgcttacacatgcaagaacagcaagtatagctggaaaagtaacatccaaatgaataatgttcacttggtgtagatatgtcaagtgttattatcgtttcaagtgttattatcgtgggggatataatcatcagaggaactgtaagatactaacaccacatgcagaataaaaaagtattaaaaaactatttttgcaacataaaacaacataatttgtgttgcagccaattttccatgtcctgatgaaaatagttactacctcaagcattttccatgccccaaaatataacaacctttggctatgtatctggacaagcattactttcatgtggcttcaagcacattaaagctaaaatggcgaaaaggaacaagcctgcacaatccattagagttgaacaaaggaaatgtaaaatatgcgatgttagcgagatctcacctccaatgttgaatgaaaatccaccataacgtcaaaaatactatcaagacctcccatctcccttaatgtctctttaaaatttcctccaactctggacactgtgtcagaagtctctgtaacaatcaaatatttgataagggaaaaccttcctagtatgacaatggccataggtgcttctagtgcagtccactactccaattcaattctgcaacacagatggaagtcatcaatcaaaagcaggtgaagaaaagggctaagcaaaccacccatgaatattgcaaataggtgctatgtaacttatgacaagttgacaactgcttatttggctcatataaataaatataatggtcataaagggaaatcatgaccaagaaatttgattaaaacttaccctctactgaaacagcagacaagcatgcattttccattgtcaacaaagcaagccactttggacacagttctggccttgttgttttcttgtcatctttgtcgagcgacttgatcacttgacagcttaagagaatctcttcaacttttgaaaggatttcctctgaaatgcagtcagaatccttatttgatccattaagcatttgaactttactgattccaagaagtttggaacctatcgatggtgctttggaatcaacaagattcactggaggatttaataatttaagaagaaaatggacaccagattctgaatccaacaaatgattttcttgaacctgaacaacaagaagggagatattggagaataagcacaagtgaagttataccattaaagagtacgagctgctagcaataataactgaaatttacaccataaattaaagttcaacttcaaacaaaatgatgaaataaaagcatggattttctcaaataatcttctttgtaatcacatgccaaaatattcatggaaaactggtgaatacttatataactatactgtagaaataaataactttgtcatgatgtgattatctttatggactgttatataaaagaaaacaatcgatatgcgtaaaaaattggaatgaagcatgcacagaagcataaggatgggattgagaggtactcacatcacttcacaaaatgaatagaagagcagctgcaccaatagtgcagggaggatcatcaatgttcaaaaccaaaattgaatcaataatttgttgtaccaatctataggatataagaaaagaggacacttgtgagtaagaaaacaaaaggtaacgtacaataatttcattaacggaacatgtgtttgttgaatggaacgatttcagtatcttttgttcagttaaaaaacaagtcaaactattcaacacctaaacagtacacattaacgaaatttaatgaaaccctatagattgatacacacaaatgaatcctacacaatgttggatctaatgccaaaactactgcctagacaaattaagtttgaaactccagttacaaattcctttatgatccgttagtagagataacgacaaacttttgtgttttttctggcatcaaaggcagaacataattgcttgtttaccgtctaggaaccagagtaaaaataattcggagaggtgacatacatacctcgctatttacacataaagagaagatccctcctctaatacaactgtaggagaaaagaactccaacacagaatttcaaagctgcaaaaggcttcagcagctcaaagattctataaaggacttatatttttcagggagaaacctatgatattcttgatattttcccccagacaaaagatctaaaaacaaggaagcagtggatgcttcgagggagaagtgcttctcatcaatcatgaacaggtaagtgccagccctggttatatcacccctctgtaacagtttcctaacaatggaatttagcatgcgggagttggcagtacagccattctcctccattgaaagaaatagatcatccaattcttctagcaacccctgctctataagattttctgccattaaactgtaggtcctaacatctggcactaaaccgttagccgagagagctgcaaacaaatccttggcttcatcatttctgccaactttaagcaatgcaccaatcataatgttaaaagtcctagtctccagctgtaaatccgtcaaacataggttctgaaacattcgaagtgcctcgtcagtgagattgtttttgcaaagcccatgaaggattatgttgtatgtgctaagttcaagctgcgttccactttcggtaatcccgacatagagttcttttgcagcagcagttcttctggtttgaaataaaccttgcagaattatattatacgtaataatatcaggactaacaccactgctctccatctccctaaaaagaactaacgcatcttccatcctgctaattttacagtagccattaatcaaagtattatatgtaacacaatcaggtttcattccaactgagaccatgctggcaagtaacttcgttgcttcatccatcttacctgccaagcaatatccatcgatgagagtactgtacgtaatgatatcgggcttcacaccaatacgtaccatcaggtcaaagagtttttcagattctataaccctcccttctttgcaatgactgtcaattattgaattaaagaaaatagtgtccagacagatgcctcgatccaacatttcaagaattaactctttagccttgtcccatttgtcaaagatacagagactatgaattagggagttataaacaatgttgccagggcttagtctttcatcgatcatctgctcaaaataacgcatagcatcttctactctgcctgacttgcaaagtatgcctataactgttccataggtcactgtatccggattcaatccttgctgcctcattttgctgaacacaagcattgcctgatctactttcccttgtttagcgtatgcacatattagaatgctgaaaacataatgattagggtggataccgtttcgtaccatcaaatccaagagaccatgcatctcaacaagggctcctttggtagcatacccctgaagcagggtaccataggtagtaatatcaggctttaggcccctcttggtcatagaatcaaaaatctttcttgcttccgtgcatcttccgttcttgcaaagataatccatgagcgagttataagtaacaacatctggttcgacaccatcactgcgcatctttttgagaaatacaatagcctctttcggctgccctgaagagcaaaacccatgcacaatactattatatgtcatgcaatcaggcatgacaccactcttaaccatggtggtaagtacctccatggccttgtccacagtttgagccttgcatagcgcagcaataatagagttgtaggtcacaacatttggtaaaatcccccggtccagcatttcatggtatgtaccgtaagctttgtccagatccccctccttgaagaagccattgatgacagtggtatacgacaccacatcaggtgggcagtcacctccatcatcaggcatcatttggagcagctcgagagcttcttggcttctgttctcatcacacagccccttgagaagaatattgtaggagaagacatttggtatgcagccaagctgggtcattctgcggagcactatgtccattgcgtcgctcgtcctcttgtcagcacagaggcccttgagcagaggagtgaaggcgatggcgtccactctaaatcccttcttaatgacattgcccaaggccgcgaaaccgaggtccaagcggcccgcgcagcagcaggaaccgatgagaatgccgtaggtgcacaagttgggagttacctcgtcggcgccggctcgggccatgcggttgtagcgggacacggcggccgcggggctgtgacgcgcgacgtcggcgagggcgcagttcaagccgtagatcgaggcgcccctgccacgccggagcaattcgtcgaacacgtggcgtgcgtcctcggcgccactgccccccgtgcggccccctcgcccttgggtcgagccctccgagcgaagggcgccaacagcgccggcgcggacgcgggaagcggcgcggcgcgccatgcccgcccgccctagcggactggtgcagcagcagcagcgccggcggaaaccaacgcgacgcagctgatacggagaggtgggcggcagcagtggaggatagaggggaggggaagggggaggtcggcgccgtgctatttggcgctgaagtatacgattttgcgctcaacaaaaagattatttttaaataagttttggtcacggttaatttataaaattaatttttggaaagtgtcaaattgtcaaaaatttgtgtgataaaagggtggccgcagtttgcaagcgcgtctaggtctagacgctgttataaacaacgtccatcctgttttgataaatcctccaaacaaattgctaataatttaattttaaaaatattaattattattaatataaaaattcggcgaaacatgtgtcatgtaaattggatatatagatctttatttgagtcagattttaaatccgtttgcttttggaaatacggaaggagtcgtataaggtatctctttaaaaattttacatgctaacttgatcgagatatctgttctgcgcgcgtggaagagaaaaaaaacataaattttttgcggtagtttaatagagggatccacctttagttttttagttttttattgaatttaggctctctcttagatggaggagtatttccacttcctattttcagtttaggaaaaaaaataaattttagggatagattattgctaacatattagtgatgctctaaaatcaaagcacggtttaaatttgttatagtctactacttcctccatttcatattataagtcgttttgattttttttagtctaacttatttaaatttgactacgtttatagaaaaatatagcagcatttttaacacagaacaaatatattatcaaaatatattccatgctaaatttaatgaaactagtgtggtgcttaaatgttgctaatttttttctataaacttagttaaactcgataaaatttgactaatataaaaatcaaagcgatttataagaaaaaaaaagtcaaaactactccctccatcccgagaggtaataacctattaccgaattatacattacatacaactataaatctagacaacctaatcgaattcgtgaatctagataatatctaatccaatactatattcttatattttggaagaaaagaagtgctccctccatctcataatatagcaacttagtaccagacgagacataccaatttgttatattatgggatggagaagtaggaaagaatttattgcaagtttgcaactgtgccaaaaccggtgtgttgaatgaaacatatattaacgtgataaaatggcgttattaaaccggtgtattgattcttgggtagttagtagtagttcatgctaaataatgaacgtaagggcaagctattgctcgttgtgctctgtgcaaattgggctcaaattgtggtgaagatgacggttcaagctaaagtttcagcagagggtaatgtgaaggagattatcttaagatcataaaatgtagcatcaatatatacctgcgaaagatctgagaaaaaaattagatgtgtaggagtaatggtagttaagaacccttcacttgacatgtgatggaagcaaaaccaggaagaagaaagggaatgaaagagagcttaacacgctggtaggtttcttactttctatggttaaacaaattgagttacataacgtggagaactagaacactggaagaggttggaaagtccccccccccccccccaccgtcgctctcgcacgggcggcttggggggcgaaaaaaccctagctgcccactccccacttcttctcccccacctcgccgccgccggagctcgccggcggcgaagccggcagcgagcaaggaaggcagcggcgaggcccttttttcttggcgtcttcctcctcgacgcgatgaggatggggcaaacgacgaagccctcactgcggtcggaggtggtgacgccgtggcggtgtggggaggcggcggatccggcgcccccaaggccggatccggccatcccgcgcctggatctggcgtggcggcggcacgaggcggctagggacggcggtggcggctcagcaaggtgcgcggtggcggctcggcagcgggcgggcgaggtgcgcggcaatggcatggggctgcctcgggcgcggaggcggagcgtggcggcgtgcggtcgtgtgcgccggtgacgtgcagccggcccgggcggcagcggcggcggctcagtggcatgctcggcccttggagctggcggttgtgctcgctggcgccggcaacagcgcgacggccgtggctcgctggtgccagcgcgagctgtcccatggcgcggccaggcctcggtagccgggcggccgtcgtggtgcccttagcggccagctgggcggcgcgacgcagccaggaggggcgcggagaccaggcaaagggggtgcaggtgggtggcgccggagccggagcgacagcgtatccggcattggcgcaggcccagatggtagtgcaaagggagctggagtcgatgggttgtcttcctcgttgccggtcggcaccctcgcccttcctagagctcatccccttcttttgcggggagtttctaggttggattgagacagcagctcgccagcgggggaagctcaggctgccgaagcaatgtcacccagtcccgggttctcctttggccaaaactggcaaggcggccggcgggtggtggaacggaggggtcctgggccagctctcagggatggtggttcgatggagtcggccgacgaaggggcgtcggtgcggtgcggtggaagctacgtgctaccttttgtctgtgtggtggttctgagtggtggacggtgatctgcgatcaaggctatagggtcctaggcggaagcctagtccggtggttcaccggaccggcagcggctacgccttcgggcgtcgtaacctccttggggcgctgtcaagggttaccctctccccttcttgatgagtttctctgggtgaaaaccacatctttttagatggacgatggcagcatcctacatgtcgtgaccaccttggtggcatcgttttcgaagtctcatctatgtgttgctgccgtaggcctagcggcgtttggtcacacttagtggcggtcgtttggtgctaggcttcaccctcagtggtttgtgcttgggggtagtgtatggtgtgtggtcatgcaccttggtgcattgtggtgttttttcttgtaacttttactccttaatacattcggatggccttgtcgatgacatgggatcaggagtatcatgactagaggtttgaggcagacacaatcgcccacgtggcctggcaccctcgggggacgtcgggcccgagggtgatgtgttcgccctcctcttagtccccccgagggggtcggaccgcacccgcctcggccccgagggccgaggcgccccgacccctcgtgggtttttgctccgcgtgtatgggttagg

SEQ ID NO: 9676 - DNA, 24487 bp, Oryza sativa
  unsure (1)..(24487): unsure at all n locations
ccccctccccccagcagcggcctccctccccgccccgccgccttgctccccgccatctcctggtccctgacgtgacgcctcgccgcggcggcgccgacgaggtcgagaccggtttgggtttagcgctttctctctctttgtgacctgtggaggatggagtcgtcggagatggggagatgaatgaagggagctggctcgggtcggtgtggtagttgtacggaaaccgctgcgtctctgcgtgacgtgtccgccggggggagatgtgggcccggttttttttttcacatctctaaactttaatttcatttttggttagcacgttttttcgaattgttaaatggtgagtttttatgaaaagtttctatgtaaaagttgtttgcaaaattcaaataaatctattttttaattttataataactaatacttaattaattatgcactaacgaggtttctcgatttacatgcgccgaaattttctagtaaaaaataaatttaagatgtaattacattgaagtataataggagtgtaattacattgtaactatattttaaatgcattgtaattgtaatataactttattgtacctacgatataatttatatgaaacttgtattcaacgatggtttggttagctagcactgagatatcacgcgtgacatgtgtaaaaatttctttctagcaaattttttctttatacataaatctcaaggtgatccgatggtcataaatctgaaagttttggaggcaaaaaagacttgtggaaattttctagcaaattcgttttttgatttttcttttaactttttaccttgggaaatattttttagaaaaaaacaacgctacacattcacctatgcaaatgcacatagacgtatcctatcccaataaactctcgtgagattgggccggcatatgttgggattgtcagaatcattataaatgactcgttgtcaatgagtatgccgaatcaatgattagttatagatgtgagcattgagccaagtctaaaacttgaacggtagcagtaacttttttaatataaatactaatgaaaaggaatcctttattagtttcgttgtgtgatcaacgatggaagtgctgaccttcgaagcaagaaaatgtttagccttctgcttcgtttaattatcatgtacttcctctgtactcctttgtactcgtaaaggagatcgtttaggataatgtttaagtcaaacattgagaatataaatcataaataactcttatgttgttgagtttgaaaatataaaaattatatgaaatatatttgttttgaaaaataattttcataaaagtatacacatatcacttttcaataaatatttttatagaaataagaaatcaaagttgtgttttggaaaccgtgtcactgtccaaaacgacttcctttatacttcctttataagtacggagggagtacattacagtactgaccactgaatgctacagcgtcatatttaaagagaagctaacggagtattatatgaaaaagtcttagtgtacttatatactctctctgtttcacaatataagtcgttctaccatttctcacattcatattaatattaatgaatctagatagatattgtctatattcattaacatcaatatgaatgtgggaaatgctagacgacttacattgtgaaacggagaaagtagtataaattgtcccaaataaaaaccaaagaaggttcatgtgttagctgccaaatcttcagtcacatgcttcaatgccaaattttcgccgtgcaggacaggcctgaccaagcagatatttttttttttttggagaccgacgaccaagcatattgatttttttttcttttcagaaatcattgtttgatctgatacatttggaaggtggtgaggttgctgaatactgagcttcaagctggggcttgcttcgagctgcaactgaccaacaaaaccaacagttaaaggcgaaccataagtccatgacctacattatttttttgcgggtttttcattttgtgtgtatttatttcaagccactgtatgtttttcatcttatgggtattatggatggtagtacattttgtcctctgaaaaactgatccctgaatgcttagagttcagagtagcagcatcagtcccactcccatgaagcttggttcagacttcaaagcaaaaacatttgttcttgcatgaatttgcaaaatcaatttgctaaactgtactttccgctgtactccttcggggtttctttttatgtccttcgctttattcaaaaaaacttcaagcatggaaaaatatgaatcatgttgtttgtttaaaattagagacgaatgtcttcaaaatcaacggcggtaaacattaaaaaaacagagggattagttaggttgtttctctaattttcgagttacatattctgtcggtcttacactgtcgtttcctttttttttttttggcccctgccacgaatctgctatggatttgatatctttgacaccatcgaagttaacataggcagaattttatctacaagcaaaataacagacctctgacaatcttaatactagttggagattcaatttaattatagttacttctaatcttcaataggcaagacaatacactttattcatgaccccataaatatagtaatgcgatacaatcatcttgacgatcgcctctaagccgtaatactaactggatatgcatccggaggcggcatcacacagttatcaccgttgaagtacacacggactgggaaggcccttcccttgttattgttagtagtggaagaagccctgaaatcctttctcacaatcagttctccttgcacatttccaagcggaccagcttgcatgagcaaatcatagtagggctttactccccatagcatcgtagtatcatctaacatacaaggagaaaaaaaaaacttcgtgagcaaaagatagagagatggtatatacaccttctgtccttaaaaaaaataaattttggctacgaatctagacataggtcagaagtatatatacacacacatacacatgcatttttttttatcaaaaaaggatggttccagattgacttacttattttgccgacttggattgacttgtaattgaagccagatatctgggtgatatcgaggatgggatgatactgaacaaccaggttccattcggtgaaattcatgcggtagttcaagttagtgacagtgattttcactctgtagtgttccttgtctttgagcatcaagtgccagttaattttcactgggcacatgtgtgaagtgcactggagaagaggctgccaggtccatctgccagggccgtgaatgatggattgcaaatcaggtgcattcttcctgtcaaatgcaaaggaaattgttacaattttttggtgaaaacaagaagctaggatcccagtggaaattgtagttaagatcagtaacagttatattaactcactttacacattttcctgtagtagatttttcatttcggcagccacaagagcatgttgggcagtcaacagttttgtcattgtcgaacgacgagagagaaacacagcaggatggaaccttttgtgcaagaaattgggagtatgtgcagatcacattccatgtcactgtgaatagagatttcctttttgttaagaagtactactagtagtactgaatataggaattttttctactatagaactcaaaacaaacaacaagtcctatatgtaatcatggggatgtctgtctgaatttgacatgtattagttgctagataacaaaattgattaaaaaaaagatgacaacatttgttaagtaggctcagccttgtaaagcctagcatgctgtaacttgttttcaactaatatcagatcaaccagtcttaggtgaccaactcctgtcccttcctcactaaacctatgcctaatccaacttagcattaagaaatcacaactgagtctatgttcctaatgcatttccacatgacatacaagcaattgggcatcaagcagcaattcagaaaaagaacaacagatggactacttactcagaacttgagtcgccctcctcccatccggacttaaaaacctactaggcttcacaatcatagcacggctacaggtataccccggaccaggcgccataagactgaagttcttcggcaccctaacagtctcattgctgttcccagaatggcctacaatgatctgaaacgacgcggcagaatttgccgggtcctggctgaatgcgctcagtgatccagccttgcagcagttggcgatctgcaggtcgattggggcgcccgggaggaggtcgacgacggtgggatgcttcttgcagctgtgggggacattgctgccctccttggacatggagcagtcgccctgctcgatggcctgcgcgccgtacatggaccagatcacctccttctgctgccatgtccaccccagctgccaccccggtggctggatgtgccggaattgctggtagttggacagtgtgacaacggcctgatgaacaggggacgtttcagaggacagatctttgatacagttacaagagggaaaccggattcgatatagattttgctcgttgttattgttgttgttgtttgcgacatactccctccgtttttcaggttataagattttatagcattgcccaattcatatagatattaataaatctagacgtacatatatgtctagattcattaacatatatatgaatgtggataatgctagaaaatcttataagatgaaacggatgaagtatacatgaagagatgtggctatgctgtttaacttcaagtctataagttcatacttcctccgttcagtaatcattagacgctttgaataagatctagtgtagtcaaacttttgaaaccccagccttcaatataacttataaaatatactacttaatagtatcaaaacataaaaccatgtgtagctttcctaatctctagaacttaatagattttaaaacatcaaatatatttttttattagaggtagtagaacaagatagtgtaaatgtacaggttgagacgaaaataaaggtagagatgttggtgtactgccaccgctacttacagcatagccatcaggagtccattgcatcacatcccattttatcgtgatgttgccgtttggatccagggaatcataagcatctgcaagagcaacaagcaaaagtgatacacataaaaagaaaaatccaaaacaagaaaacaaaatggcttaggcattggttagtgtcacgacagtgtatccatgtgtgagtgatctttttgtcagctgcggctcatttccaaaaaaaaacaaagaaagaaaaaaagaagaagaagaagatgggcgtgcttacatgtggtggccggagaggagaagagcagcgccgccgcgagcagcacggcgcagcagccaccaacaccaatcgccatctataatatatggctatatccttcgccgctacgaactctaactccggcgagcgatgactcggtgtgtggggggtgtgaggcgacgatgtattatatatagccgcggccaccgacggatctcggccggtcgcgtgcgttgacgcacgcacgcgcgcgggtcgtcgtcgccgccgccgtcatgggcgcgccgcttgccagcttgttccttcctgcgcatcttcgcgtcacgcggcgcgcacgcggcgcgcacggcgcttcactggttgtctttgtcaggcaatgcgcgacaagggttcacaatctcgataccggatcaaaaatccactcacgagcgatatcatcggatttcgctgaatccgttgacaaacctaaaaacacagacgaaatctaaatagatttttgtcaaaaaattaaaattcagtttaaaattttctgaacctgacaaaaagccgattggtttgtgtttttaactcaatccaataatgtttggattctattggaattgtgaaccctgccgccgaccactgctagatgaagtagcggaccaccggcccaaccgaaatgggtcgcacgtaagtcgcaatcccgatccggcccatctacaacgggccgaacaatcccgatatagatgggccgtacgcccgttgctacagtttcggcccaagatcaagaatgggccacacagcgtgaggtcgccgccgcatgtcagcacaactaaacagaagccggctgcagccatggtacttaatgctcgacctcatcaagtaaattcgacatacagaacgagcatctacttgtccaagtgcagctgaacacgtcagttatgtacagtacatgatagatctcagcaagaagaaagcaagtcgtagtactagtagtaaatattgataggttccatgttggtgattctagaaaagagacagcggttcgtactggtaatccaagagcctcctaaacaaaaaaaccagaagaatgaaaaaatggaacagacaacgatctgtacaagctgcttgactagcaaacagaatactgaatgggaattacaggtctccgggtatccatcatcagacactgtgctctctccagtctctaccgccatgcagacctacaatacaaaatgcaatgccctccagaaatacccctttttctctgccaaccaccatgttactgcatagagttttgaagccattgttcttgactatgatcaccgtcttcttagggttgaaaccttgctgatggccctgagtcccttctatcgccacttatctcgaattcgcttgagcttgtcttggactcggtatctgcattggcagtgttgcccctccggctcctccggtccttcagtaggattacagcaaaagcttcagatttattgcaatgatataatatgatgaatgttattgcaggaaaggagaaagcgttaccacctcacgggatgggacatcttctgcctcgagcatccgaacaacatgacccatagtaggtcttttctcagagtctgggtcgacgcacctcagtgccactaggagagcacgcttaagagcccgaatggtcggtttgacctccatgtcagggtcaactacctcttcagatcttcttgtgccaaccatcattttgagccactccactagatgcacctgcaaggcatccacgttacaatgttgttatatatgacaaggtatacagctagtcagctcctgaaaaataaaacaatagactgtaaaagtgagacaagggtaactagacagtagacaactgccagacagccatacacctgaagcaaattcgtctctcctagtatagacgttattttgccgtaaaataatttccaatagtacggacttttgtaacatacataatacgcatgagattgtaggatatatgctcacctcattagcaggccggccataatcaactggatctctaccagtcactgcttccagtaatagcacaccaaaactgtagacatcactcttctcgtttaacagacctgtgttggcatactcaggggccacatacctgaaatgaatcaatgatagcaatgagaaagctacctgttataatatacgaaggacaaagttcgcagcatgtaaaattttatattgtatgaataagcgaagtactgcacattccaacagtaaaagctaagcataggaaagattaatactaactccaaaaaaatatcaacatacccaaaagttcccataactcgagttgtgatatggctcttccctgcacccagcatcttagccaagccaaaatcagaaagtttgccattgaattcttcatcgattagtatgttgcttgatttgatatcccggtgtacaacttttggctctattgcttcatgtaaataagcaagcctgtataccaattcagttatggaaaatgggttatgcaactaaacatatacatataaaagagctaaagtgaagaacaattcttttctttttgacggggacgatggtttgtttcttacgctttagcaattccaagaacaactttcattcgggcttcccaggtaagaacaccatgttggcgcatggcaccatgaagccactgttctaagttcccgttattcacatattcgtatacaagcatcctggaatataacaagtcagatgataggatggaagtttaatagactacaaaaacatagtatgatgtacacaaagaaagatttggacaccactaaccactaaaaatattaaacaacagtaatgagtttggatggccaaagcataaggagacaccattaacataaagtacttgtggaaacagaactccttagatacactcaaatcaatggttatgtagtgaaataaaaagcttaaatcaatgaccatgactcgaatacactcaaacctattgtgtgctcagaagtgcaaaatatattgctgtagatatcatttgatggatgttttgttcaattgaaaaccacaaattattacaagatgtagcaacattgttcatttctgtagtcatgatgaaaacaagggagaaacataatcatattttcaacaccctattgcagattattttggctgagtgtggattttgaattacgtgaagcagacaccattatattcataggacctatttgttggtaactagattatccgaaaacacctgacactcaacatcttagtatatttcttaagcaatttctatctcgatggtcacttaagcagcactggccaaaccatataaatatctatattattaacttgtttctagagcagtatccaaaatggcggaaaactggaaaatacataggtgaatggacttctgattttctttggagaatacagtagcttggacatatcatgaatacaaatttagaattgaacatgcatgagaagaaacgtgaagaacaagaacaggcattcacaaagtaatgaactatggaagtacatttcagtaagaccttgttatagccaactaacaaaccaataagcagttgtgcgcttctagtgaatcctagctttcagagctatggccacattttcatggtaaaagaatggtggtccaaagaaggtttctgtggactgagcataatctgtcactgggcatgctgaatcccaccatcagatttggaagggaaaaaatcgatagcataaggagtgcagtcaggaataacctatcccttgagataatctggtgagtaggtggacatagaccaagagcaatcctacatccctatgcaagtaaataatgtgccagtagaaacaaaagctagccatccatcagcaaaggtgatnnnnnnnnnnnnnnnnnnnnngattccctcaacacaatatcctagaaggcggacaagattcttatgcctgacgtggccaatagcctcaacttcaaccctgaactccttttctgcctggcccctgcagcaccatatcaaaagaaaattaatatgatggcatcagaaggagtcacaagttctgtaaaacgcagaatagatttcaggatctcttacatattattaagaagcttctttattgcgacgtcagttccatttatgagtcgaccacggtaaactaccccatatccaccctctccaatgacattctccttggaaaaccgatttgttgcatgctccaaatctctcagagtaaaccaatgaccccagcccagatgagagaattctgggagaccaaccagaggggatgctgagacagttgcatattgagaaaagtgcctcctagcattgcccgagctgccttcatcaccagaatacgagctaccagccctatcacattggtacaccgagctgcattggctcaaattatcggcatcactcgatttactcctaaccaagtgtgccagcattttccctgaatctttctcgtaatgtttctcctgcaccgatatcgcgtggctttcttgcacacggaagttttcgacaacagcatgctcacgaacttcatctactgcaatctccttggaaacatccgggatttgagatactggaatcttatcaaaggacttcttcggcttccttcggtatatggaccagaggcacatgaaacctagtataaagaagatcaccacccaaatactgattccaatcacaatccatagcctcaaaccgaaaggcggcgtcctggatgatagctctgcacgcagggtttcacctgtcgacatcttcacttctcaacaacctatatataagccagcatcagtgatacaatgtcagcttagcattcaatccacgagatgtcatattgctggacctaattagccgaattatttcagctcagcaatttgctgtatatgggtggcataaattcaatgcagcacaaaagatttagcgcagccaccaaacaggaacaagcaagcaaatataccaacaagcgccggtcacttggaagctcggcgacggatggcgagcctaaggctgccagaaccccaaatgcccatatgaggcgatgtttcgcttacccaaattcgatggaaacgggttaacccaacaggcaggagcaagcagcgagtacagggaagccagccagcaagcgggcgcctcacaggcctcgtttcggcgaggggatactaatcaaatggagagagttgcggcgagacgaagcataccggcgtacggatctggacgcgtagcgcctgccagcgaacgagccggtggtggtggcggcgcccgtccctaccccgcgcgccgccgccgccacactccccctcccccgtacgcttccccccgcgcccgcgccaccggcgcacaagcgcgagccgcgccgcgccgcaccccccacctcaccggcagccgcgctccaacacgagcccccacgtcccccggcacacgacctccccgcaatgccagcggaagcagaagcagcagcaggcggaggtggccgcgggaacgagcgcgagcaactccacctcctcacacacacagcaagcaggcccggcgggcgtcgggccgcggctccggcggcggtggcagcgatgggactccggcgagcgggcggcggcggtggatcgggtgggatttgggggaagaatcttgcgggagaagggggagagagagagagagagcgcgcggtggccggtgagagtggaagtggagagagtagggagggtgtcgtgtcctggactggattgtctataatctagtactccagcaaattagcattttattattactgcattttttttctagagttacatagccaacattaccaatatttttcatccttaaaacacatcaatttttttcaactgtacaccctccataaaaaaaacaaatattatattaggatgtgacacgcaccagtacaaggtttactttttttttttttgacgaagggtgtacatagctttagatttactcatacttctttcgtacgaaaaaaaccaacctagatacggaggtgacacttcagtacaacgaacgaatctagatatagtgttatatccgtgtctaggttggttttttttacggagggagtatgcaagttcactgctttcctcttgttagtactattttcttttcgtcgtaattagtctttgtattacgagttgttttcatagtactcttttcgtttaaaagatgaggctctaattatgaacttttatatctatatttataaacaaaagttagatttttatagataggggttttaagtttgtattttggtcagctacggaggcgactgaccccacatagtccatccataaacaaacatgtcattaacaaaatcatatagttatatcaatatttatatcatataagagcaagttgaatagtatagtccactactagctccaatttatctatagccgatctaatagccaattcatacaatagttgcttactatactattaacatatggtctcacctgtcatacacacattgcgtcttggagtccgtgctgcagctggctataaatctgtagcccgctgctcttctctcttatcttttatcccattaaaatatgtttatagctggctaatagtccgctattgtacatgctctaagtatccgaaatgatggagttaacaagttaaacttgtcagccacgtagctcgtgaggttagtcaaacggccgggctaatcacatcatgggcttcatgattataacatgtattatctttgttcgtagatactccctcggtctaaaaaaagataaacattagattttcgtgacaatgtttgactgtccgttttatatgaaatttttttataattagtatttttattgttgttagatgataaaacatgattaatactttatgtgtgacttatttttttaatttttttttataatttttttaaataagacggacggttggagtacaacaaattataaatgagctttggacggagggagtagtacccaaaaatgatttatactaatacgtagtacaacaccgcacagctcacacggtcacctttccaacccaaagccacgaacaaagggcgctcgggcccacatggcatgcacactacgcaatccccccgtgttggggagtagctccggttcacagtcaaacggacacaaggtccaaatctaggctcgctggactcgcggtcgcagtaatttacacctttacccccactgagatgtgggcccggaggaggggcgaaatgatgggaatgctcccctcccctcccccggggacacaacggctagctcccgtccagggctgaggctgacatgcgtcaggccccctgtcactgtcgggctgtgggcccggcccggcccatcactgtacgaccacgcagatcgcttgattcgccgctaattggtttgtctcaaagctactcctctaatgtgattaggcgcttgatttttgctaagagaaaaagtttaatagtatagcccactactaactctaaatcatctatagccaatataatagtcaatttatacaatagttgcttactatactactaatatctggtcccatctgtcatacacacgttgtgtcttggagtccgtgttgtagctggctacagatctgtagcccgctgctcttctctatcaatgtttatctcattataatatgtttataactggctaatatcctactattgtacctgctctatgagcaagtttaatactatagcacactaatagctccaaatcatctatagccaatgtatataatagttacttactatactactctattattatctggtcccacctgttatacacacgttgcgtcttgaagtccatgctacagctggctatagatctgtagcccgttgctcttttctctctttttttatagctggcttatatcctgctgctattgtacctgctctaactgttgtcttattaaaggctaaccaggacgtgattagatgttacttcagtaatcacgcttaattaattaacctgcgcgtagtgtttatgtaggagtggtatcaagagctagtgataaacaggttggctgtgatgttggtagcggtgttcgcttggattgtccgtgatggatggatgcaggtcattttcgtcagctggcgagatgatgatgattatgatggttgatggacgaggttgatgtgcgcatgcatgcattgatgcataaacgcctttcctttccaattcctgtgagggccaagaaacaaaaatggagtaggtagaagcatgatcaagaaaaagggcttgatagatagagcttcaacttatcaatttaacttcaggagttaggtttggagtggagttgtggagctgtctaaatccagctctacaactttttgtgagagagttccacccaactacactcccaattttggtggacctgaaactgttgggctgagctccagctccagaaagagtggagctagaactggagctagagctgtgccaaacaggctccaagaatggcttcgctctactgctgataaaccgtgagaaaatgaacgaaacaacttaaaaaaacaatttttagtgacaaaagaaactaatgctgggaaaatgaagtatggtaaacaagccttaaaaattaactctaaggctaagtttaaaattcgcatttgggttgcggatgataagccgaaaaacaaactctactgttgctattgttattcatttccattttgattttctagctgaggctcagtttgaaacgaattactgcgtgattgtttttacggattgtatatttaattatagagataaattaaatattttgataaataaacttaacagatactcggataggtatataactaaaacgagtggctaatagaggaaagtttttttttctaaaaaagtgtgtttttcgaaacgtcgaataaatagtccgtttcgtcaaatgtggtaaatcatccgacaccgacagaactggttcaagtggattagtagtaatttttattgacttatttctctctctctctctctctaagaaaacgttgttctagaataatgagattagctagaggtcccaggattgctttccaactggtaatctaatgagagagagaataaagttttgcttcacccttttttccatggtacacaaacctgtcatgtttagtggctttaggggagacttgagggccccctaattaattaaccacttgtttgtttacttacgtgttaacgtgtctgctgtcccctgtgcttttcttcgccgtcttgattgacttcgacctcctgctagtaattccaattatttttaaatctagattttgtgtttttcatgtctctttctcatacttgttttaggtagtacttcctccattttaaaatataaataattttagattcaaattttacatcacaaatataaacatttctgcatatgatttctatcacttcgatgattccagagccactcagagcaagtttaatattatagccaactattggctccaaatcatgtataggctgcgttcggatgaggaggttcccaacccctctccctcatattccgcgcgcacgcttttcaaattactaaacggtgagtttttgcaaaaagtttctatacaaaagttgtttaaaaaaatcatattgatttatttttttaaaaaatagctaatacttaattaatcacgccataatggaccgctccgttttccgtgcttgggagatggttcccaacacccacctccgaacacacccatagtcaatttaatagccaattcatacaatagatagatataaacatatactatataattaatgtttggtctcacatgtcatacacatatgtatcttggagctcgcgctgcagctgtctacaaatctatagcccgctactcttatttttcctcttttatctacttaaaatatatttatagctggcttatagtctgctattgtacctgctctcagatgcgtcgaaagagagtttaagcagtttaaaattcgaaaattaacacctaaagtgacttaaaataaatacctaatattattaatttattgaacaatctagaatttttgttttccaaacaacctagaattttagaaaaagaggcaataaaatgttactaccgtactagcacaatctatcatgcatgtgtctgtctgtctgtctctctctctctctctcagagagaggagttgagtggatctccatggatggcttgccgacacatcacagatggatgaacaaaaatcagatcctgtagcttttggaccttttgtcagtgtcatcaccttgtagtggaaggaaagtgaaagacaaaggtgacgccgaatgattttgggtcaacttaattggagaaacaccttggggcatgtttagttaaaaaaagcttttcccaaacatcgcatcgaatctttcgacacatatatgaagcattaaatatagataaaaagaaaaactaattgcatagtttgcatgtaaatcttgagacgaatcttttaagtctaattaggccatgattagccataagtgctataataacccacatatgctaatgacggattaattaggctcaaaacattcgtctcgcggtttccaggcgagttaatccgagatgaaaaaacaggccccaaatggcacaaccgcacaaggaacagggaatagagtaggtataaacagtcttcgcggaaacgtattgtaatcgtatctatgctacgcttttgtgatagtggacttttggatatatgtttttccaatatatgtttaaccatctatcttatttaaaatttcatatagacataagaaaataaaatataaaaaatatccttagagtatttttaattataagccaaagtcataacaaaataaaaattattcatatatttttaaataaataaatagataaatatatgttcaaacgtcaacagcgttatctattcaagactttaccaaacctaatttcctaatttcagatgagaaacatgtaaaaaagaactgaacaaaacccaaaaaagttgaatcgaataaaatccaaatgaactttagtatacctatctcaatattggtatatgcccaaactcaaaaggagagaaccaaaactaaaacttttaatgccgtacgtgagcccaatggaaaaaaaagtgatagtaacagcaaaatctcacttaacaatgtcgttgatcagcactatatatttttaaatattacttaaaaatctttatatttacctattgaaaaaaatgaaaaacagaatatgtttcttttttatttctaatttacagcagctgcattcagtcatgtcctacgctccttgaagagagaaaagtgaatttaacggaaagaagctcgaaaaagaaagaaaacaggggccaccacaccagtaataatccctataatcccgtcttctcccaatagaaagaacctcggaaaaaaaattctcccaccgcaaatttctccgtgcgagaaaccctcagccgcaactaaccaacaaattcgcatcctctccgtgtaaaaaaaataaaaagtaaagtagtgtgtcatctaaatccttaaactctcaaaatacatatccaagtcctagaacttgtcatagtgtgtcatttaggtcccaaatcgccacaaccccttcaggatgctacgtggcgctgatgtggcatgtcacagggatatgatgtggcataattttgactgacaaatgggacccatttaaaaattttcttttttctttttttcttctcttgtattttcctttcttttcctttctttgtgacccgagcagaagatggaaaaaaagaagaatgagaagaaaacggaaaagaaaaagaaaagaagaaaaaaaaaaagacttgtcacgtccatgtgacaagtcacattagcgccatgtaggatccaagagaggatgcgtcggtttgggatctagatgatacactttgacaaattctaggacctggatatgcattttgagagtttgggaacctagatgacagaccgctacaagtttaaggactgcccgtgcattttactcaaaaaaaaatctcgcatcctctccacaagcgcaacagctgagcaagagaaagagccggggtgcgaccgcgcgagtggataaggtcacgcatccttattcactcgtccccctcctctcactcgtccctctctctcccactcggtccctccctctaaccctctcgtcccccgccctcgcccccgcccctctcgtctctcccttgccggtagcagaggaggcggcggcgatggcgtcagtggctcccaccgaccggatccggcggcggtggtggcatcggcggctcccgctaccgaatccggcggaggcggtgacaccggtgtttccggcaggcggatccggcggaggcttttccagcggatggatccggcgattctctaccccctcctcctcaccctccgtgcccaagcttctcccgcgatggcggcggcggcatcggcgctccctcgggcagatccggcggaggtggtggcagcggcatttccggtgggcggatttagcggtcctctccccccctctccctctgtccgaagcttctcccttggatccggtggcggcggcgacgtcagtggcacccgtgggtggatccgaccgagaggatctgcccgctgccacgccgctgtcccctcggctggatccgccggtgttgttgattgtgtatgttgtttgtattgtttttcttatgtgataatgatgtcgttgttgtgattgattttggggtttttatgcgatgatgatgttgctcctgttcacccctccatctcctataatcatctcttgatattttggatgattttgcgatgattctgattggattgagattgagattttgtttttgggtcggattatgatgatgtgggatttggagaggaggtgcgcgtgatgttacagacggacgaaagatcggtgtgacgaaaggaaaaatacgaatcttttaattagttaagatattgcatagtgcccgtgcgttgcaacgggaaaaacttccgtttcatagtgtgacacctcgagaacctcaaatcagtaaaaatcaagtctaatttgatatattaccaaattggtagaaccgagtctaatttgatgaattagcataggatttaggctttagtcttagatttacattgcaatgcggtggtttggcaacaacggtggcacccgatctagctgcatgggaatttttggatatatttgtgtgtatatgcttagttttccctatctttgattctatttgcgtgtatgcttcagttttccctgtctccgattctcaggatggaaagtaacgactgggatttttttttggggaaaagtccattttacgcccttgaactcttatgcttatctaaaatacacccccaaactacaaaaccgggtataatacacccttgaactgtccggtattgatagctcgagggtgtattatacccggttttatagttcgggggtgtattttagacaagcataaaagttcgagggtgtaaaatggattttccctttttttttgagggggaggggggacggacgaaaaattagcgtatggacaaggtgacgatcggaaagatacgaatcttttagttagttattaagattagttaaggttaagactagaaaaaaaaacatgcgttgcaacatgtgaatacaatttaaaagaattggacaaaattgaaggattagcaatgcatatacgtgtatatataggcaatatagctattgcttatcacagtctgctgtaacctggatttttcacattttggttcttttaaaaaacttatttcgcaaatagacccctaaaaaaaattatgctagaaatggtccttttttgtggcgccagagtggctggcgccgccgtccttctgccgacgtggtggggcgatgctgaggtggcaggggaagcgcgccagagtggctaggggtgaaaatagagcggattcggacggatagtggtcataccatatcttaaaccatatttttaagcggattcggagtgggtgcggatagtgtacggatgcagatgtcggaaatggtgcggagtcggtgcggaatcggttcagaaacggattaaatttatcagatgttacgtgtgtatgcaatcaatacaacattgagttagcaatgcaagtaaaaataatacaatgtcaataaacgacccattgtaataattatgtgcttaagtgctaaacaacataaatacatgatgtccattttataaaaatacagctacgcaagtgtgacatgaaatggtgaaaaccacatagtaagaaatctagggtaattgatgaattaggtcattggatggaccaacttgtgttcataatttcggattatccggtaaagggcctatcggacaaaaatgtcggataatccgtcgtatttcggagataccatatcctcatccgcatccatatccgccggatttctaaaaacccataccatatccttatttcggatggattcggagcagattggatcggatattatctgatcgttttcacccctaagagtggctggcgcccccccccgaatttttttatttattattatttttttgatatttttttcacgcttaggaacacacaagaaccaaccatagaaaaaatgaactcaaatggacgaaatatgtgacctgtagaatttttcctctcctctcctctctagtgcagaggagaggatgtgcaacttttttatttttattttatttttttttcacacttgggaactcacatgaacgaaccataaaaataataaactcaaacggacgaaatatgtggcatgtagaatttttcaaggctatcatttcatgtagttatattttgaattagattaagtaatttcacctagtggtagagtgcattatgtttaatatgctgatcaaagggttttactaaagaagttatggtctaattttggtgaaggtgcaaagtaggtaagtggtatgctatattttcagacttctagctatgtgatatattccgttcgagtttaattttttttttgtagttggttgtatcgtgattctaagtgtgaaaaaacatccaaaaaaataaaacaaaaataaaaagtttgcaactctatatagagaaacaagaatagaggcgggggcggcgccagagaggttggcgccgtcccgttggaccacggcgccagccactctgacgccccaaaaaggactatttctgggataagttttttcaggggtctatttgcgaaataaatttttcaaaatgaccaaaatataaaaatccagctgctgtaactaccgatccatcacctaatgaactacggaacatgtgggtatggtcggtgaatattttttttagacaggatgcctagtaaattaacggtcgatgaatataattgtaatgaaaaattaacgtcattctaacatgttagttttgaagttatggtgcatagttttttcgtgcagtagcgtgtgtgtacttgcattgcatggactaatatggatcatgtcgtagaaaatattgttatggcagtctattgatttctaggaggcatgtagcaacttagtcaatagcgaggactcaagagtcaagactatacaaggtaagagctgaaatagacatggtaaattgacaatgtgtggaagggtaacaactgatttattagtgatgtacgagcacaaaaatcaagaaaaaactatttttccaaaattgaaagagaagatgtggagaaaaaaacatttctaacaatcatcaaaggataaattttaactcagctaatgttcatcacatgatttgtgaagagcgtggctggctgcatccactaatgtgggccgtgatcggtcaatgtaacccgctggccctggtggggatggtggaaaaagggcctgccagaccagggagaagcaagactctagcttcatgtattggaacgggagaacacacaacgcgtgcgcggggtgtacaaaaccgatattgtaacggagtagaaccgatattgtaacggagtagagaacgtatggaaatttttgaagaaacatcttcaatttttataatagtagatattaagacaagatatacaatgtactagatttatttcacccaagaacagtgcagatccaccgctcggctatcctgtatggtcactcgggcttgttggcgattacgacgttgtatatctatgttgttgaaggattgaagattaaagttttgcgaacaaatattaccatcatatttaaatatatgacattgttgagtttattcgacattcattgagaaattttggcaactatttttctatattataataataattctaacaaaattataatatttttcttttttacattttataattttttgtgtttttttatttcttctttaactagaaaaaatgcccgtgcattgcaacgggtgaagtctattttaatcttattattgttatatggttcagttaaaataaaattcactgtgggagttcgtttatctctactattataaaaattaatcatctgtgcatgagtcggtttttaagtttattcgtttttggaaatacagatccatgtttgagtcggtttttaagttcgtttgcttttagaaatatagaagaaatcgtataagaaatatctttaaaaaaactcgccctcctgctaacttgagacgattggattcctaattgcagctcatgatttttttaaaaaaaatatatatccaaacaagttcccacaatagatttcttgttaactaaaatatataacaataataagattaagatagcttttaacacacatatattttttctagtatatatatatatatatatatatttagaaaatcatgagctgtagttaggcgtctgatcgtctcaagttactatacgagtgtttttaaacagaattcttatatgattccttctgtattaccaaaagtgaacgatcttataaactgaatcaaatacagatatgtatttccaaaagcaaacgaacttaaaaacggattcatacacggatgacgtaccaaaataccggcaaaaaacatcttcaatttttataatagtagagatttgtaacaacatgtttaattatgaaattaaatagttataattatatttatattgtacaaggtaccacgcttgccgcgaggcaattagcaatccaagagaccatcttttaaacagccccaaattcagctgcacaagcgatgtggtataaatgattcaacgccaaatgttggtaaggttgatattggaaataaagtgaacaaaccccttttattttactactgtcaacgttttgagcttactgttaaacccatgtcttccttttttttttcttttactccagtctgatccagaaatactacaatcacaagtctgaatccatgaacacaaggagagacaacattgggcagtaacacacaataagttatgccactcgctacagttaggtggcaactatgtaccgttctagcaactacggcaaccgatctgcaattttctgcagttgaactgaagaacaaactcagctttgcagtgaccactgacccccctgttgcgaatgtcctccagcttactaaaaataatgggccatgcgagaggactggggcgcctgcctgctgttgctgcttgcgccgatgaagccttgcagaaggctctgtgcggctttcacttgatccggaatgccctggatctccacaatggactcggaagaaccaggatgggcttcgtgcaacttcactctcgcaccagagatctgggatcaaggggagattttcacgaggaaaactattggtggccattggggcatggttatgactggggatagtgcataatgtttctcttacgctataccagacggatctcagctagattgacaccaccaacaccaatgacagactccagttaactatttggaatccacaattcgaagagccacctggatacctgcaaagagatcatcactcaatgattatgaggacaaaattcatgtttgtgtcctgtaaaaattcagtctgcgtaagccatacccagtgagacctgacagtcttcggtaatcctcacgtccatggatctgctcagcagcctgaaaagaatgaaattcaaatctattaagcactgaagagaacaaaaatatacattcagatgcatcagagaggcatcaggtgaaccaggaaacaaggaaataaaaaatgagaaaagatcaacacccaactaagaaaactggtaagcaacagcagcagagaacagctgaataactgaatctagggtttgcaacaacatcgtaacaattgaatagtgttaccaatgatagatattagagtgggcacaagacagaaggatatatttggatcaccatgacatattctagaatatttttgtccttttttcagacgtctgaaccatcatggaagaaaatagacataatgcaacagtcaaatatatggtttcatgtttctaatggaaacatatcaggcgagggccatttgcaaagaagaggcaagctaacgcattggaaatgtacctcagtataatcataagcattggaatttccagctctggtgattcctaattgttgcacattactattcccggctctcgagaggcctaattgtagtgtaaccctattagagtacctatcagtaggtacttggtcaagataagaacggcaggacatataatcggcaccaggactaatagatgagggcagttctccattaggcaagcgagtagttgctgcatatctttcgtatgaagcagatggtgcaactttgctacttccactagggtactctcttttagagaagtactctacaggatacacggtgtaaggatcatgagcagggccggtcctgagattctgaaggcccagcgtgaaactaaaaacggaggcctttattataaaccttcaaataataattaccatataatataaatatctttaaatagcaatcaatattcgtatttaaaaaatcatacgcattatattaaaattttctttgaagatttgtaggcgcagaattattgatgatgtcctgataatatcagaattattgaagtggctgtattactcttgagcatcctcaacacacctacttgtttttgttatctattgcatactttctcaacagcataatatcaaggaacaggctaatacttaagaaaatattaatactagattcgtaaattacaaggctacagaagtaccaaattagttgaaacaaatctaaccaatgtgaaaccagcaaatcactg

SEQ ID NO: 9677 - DNA, 21872 bp, Oryza sativa
  unsure (1)..(21872): unsure at all n locations
aggaggaggtggaggtggaggtgggcagcaggcgtcgccggcgaccgtgttccggatccggctcaagcagccgccctcgagcctccgccacaagatgcgcgtgcccgagctctgcaggaacttcaggtgcgtttcgagattagttgtggtttttttgggggtgttttttctttctgggatttaaatatgttgggggaagcttaggtgtgatgaatttaaaccctgatctgtttcagcttattcatcgatttattgaaatggtttttttccccccgaaagaaattttcctctactgtattgcttagaccacttgttttaagctatttgttaagtttgtctctcaaaatatctaatttatccctataatatatccatgacaataatccactcaataatctaaatcaaacgatctgggtttactttttttttcctcttcaaatttgggtggcgtttcaatgattgggatgaacaatctagtgactcaaacttgcagaagcattagcgtgggcatggaattgtgattgctttgaatgattgtatcctgtgcaggcttctactatactagatcaaatacagttataacatgtagtgtcattatttcacataactaagtttagtcaggtcaaactggttactttgttcaccagttagaaaataccgaacgtgataactccatttttaaaatccacattatttttttttgtttaaaactgctttgatcttgtaggatgaggttgccttgtctgctttagcctacactatatcgggaacaactagtaactatcttatctatggttttttttttattgcagtgcagttgcttggtgcgggaagctcaatgcaattgcatgcgcatcagagacttgtgcacgcataccaaggtatacatttttccatcctttccctgaaaatttactttcctctgacctttagttatccataaataagtttgttctgttagcttgtcttagtgggatattcaaccatttggtagaattgtttgcttacagtttctggttatgaaggtttctttgccgtaaaacgatctaatgtatattttcagctctaattcaagcccaccattttggattcccatacacattctaaatccagagagaccaacagaatgttctgttttcaatgtgaaagcaggtaatccatggctaaatctcaattgttttggtaatgtgattacgttatgcatgtgcaaatcactgtccattgggcattttatagtcaggtgaagggtgagattcaaactcacttttgtttatatacgagtttttctacctccaatcctaactcactgtaattttgaacagattctccacgcgactttgttcaattcattgaatggtctcctcgatcatgccctcgtgcattactggtggcaaattttcatggaaggattactatatggacacagccaactaaggtacatctctaccttaagcaaatttcggtatgcatatcatttttttttgttagtagtaccattgaacttactttgttaatttgcgaaacactcaggattttcttttttcatttcaagtctatatacatatcatgctgttttgtgttttttctctaatacttgtttctttcttgatatggtgaagggtcctactaatcttgtacgtgatgccagttcctggcaatgtgaacacgaatggcgtcaagatctttcggtggtgactaagtggttgtcaggaatttctccggtttgttgccaatttgcaaacttacagtctgcttctcttgtttttgataattagcactttacacttggaatgcaaatatgcaatacgattgacccagcagtttatacagtccgcttcacaatttaacattcgagatttatatacttttcagtgtcaattgttaatcattatttttttaaaatataatattttataaagcagtgacaatagacttgagtttaaactgttctaagattttttcactggacatttatcataaacaattgcaacaattaggtaaaaaagattctggctcagtttatgtctgagtaagtactttgatctatttcaaatgacactacctgtgtttgattacccttttggcctgaaataagtggatcttagaatcgaaggaatataattactaagctgttgccacggctaaatttgttttgtttctttgactttgcagtatagatggcttcctgcaaactctagtacttcatcaaacttgaaaacctttgaggaaaagttccttacccagcagcctcaaagttcgggttggttaaacacatatattactgagcatatattttttttggaggagaaagcaagcatgcttctttacgctactctgacatattgctgtttactgcagctgggtggccaaacattctatgtgtctgttcagttttttcatcgggttctgttcagcttcattggtcacaatggccttctcaaaactcagcacaacctagatggttttctactagcaaagggcttttaggagcagggccaagcggcataatggctgctgatgctattattactgaaactggagcattacatgttgctggtgttccccttgttaatccatctactgtagtggtttgggaggtgatgccaggccttggcaatggtattcaggcaactgcaaagataaatgcaacaagctctcttcctccatcactaaatcccccactctgggctggttttgctccacttgcatcttacctcttctctttgcaagactaccttgtttccgagggcgcacagacaaaaaaacaggcacaggtagataatgagaccactgaggtagcatcgatccattgttgtccagtttccaacttttcagcttacgtcagtcctgaagctgctgcccagtcagccactaccacaacatggggatctggggttacctcagttgcttttgatcccactcgagggggatcagttattacagttgtaatagttgaaggtgcgtatatgacacctgggaaatgaattagtatgatgcaattgtcacatctcactatgactatttgtttctgatgaatggcatgaacatcaatgccattcataatcaccacactaatcctatgatcatccaacagctttaatagtaggagagttaatctaactatgtatgtccagagcatgcttatacatgttttagctccctttagttgcttttgttgtttctttgatttgctctggtagcttgtgccatggtaataaaagttcttgtctgtaaatgctatatgcatattcttttaaggacttttggggtctctgaaatttattaagtgaatcggttgatcttaggctcttggctaatgcttatttattttttctgacaattgttaaaccacatacttccagggcagtacatgtctccttatgatcctgatgaaggaccttccatcactggatggagagtccagtgctgggaatcttcagtccaacctgttgttcttcatccaatatttggaagccctgcaaactttggtggacagccacctacacagactgtttggtccacaagagttaacaaaagcatcccaccatctgaggaccttaagaaccctcaatcatatgttccaatgccaacaacttcagatgagcggagttcttctgagtgcagtgttgacagggcgaaccgacttagctttgacccttatgatcttccaaatgatgtcagacaattggcccaaatagtttattctgctcatggtggtgaggttgcagttgcattcctgcgtggaggtgtgcacattttttcaggtccaaactttgaacaggttgatagctatcatgtcaatgttggctcagcaattgctccaccagccttctcctccagtggttgttgcttggcatcagtatggcatgacacactcaaagatcgaaccatactaaagataatacgtgtgcttcctcctgcaattcttaatgctcagacaaaggttagctcagctgtttgggaacgagcaatagcagataggtatccacccaagttaacagaggttgattgaaatgatttatttgttgaaaatgtttttttttataactgcgatctttttagcagattttggtggagtctattggctggtgtggattggtgggatgctgttggctgcacacaaagtgctgctgaagatggtattggtaaggatgcttatgcagatgcaatttaaaatttgtgtatagtatttgcatttcaattgtgttctagctgtccacacaattagaaaagtagggattatctgctacacggtagaatttccacaactgtcactcaacctcttaaagtatatacttcctccgtttcataatgtaagtcattctagctttttccacattcatattgatgttaatgaatctagatagatatatatgtctagattcattaacatcaatatgaatgtggaaaatgttagaatgacttacattgtgaaacggagggagtaattaagaacagtgtaaccaagcaaatctctgtttggttgtttataatgttaagactttagagctgattgcacatttatgctcccaatttgaaagcattgtgcatctgcagtatgatgaattgtgttttgcttcatttttcccatttggatgtctcaatatgttaacattatttcctggtgtgagttgcaatacatctttttaagctgatacagaacttttcagtaagtttcatcattttctacatatggttggttaactatttcagcacctgtaacatttatatttgtccatgataaactaaatctcttgcttttccttccagtctcactgaacagtgtgatagctttgctggacgcggacttccattgtcttccaactatacaacagaggcaacaacactgtcctgtaagtgtgctgtgcttttagtacattatgtgcagttttaagcacaggccttcaatttttcatcatctactgcctactgccattactatgtgacatgcatgtcacaatatctttttgggttcttaaagattgtacattcaccaatcaccagtctttattccaccagtagttgaaagggggatacgaatcaaaatataatcaagatgacttttttccttttctttcctggacatagttttttagtattcttgtgacaagtcactagcactgctttgcagttctgaatgaacattttagcatgaagcttgccaaacttttctatgaacataaattatatctctggatgtattggtcagagaccatttacggtagtatgtagtttgctactttattcataatgcaatatattgtaatttgtgagttggacaagatttgtttttctaattgtgtgtttaccttttacttcagattttgaggacttgaagttgcaaggctattgctttcttctgttactgattagtctattttacttattgcagaatcttgataggataaagtgtagattgttggaaggaacaaatgctcaagatgtcagagcacttgtgttggacatgcaagcaagattgcttctggatatgcttggcaagggaattgagtctgccctgataaatccatcaactctgctacctgaaccgtggcaagcttccagtgacatgttatctagcattgggcctgacaaaatgactgttgacccagctctacttttaagcatccaggtatactgtgtttcatgttcttttgatttcctggtccacagtttcagttcaatttgctaatctcgttttcctttttttggctatagacttaatatgggcaaatgatgttgcaaacctttttgaatgataagctatttgtaaaccacaacctattcatgcatgaggatgaggcatgatatgccacagattaaccatgccatgtatggaatttacagtatttacagcagtattttgctgtttttatgttccaaaccgactacgattcaaacagcctccagatagctttcatcataagctttgctcctaggtgtgcaggaattatgctcagcccatcaactgcctccaatgccttagcaatttgtgcacacatttcagcataagcggtctgcatatgaactttcatgttactattttgtggatttaatttttttttgaacatggactgcaggggtacgttgatgctgttctagatttagcgtcacattttatcacacgcttgcgacgctatgcgagcttctgccgaactttggctagccatgcagttggagcatcttctggttcaggcaattctaggaatatggttacaagtccaaccaacagttctccttcaccttcaactaaccaaggttaattttgattccgtctatcttgctaaagcttgtgcttttttttttggtgctaaataaaaccacctatgaattatttgtttctttatttaattttttggaaaatgacaagttgctggcacatttcaaacttagcaatgatgctaatgtttcaggtaatcaaggtggagtagcgtctacaacagggagctcacaaatgcaagagtgggtccaaggtgccattgctaagattagtaacaatactgatggtgctgcaaatgctgcaccaaatccaattagcgggaggtcatcattcatgcctattagcataaatacgggaacattccctggcacaccagctgttagacttattggggactgccatttccttcatagattatgtcagctgttgctattttgtttgctttttcggagaaggcaatctccaaggatacctgcaaatgcacaaaaaagttctgattctagcatgcagaaacaacacttgatgaacagtaagacagaggataatactttggcagtcagatctggtctaggtgctgccaaattggaagatggcacaacttcacgtggacagatggttggagcaaagggtgctgaagaaaatccagtgggcaacaaatctgctaggataggttctggcaatgctggccaaggttatacttcagacgaggtaacaaacaaataacccataaatatggattttctcagcctgaattgttcaataagaaaacttttttcaatctgaaaatagtgatagttatacatataacagtatttttgtatgtgcgcttcgacatcaatatctagcctgtattgtttctgaatcaacatttagattagagctgttatatagtgtggttatatgtctgcatatcatatatcatgtgtgtgtctaaattgtttgcaagtgccatatgattaagggtaattagacatgattggataatttacctagtataatctttgatcggtgatttgcccgacatgtttctcccgattttattagttgcctttctgaaagtattatttgtgtagcactgtaatacatctagtttctgaattatttgtttcatgcttgcaggtgaaagtcctttttctcatattagttgacctatgtaaacggactgcaaccttgcaacatccgttgccttcttctcaggttggttcgagcaatattattataaggctgcattacatcgatggcaattacactgtgctccctgaggtagtggaagcatctcttggccctcatatgcaggtacaatacagatttattgtggaagtttatttctgtattctctgtgtactcattagagcattcaatgttctcttctcagcaatacattatagtaattctcaattgtgttggagaaatagagatatagtattttgcaagttctactctacttacctgggttaacgatggattgatccagcaaaagaatattgttgtccaagttaattatggaaattttcatttatacaagcacacgtgcataattggtttttatgatttcttttgttcatacgttctccatctgcctatataatttattactcatggcctcagcgccctcttgtcaccatttaggagttctcattttcatcagcatgtacatctttggtaagagtagtgagcatgtacatgtccaacaagagctgtgtacacgcatttctgtcgagaatttataccaatgttgcccatttgttccaatatttattgcagaatatgcctcgtccacgtggagctgatgctgctggccttctacttcgagaattagaactgcagccccctgctgaagaatggcatagacgcaacatgtttggtgggccatggtcagaaccagatgatcttggtccattggataatacgcgacagctaaaaatcaatggctctaccaatcgccacttatcggacatggaagaggatggcgacagctcctttgggattcaaaatctttggccaagaaagcgccggttgtctgaaagagatgcagcatttggtctgaaaacatccgtggggctgggatcttttctaggtgtgatgggttctcggagagatgttattacagctgtgtggaaaacaggcctcgaaggtgaatggtacaaggtaagcatacttgatagtagtagtctctaacttcagtattctttcagaattaattatcgacgcactctatccaattcaccatttgccgtgacaccgagacatgctatcttttgcagtgcatacgatgtttgaggcaaacctgtgcatttgctcagcctggtgctctagctccgaacacgtcgaatgagcttgaggcatggtggatcagccgatggacccatgcttgcccaatgtgcggtgggacatgggtgaaagtcgtttgaatttgacgcctccgggcgacaccttcaccgtactaaccactctgccaatagctttctcggccaaatctgtgtaggcgccatcggtttttggacaattttgtatctaactttagattgtttggtctcaggccctccctggtatggtatcatagtttacctgcagcagtcagagcagattgcaccagcagctgtgtaaaacggtaggaaaaaacaggattaggacatgcccaaacactgtcagagtcagcagttgtgttgtgcgatccttttgtacataaatgtagtgtactaatttgcaacattggaaaagaaactccgttagatactgcttgatgtcaataatatttgctggtgattgaaaagaccatgtatgtaatagcatgttcaattgggtgtttctctcataagctatgctatgttcaacttgtggctttagatcatcgttcaacgtggtcgacaaaataaagacgaaatttgaatttctgttcgaatcttttcgaagggtagaaagtattcaaactgcgcttggttctgatatttacagagctacctgtaatactgtcatcctagaacacttgcaaaaatttacaagtgcttaaaaatattatcgagtgtacagaatttgcttaaacttaacaaaatatattctcgaaatatacacactacaaaatttgctaaaaattgggaagtatcagcggtgtggtggtctaatatttaaatcttatacccacgaatattatgtacgcgtaatttggttttcaatataaatatcgtgaaaataggatttgccgctagtttctaattgtgttagagaagcatttgcgagtgtgcaagtgtggtgttgtatgcgtagtgctgtgcgttcgtgcatatggttcagtcgtgtaataaagaaatgctaagggtgtgttggatgctagtgacctagaacttgtccctttcacgcaaaacagagcaacaaattagcgcatagctaataaatatattagtaaataatttaaagaaataaattgatatgattatttaaatcaactttcctactttttaataaaagacagactatttagtacttgtcgacgtttgatgtcgcgattccggtatttgcatagtatggagatcgttggtactaggatatacgcgagaccgaggtaaaagagacgaagacagagatttttatacaggttcgggcccctgaattgtcaggtaataaccctacatcctgttggccgaagcggtcgttgctcttattcaccataatcacaccagtataatatttggagtagcatatctaattgttgtcgacatggcggtctgaagatctgactcatagtcgacgacagggtagtcttcctcctcgaatccatgcccggcgagatcagaaacagcgctagatccctacggccggcctctgtaggtatcggatagggtcgatccagaggacgccgaggtcgtcggtaaggacgtgggaggagccgaggaatagagagagagggatagagagaagggaggaaggagggaggattatgacgtggcgaccctgacatgtggggtccacgtgggttccacgctgattcaaccgccacataggataaaaccggagttaaaaccgtcgagggacctaatttgcactggttttgtaaattgggggatgcattgtatccggttttgcggttcaaggatgattttgtaattcgacgacaagttgagggaccttcggtgtaccttttcctttgtttttagccataacccagttcaatacctccccacgctcggcctatatctctttggcccaacacacaaacaggcccaagccacaagcataagtggagtcataggcccaacttacatagcctactgcgatcttcaaccttcggaagatatcctatgcatgcatgatgccggagccggtcctcgtcatcaaatccaaccaatctttcttgatttggttgagggcttttgatccactcgatctcttctccccgtttccccaatatcagagagaattcacaaaaaaacgggacaaaaaggcaaagctcggtcagccatcttcgatggagattaaatccaacaaattaaaaccaaattgaaagagaaaattatggagaaaataatgagttagaagtagggaatcgatttttgcaataaataataggaggaaacgtacagggaggcagatcgcggcggtgctagggtttggcccgggccctaagagcggtaaaaaaaggagattggatcggactgagtggaaaaatacggtgataaaaaaaccagatgatgaaaaaaaaagaagcctaatcggacataaaaaactggcgagaaaaatagacggacaaaaaaaacatattcaattaaaaccgattcctcaattaaaactgaaaaccgatttaaacacggatgacttactaaaatctcagcaaaaatatcttcaatttttacaatagtagagatttagacaaagaacaataatatcatattgcatgaaaataataattcatgaccgtcaaaaattatatataatcacttcaatatacaatatctcaatataatatacaagatatgagggcaatatatgtctgcaaaaaaaacaatgatccaaagttatttgattaacttgttgggggtataaaggcgggaaacgtgcgtgtggaaaatgagggagagagaagttgggaataagtagtataggacgccctaataatgttacctcgccaagcttttttttttccccattttgtttaaaaaacaacaaactagtctcgaatacatgtcatagatacatatgaacccacatgcagtggcgaacccagaacaaaaattaccggggatgcttgatatgtttataggtttatttttgagtaatataatgcttaatatgacctaaaacacgtccgtggacaccgggtagatacacataggtacgcccctgcccacatgttatagacaacgattgataaatcattagttaacttatcttaaaagtgacaaacaattaaatgtcccaaatacatatacaaaaattgctcaaacttaaccggcaaactgaactacaactagtctcgattaaatgtcccaaatacatatacaaaaattgctcaaacttaaccggcaaactgaactacaactagtctcgactcgactgcccgcgagagcgagccccccagatctccctcgttctccggcgatggcgtcgccctacaccggcgcgcagccgccgtatccggcgggggcgcaccagccgccgccgccggcgcaggcgctgctgcagcagaaccactcgctggcgttccgcgtgatgcggctgtcccgcccctcgctgcagcccgaccaggccgccgcgctccgcttcgacccgcgcgacgtcttcctccccgaggacgccctcacggggcccgacccctccgcctcctccgccgccgacgccgccgccttcctccagggcctcctccacccgctcgactcgccggccaccaccgtccccggcgacttcaccttccgcgaccgcttcctcctccgcgaccccgtcgacgccctcgcgctccccggcctcctcgtcctcccgcaatccttcgggttcgtctctctctctctctcgcttccattccagtagtagattgcagcgaatgattgtgttgatgtgatcgtgcggggacgcatcgatagggcgatctatttgggggagaccttctgcagctacatcagcatcaacaatagctccagcttcgaggccagggacgtcgccattaaggttctcgaaccatcgcatgattaccatcctcttctattatatcgcattagttggaaaacattatttgaaattctggatcgtttaccataaaatattattctggatgttttctggagaacggtattattgcacccagtttgtcattgatgctgttgtttcagtgcatctggttagagtgtgctaggttgatgtttttctcttcttctttttttcagtgttagaatctcacatcaccaagttcttattgttgcagtcatgaactgatgttaaattcgattactcgattgactctctgctgtggaattactggaatagttgcttgttcatctttttttacatttgttgaccaatgtggtgtgttcagtgattagaccaattctattagagcctcattaagaaaaaaatgtaacaaggtgttattaaggcatgcaagaaattatgaggtattataagctaataagtagctttgatgcaaataattataattgaccttgactttatctgtagttcttattggctagttctgtcgatgggttgcatgttgctctatgacaaatttgatactttagacacccctttggtggcatgcatgcaggacttagctgtccttgaagccttcatttcttcatattatgtcataagttttaaccggaagtttatttacattaggcagaaatacaaaccgagagacagaggatacttcttttggatacatctaaggcccctgttgagtcaatcagatctgggggtagatatgatttcattgtggaacatgatgtcaaagaactgggagcacatacgtacactatcctcttttttattttatttacaaattggttgcattagacattagtgaagcacaccttattgttgatttgctcatgtggtgattgaatccaggcttgtctgcactgctttatataatgatggtgatggggagcgtaaatatcttcctcaattctttaagttcactgtttcaaatccattgtctgttagaacgaaggtacttatttctctcattttttatatggctaatctatactccatatgtataatctctatgtccctctatcttagaatgtaatcccagcatattcggattacagagtaggtcacataaataatctgtgttcaccttttgtttcaggttcgcaccatcaaggtatgtaccctcttgtttcacaaatgcaaacaatattgtaagtcttgtaactaaatgttggtttcttttgtggaaacctttaaaactttacgctgtcacatttgcattttttttagaatatgttctgtcatcgcagcagttaccagttagccatttctttctttacttgccattctatctgtgcagaatcatccttttggttccataagaagtttatcagcgtcttgaattccccaaaaataaaatttggggaacctcattatactttatccttggtttattccaaactggttgaacaaacttctatgtaaatgtggttggccttgtttccttcgatattatagtatatattctactgtactactgtttgttataatgttatttatccctttactgtgcatttatttattcatcatggcagtcttgaactctatatagctagtccactttgacaggataccacttatctggaagcctgcatagagaatcatacaaaatctaatctttatatggaccaagttgattttgaaccttcccaacaatgggcagctacaagattagaagccgatgaacatccgtcaacagtgaagtctataatcgggtaagttgagctctgataacaaaccctatttggagaatggaacatagtgtctcgatgcaaggatgttgatatatcatgtcgatgcaaaaggattgctaatgtgagttctatttttcatatagggacttgtgcaagcaaccgattctcatcagagctggaggaggaatatacaattacctatatcaactcagaccatcgtctggtgagtctggtcaaacaaaggcagagggaagcagcatactcgggaaatttcagatcacatggcggacaaatctcggggagcctggccgtttgcaaactcaaaacatacatagcactgtcagtaaagttcctgacttatggtttgaactattttatatgaagtgtcgagggctatacctgttaagttactctatatataagtgttagctataactttggcaactctttcttttgagcagcccactgcaagcaaagatgttgatcttcgtgctgtgaaagttccacctgtgatatttctggaaagaccatttatggtaggtgattcgttggtgaacatctggctcggatatttagcaagaaatttgttcatgttctttttccacaatattttgatgtttatgcttctgtattgtttaacttgtaagataaaatatgttcctgctttggtatctatctgatatttcccttcaatagtttagctaagggaatctctttattagtatctttggacaaaaatgggtcagtcttgcagacttttttgtcaggtcctatggatcccttgtatagtctctgaatatttcaaaaaagaaaaatgcattaaagcattacactagggttatgccctattgttcccataaaaaacgaggttctggctgttcaaaactgttatgctccaggctctctagaatttcctccccatatcactcacccctttcaatttgttaacatgttatgtgtttaactttccacgaagcatgttgtgcaccaagctttcaaaagttcccttcctatatcattctacccctttcaattcattaccacaggagacatgcagtactgagtaaatttgcaggaatcatggtaatacatctcgcatgctttattagtgtcttttcttcatacagtttcatgacttgttgtcaatcgctatgcactaatgcttttcgttgaaccatgcacttagtgcattactgcattgcaaatattaacaacagctgctcttcacattactatcgatatttgattagatttatatcctcaggttaatttatgccttacaaaccaatcagacaagacagttggcccttttgaagtatttttagcaccaagcgtacttgatgaagagaaatatgttctggtcaatggattacagaagttggttagttgtttcacttgctattttatgtttgctgttatacaaatgctatactagtctggggtgttctgacagttgcttagacaggtgtcctgtgaaatttgtccctggtgttccataacatatttgcatagttaattgctctgtttctatggtatgctaatgtggcatgtagaagcgtgtcaggctataggtttctttgtttgagaaaacaggaagttaggatttttcattgggtacttgatttcaggctaatgttacaactttccagcaatctggccaatggaaattagattgtgagttaacaatgagtttgtgcgctgcttattaatcgctttggtgacatctagttttttttttttcttaagagatagtcaaacgtccaggaaaatctttatgttggagtacactactcagctggtctcaactaatctctttgtggtgccttttattccctcctctgtaacagtgggtgaaattaatgatgtgttgggtatgcttttgatattttgctttcatgatatgcgcaggttttgccactagttgaggcttttgaatccatcaactttgacttggtaagataactttatgggtacatcagtttagatatatngttcgagtannnnnnnnnnnnnnnnnnnnnnnnnnnnnnnnnnnnnnntaatagcacgaatgaggaaaatcagtatcgttgaggaaaattcacaaggcagtattgttgttatgattcatcaatagcgtcactggtctgataaatatccaagcaaaatgatgtgacacatcctaataccagtccctccgtcccaaaatcatttatattttgggacggagggaatggtattaggatgtgtcacatctttttgcttggttttttatctgaccagtgacgctattgatgaatcataacaacaatactgccttgtgaattttcctcaacgatactgattttcctcattcgtgctattatatgaatgttaaccaacagttgaaacaatttagtcttgtgtttgaccatcaaagccagtggcaaattcattgtcttatgaatcagaaagaaatgtatttgactatatctggaatgaatctgtgcagagtatggtagctactcaagtaggcgtgcaaaaaatttctggaattacactgtatgccgtgcaggaaaagaagctttacgaacctttgtcagacatagaggtaaagataagcaaattcggtactatcaattactctttcttgtagtgttctgcatgtttgtttgctaaagctacattctcgtgatagcattatagttctttaaagttctcatgataaatttgttgaacataagtgctcgagcatgtgaagcttttcggcatgttctcttttcattcctttcctgaagctgcattggtatcttatgcacggctgggttacttgttttttttcctgcagattttcgttgatgcagaatagaacaacgctgcattggaaaacagacacagatgttcccccatgttttcatcatctgagaaagggatatacatatcgtcaagcgtattctagttgatgtattttttgtttattgtacaattgattatatccgattgtaacgagacacatttttaccaaaaagggaaatagattgaatgttcttccaaggaatgcagatgcgggcattgtgaagttccaaacaagataagcaaattgtcttgtgtcatttgtatggtttgtcccagttaattatgtcctaaattatatgatctccctctaaatccttccttgcagacaatcatcaatctctttagattggcgtgtctttgattcaatttcccttccaggaattgagaaccttccggcaagtactttgccaactccttcagaaatctcaaaacaaattcccaactctttccatgcaaatagtttttgataagtcaaaactatttgcataatattccatgctggaatatatgataaccttcaatatgataagtgagaaagaaaccaccaataccaccaaacagagcaaacataaccataaatcaccgaactatttgcataataatattgtctcaaaagtgccacaaatgctgtggcacaaccaccatccgaaggcaagaaaatagcacacacattataccaccaacaatacaacgcaaaggaaaaccaacaaacaaatccaacaaaagaaagaaagagatatagagagcaatctagtactaatccaatgtcacagctgcaaattgtgccccaattgctgtgttcttcattcattcagtcattcattcaagtgaagctcgtcagaggtgatccgcacagctgcacgtcggagatgtcggagagcctctgcctcgagctggacgccatgccgaactcctccagctccaggtcggagatgctcttcctcttgtgcgcctcctgcttcgccggcctctcctccgacgcctccaggattgggctcagcatcggctgctcactctgctgctgctgcgatatcatcgcctgcgcctccgccaccatcgaggggtcatcctccgcagcgtagagtaccttatgaatcgcgttgacaatctccagaaagaaaagataaacaagtttcttgatcagcatcgccctaactgacaacaaaataaacatcaagaacctaagaaccagtgctactgtttattttccgaaaactgaatggttaactctaaaagcaagttcacaatccttttagagttttagtattccggttttaggatagtcttattgtcaccaagtagaacaataatcaggcaaacggttttaggataggatagtcttattgtcaccaagtagaacaataatcaggcaaacggttttaggatagtcttattgtcaccaagtagaacaataatcaggcaaaagttaaggcattctgctacggttttaccggcaaatgctcgacttcagggctctggcacaagatctccacatccctcagcttggagaaatagaaatctctttctttctcgagactatcgacgagcagcttcagctcagtgatctgcaaatgatgtcaagattgagtctctcaccctttagcagcatgagaataaaaaaggccagccgatcatggcatcacacaaaacctctcccacctgttcatcataagctggtccagcggagtttgcgggagacggctttgcgctccgtgacggaggggcgttcggcgcatgcccattggccttcttggcaccatgagatgatgcctgtgctttgtgggtggcggatgaggatttggccggcgcctgagaaggcactgatgtccttctgttggtctctttgccgcccttgctgctctcccttctttcagaagcattgtaactgtgaatcaattcacaaagaacagcaatacataaggttttagacgagcaattaaatgaaattgtcacaaacagaattttgaacctgacaaaatctcacaaatcaaaaattggacaggttagagaatagtatgtaacagattacctgttcatgaagcctccattgaccgaatcacagtatcgcttcatccattgcatgaattccagattgtcaaggggccttcccttggtaagcttgttcacttcgatgtgctgcgataataaggagcaaagcaaacaagaaaattgtaagaacacagtcgcagtaccagtactagcaatgattaatataagcaacaatcccaggtttttttttctatcatcaccagatcatgaaacactacagattcacacaacatatagtatcaattagcaacagcaggggatctagaatctgtggtatttgtgcaaaactacttcccttcccttctgaagtcaatcacgaactgaacaaacgcgcccaaatcagctacacgataggtgtacggaaccaagatttgctcacggtggggagaagaattaggggggtaggaatcagaaaccggccgcaccttggtgatcttgagcttgttgaagacgtcctgaagaactttgtagttctggatcatctcgtactccgtcttggcgtcgaagttgaccttgtgcatcggcaccgcccccgggtgcgccgcgtccatcagctggcacgccaccgcccccgacgcagcctacacgaaacccacacccaaatcaaatcgccacatcaagaaccgagaaaaaaaaaatccacgccccgcgcatcaagaaatccaacaaacaaccaaccgaatcaaaacccaagggggaggaagagcgcgatttacctcctcgaccttggagaggccgagctgcagggtggtgttgatccacgccaggatctcgttccgccccacgaagtaggccccgtccatcatcccgatgttgctcgccgccatctcctccgccgccgcgaaccagatcaccaccaccacggggatcgaagagatcgaagaagagagaagcctcgaagatctcgcgaggaggaggaggagatcggcgacgaggttttcgaatgcggcggcggtggtggtgggggaggaggaggaggagcgggattaaaagggaggcggcttttccatggacgattctgccctcgtgttcatggtttcaacggctggatcgtggggtggggtggtggatggacgggtggatctggtcgaccgttgggacggggcgggggtgatgtggtaatttcgcgaggacggggggaatttgaatttttgggaggttttgcgtttcgtgggtgtgtacagggtacagccgtcaaggagttgggcatgtggtttttgttagctggaataataactgatgaatggacccaatgcagatagtgcaaatgcgttcggttttcaccttttttttttgcccgttgcttttgatgtcttctcaagctgttgtaattttgatgaagaaaaatgtaattatttttttacatggatatttgtttaactcactcacaatttaaatactcgctccgttcacaaataggagtaactactactgtatttgattttgacatttgaggtctagtactattttgacaaaaattatttttataaaaaataacataattatttagcttcaaagtcgtatcagtagatttgtaatgagaagtattttactaacatcttacattcaaatatattcgtgttgatattggttgaaaattaatgctcaaagttgataagtatttgtcaaccgcggaagtaatattttagcagctataaattgtgtaaatggatttcttgctattctgcaagcatgttggcagctcggatgtgcatttataataaattggctaactaagataacatttcatactaatttgagaaataaactggaagaaaagagactgatttgaggaaaagaacgagagagcaatttgagaaaaaaaaaaagagttgcatcttgcggcacagatattcctatgttcaattttgaccagaacaccttaaactaatttttactaggtcatattacctttcttgcaatttagaccaactatctttatagccctataggcacacttccttctatgcggagctcacgctcaagattgagcctacttgactgcttcaaccgttgatcggtatccatgctagatttcgtgcctccaccaagcttgtcatgattcagcaccttgtgcttgagttttgcctatcaacgtggtgtcagagttcaaacttagatgcgccgtcatccctctaggtcgagctctaccgaaattggtcactcacatgtgctatagtacacatctctccccgcactaaagtacacatcagtggccctcttttgtgcttcactagaagaatgtagtttttctagtaggcatggatagcagcggttcacttgtgtagttttaaggaggcacggacagcgacgcatctacggctcaataatgtaaagaaaaccttagtctaaagttaaaacaatatctatataccccagacgaaaatagaaattctaattttgtcctaacccaatgaaactcaaaagaaatggagtaaaaaaaaagatatctatataccccagaccaaaatgaaaatactatttttaaccaggcatccaatgaaactcaaaagaaattgagtaaataaaactaacccaatcaaactcaaaagaaattgtgttaaaaaaaaggaaaaagtacaccaaaggtccctcaacttgtcatcgagttataaaatcatccctcaaccacaaaaccagatataaaacatctctcaacttgtaaaaccgttcactttaggtcctctggtggttttgtgcccggttttctctgacatggcagctgagtcacgtgggacccacatgtcaggtggccatatcatcactctttctctttcccctcttcccctcttctgtcccttcctcctctctctctctctctctcctccgtctgggcaagccgatgcggcggcggtggcggcgtggggctcctccgtctgggcgagcctacgcgg

SEQ ID NO: 9678 - DNA, 18875 bp, Oryza sativa
aaaatattgaaaattttgtttgagtgcacagtgtgtgcattttatgaaactaatgagactaaataattatagcaaaaaattttgacataaattttgaaaataaaaaatgtaataaattaaaaattttatttgaaattttaataggataaatttttatgttcatccaatgggtaaaatggatatttttatagaaattagatggtcaactaacgggaggagcatggaagggatcaaaatcaaattttaggggtatccttggaagtaagcaaaattcaggggtatagaagggattagttaaaatttcaggggtatagaagggattagctaaaattttaaggtatacaagggatttctcttgtaggttggatagtagaaatccaaatttcatggagaacctgctctacaacggttgtcctaccactcttatgccccgcttccacatgtacaatgcaaagagtgagggccctttacatgtagtactgctcattgacaacttgacttggtggaactctaaaaaatttgctcttgtataagagatatggatgcaaaccatcgataattaaaattaattgcttcttttcttgaatgaagcctctgtagcttctctcatgaatccatggcattaaaacgtcggaattaagaaaaactagctaagtagtagtactactattactagcaaccatataatagctttattgagaagcatttataaggtgttgagacttgagcaggtcaagcaagataacaattatacattgacctatcaagtatatattctatatgcaatgcatcttattctaatcaagccttgccgagctattcgagctcgagctcgctaggcttgagagcctcagcctaggctagagcttagcttgtctagtattcgagtcaagctcgaatcaagcctgtaacgaatttgacagccctagacgtatcaaatatatttggagtatgaactatatatgtttttaaaattctggacaaataacttgatctcaattcatgaggcacatgaatatgaaattatgtattctctgcatatttatatcttgttctgtacaatttgaaatattatatagttatttctctacactctaccaaatcctttgatatactcatgtgaaccgtcttcagatggccaccacgcgctaatgccgtctaatctggatggagctgattttcctaatcacaagtccaactgtagcctacagctaccacccaaaaggccattatgtactatcaggaaatttaatatcagacagccaaaagacatactatacttttataatggtctataggaggaaaggacacatatgttcaaacatcacagtcagccaaatattgagaacaaagaccgtatatatgagaagcagttgatgtcacacagatttcacaatggcttgttcataagcttataaatttcataacaaaattgagaacaaagaccgtatatataagaagcagttgatgtcacacagatttcacaatggcttgttcataagcttataaatttcataacaaaattgagaacaaagaccgtatctatgagaaacagttgatgtcacacagatgtcacaatggcttgttcatatgttagtgaatttcatatggaacagcataatagccaacagaaataaacagaggatgagttctataagtagtgagtatcttaaaaacttgttggttgctagtaactacacaaatttctttgattttaggtgtcttgtcaggggaatgagtgcccaccacatcccttaacttacttaacgtcacagaaataaacagaaatcacaaatttctttgattttagctgtcctgccagggggaatgggtgcccaccacgccccttaacttgccagggggaatggctgcccaccacgccccttaacttacttaacgtcacataaaataaataaacagaaatgcttattggtatttcttaatgtcacagataaaatccgtaagcgaacagaaataccgatgtagcactccaccctggagtattcaaggtatcgatttctacagggaacatgtgtgtcagctcttctccaggttcatccaaggacacgaagctaagataagctaagggtggagggaaattcactaagggtagagggaatttactagtgaaagacaagtgtctatagaaagctctatttaatcctaacgtggtatttcaggcgctggccagcccgctgctcccagatatggctctacaatgtacctagtcagggaggactttagtgtacttgagggctatcaccacctttacacccacctcaaacctattgtgggatacaaagcaaacaccggaaattaactacccagacaccatgtctacgcagttaataactattttagtgtttataactcactgaagcaatcactatattttaatggactatagtgaacaatgattccataccttgattaggaactaactgagaggtaactctcatagaataaatcttaattactcaatgatattcgattaaagcagagtatttaacagagtaaaagaaataagaagaggattgccgacaactttggaattcctccgacttctactctcctctctccctaatctagtatacaataaagtacaatagagcctcttgtaattcagctcatgttttggtgtgtgagaatgagggagaagaggggtatttatagtgtggtggtgacttgagagagtggagatgctaaggaatattctccatagaatccaaagggcatcttcgtccttcccttggcaagtgtcccttctgatgacggtttccaccggtattaacgaccaaaaccatcatagaatgaggattacaaccgtcatgctgaagttgggctggattgggccagctgggagttcggaaccctggccggctttgttggcctagcccttcctcctggagtctgatatgtgggccccattgtatgttcttcaaatgattgcatcttattgggtttatgggctcaaaactccattggcttggatatggaagttatattctcatccttcatgtatatttcatctcaactttggtgggttgcatcctgcatacaaatatacaccaacactcgtggaaattgttagaaataaatcttaccactatattgaatatcttatacttttatggtcttatgcagatattgatggcgagaattttgtacttaacaaccgtcaacaccaggctcgccggcctccactttcccctctcccaccggcgcggccggccgccactccctctcaggttcacggcaatgtcgacccgggtctcggtctggatcaacgtcagcagcggcctcgacagcggacgccagcgggggcgacgtcgggaaggggcactggtggcctggggaggagcacagcgaacaagcccggtggaggcggcggctcggatggagagcggaggatggcaccggcggacgtcgatgatagtcagagaggagctggaggtggccggcgacgggcgccgtgccagtggagttgaggcccctggcggcagcggcccgggtggagagcggacgatggcgccggcgaacatcgatgatagtcggagaggtgctggaggtggcctgcattgtgagggaggccgacagcgaacggggcatcgggccttgaggtcgtcgggtggtgaggagagcctcgtcccctggcggtagcacaggcggatggggatgccccgggatctaggcggatgcggcctggagaagactgcgttgggcgggcgacttgggctcggactggccggcggcgggatctcctcgctcaaaggcggcttagagaagctcggggcagtgaagcagcatccgggagatggcggcagagatccatgaggtggcggcgatgaccaagggcgcagcaccgcccaccagatcggcgtagggttttctcacttacatgtggatcctttttctgactaggatgccacgtcagctaaactagaggtttatattgctaggggatctaaattgcacggttttgtatagtttaggggtgaagatttctaatattggggattagggatgtcatacaaacccgatgtaaagttaagggacaactggtgatgcaatctcatgtgcattgtatatattcatccattcgaaatcaagttgagattaaccatacgttttgtttacctaatcgatggtcaatgttatgcttatcaccacctcatggtcaacctctacatcaccatcatttgaagcttgaaattaaagatatatatacataaggattggtaaaaattgtactaaatccttccatccatctaaaaataaattatatcgctaatgtgctagcatattcaaaatgttatttctgaaacatccaacccccctaacatcaaaccttcttcacatcacacatccaaaagataaaatttagaaaaaatagtgggtgagtttatctagttgtggtactacactatagatcagaattaccttgataaaaaagtttcatccaccgatgttaccaattttgaacccctgcattttgaaagcccttgttagttgtagcttcaatcatctgtttcacaaaggttaactttctttatattacaccagaaaatctttaagaattataaagtacttcatccgttaaattataagactttctagcattgcccacattcatatagatgttatgtatgctagaaaatgttataatatgaaacggagggagtagctgacaaaaccaagtaacattagtagatgacaactgcacacttgtatttgccttttggtttcactggccataacctaaataattttcagtggtgcaggaattaggctagacctaaataatatgatttcgtagttgctttcacgaagacagcgcatcagcttcattaatttgtactagaaaaattgtaaaaactgacaaaaacacacaaatccattaatttcacggtattttcccgcttgattaatatgttacaaatttataaaaactgacaaagacaaagacaaataagatacactgcggaacggtcccacctaaaataaaaatttaaaaactaaaaaaacaaaatacaaatatgacaaaaccacttattttgagacatctaaaaataagtgatgaaaagagtatagtttctctctcccctgctcaaagaaaaagtaagacacactgttggacggtcccacctctaacaaaattttaaaaactgtcaaaaacaaaatacaaatgacaaatgacaaaaccacttattttgagaagtttaaaaaactgaaaaaaaattgcaagaattgggcagtgcatcaacacaactcaataaaaacgttccaacagacgtggtgccccaagaatagctcatgcatcccaaggggcagatccatctaactcaaggtgtgtttaattcacgccaaaattggatgtttggttgaaactgaaacgatgtgacggaaaagttggaagtttgtgtgtgtaggaaagttttgatgtgatagaaaagttgaaagtttgaagaaaatttttgaaactaaacacggcgtcaatacaactgaaggatccagaaaaggcagaagtcaaaggcaggccgagggtgaaaacggttgttgacaaagcaaaagataaagggttaatttgatccatgccattgcaactttaccgatttagaaaaatgccactactattcgcgatatcggttgggttccattgcaattttgcaaaattgaaaccgtgccatcgtcgtgacattttccatcccttcagtcttcttgcttcttcctccgtcttctttcttctccttgtgggcaagatgctccagctggtgttccggagcagcaagatccgacgggcgatggcggaggccaaggatggcaagctggcgccggcctccacggcacgccgggcagcgcggcggtgttcgagctcaccgccaagttctgctacggcgtcagcgtcgacggtggggtcaggtgtattttggatgcgtgcgcaaaaaaaaaaaaaaagaaatacgacgctacctgtacatacactatatgatgtgtgaaggtgtgcacgaatcttattgctatcgtgtggatgctagcctaggtgccgcagcacctaggtgctaaaaggacaaaggagaaggcgccatcagccatgtaagaggaagacaagtaataaaggtgatgaaaataaaacttgagcagacgcaaaaaaaaaacattattttttgcgaatataggaaatataaatgtatgccttgttggctctctctaaaaaaattgttcgcacaaagcatgataagctcttaggtaaagcatcagtgctcatcgcactgcggcgtcctgtatctaccggattagagctctaatcgcatttaaaaaatcagaatcatgtggtaaaccggatcttgagagttcagactaacaaatccttatacaccaacagaacaaaaggcttccgcatacagaaacagagttacagattgtcagtaagaaaaaaaactaatctgaacttcacgtatgcatttcccaaacatatctgatgaaacagatctggtgacaaacattaagcatgtcctcataataagaaacatcaatcaaagaaagggaccttgtactgttgttctgaaccattctacttggacaaacagggaacaaccattctactgataaatgaacaaacgggggataatggcaagttagcatttcgacaatagatgacaaattatacctccacgagcagattgacgcccgattgccatcatagctagtaattgctaatccaggattcagagcaccagcggctggattcaacgaactcttggccgcatcactcgccggagagagaaccatggctgcatccatgaactgctccatgggggcttcgctgtcggccgctggaacagccatggctacctcgtgtcctcgtgtacagacttgagagcaggggtggagctacatagagctagggggtgcccaggaatccagttcaaaaaattttttagctatagtttgtctattttcaccatatatatactctgtcagttgaaatttaggcacccgtatcaagctaaatttgattcaaaccagagtaaaacaagcaagtggctccgcccctgcttaagagaagccatccccatcacgccgttgcccatcgggggaactcagctcccttgcggagtcgcggtccgaagcttgcaatgcagagccatccaccggggggcagacttcatggtggagctgtgctggagctacggcgtcgtcgccgattacgctgcttctgcctctcctttctccttgcttgaagcaatgcttgaccgcgtgacacatggcgcggggctgtgttacctgggatgggttgcgtgaaacataatttggtatttgggttgcgtgaagggtgcacaaatcgtgaacaaaatccaacgggccaaaaaaacggccggcaaacaaaaataaatcagcaggcagccagttagcaattcccctatttttttttcttattactacaaaaattgcccgtgcgttgatgaagtctatttaaatcttattagggttatatagtttagttaaggtgaaattcacagtcagaatttgcttggatatactccatccgtcccaaatataagaagtattttagaaaatcatgagctacaattaagagtccgatcatctcaagttaacatgcgagttttttttaaatagattttttatacgactccttctgtatttttaaaaacaaacgaacttaaaaactgactcaaatacggatatgtatttccaaaagcgaacaaacttaattaaaaactgactcatacacatatgacgtaccaaagcaccggtaaaaacacatcttcaatttttataatagtagagaaaagatagagatagatatgagttatgtactagttgagaatacatgatgagatgttttacacatgcttaaacacatacgatgattatacctccagttttaactgataataactaggtaagtttcctcctgttgtaagtgaccatgaccttccccttgggccccggcatgacgacggtccagtccgtctccgggaacggcgacaccagctgcagctcgaagttgcgcagcaggtggctccatatcaccttgatctgcatgtacgcgaacgcctcgcccacgcacgcgtgccgcccgccgccgaacgccgtgtacgccagcccacctgcaccctcctccctcccggcgccgaacctgcccgggtcgaactcgccggggtcccggtacacccgcggcagcgcgttgtggagcagcagcgggctcgccaccgtgtggccctcgggcacctcgtactcgcgctcgccgctgccgccgcgcacgacgaagctccgccgcgcgtggcgcagcagcatcagggccggcgggtggagccgcagggtctccttcacgcagcgctgcagggtgtccatcgccgctagggcggcgtggtcgacgcggtcgccgccgtgccgacggagtagccgcgcctgctcctccacggcggcgcggaggtggtcggggttggtgaggaggcgcgcgccggcccaggtgctggtgctggagctcgtgtgctgcccggcgaagagcgccgcgacgagcatcccggcgacctccgtctccgtcgtggcgcggccgtccttgtacctcgcgtcgatcaggcactgcagcatgtcgtcgtgccgggctccgccgccgccgccgccgccgccggagctgcccctgcgggacctcacgatgtcggagaatatctcgccgagcctggcgcgcgccctgtctcgccggcggtgcgccgggatggggaggcgcgggaacaggatggtgacgaggcgcatgccgtcgttgagctcgcggaggagcgtcgagacctcgtcgaacatcttgtccctgacctcctcccctagtagacaacggctagcgatgagggtgacgagttgttcaaactcttgcttcatgttcacagtgccggactgtccccatcttgcaaagtaaccctgcacaatgcgtatatagacacataccacgttaattaatatcttgggcctgtttggcacagctccagatccacctcttctggagctagagctcagctaaacagtttcagctccacgtaaaatgggagtggagctactcacaaaatgaagtagagatatggagctgggttagataactccacaacttaactccagactcaactcctgaagctaaatttaggaattggagctctaccaaatataccctaactctacgatcaacccttgagattgcatcgaaatttaccacattttgtattataaaatttagtaactccatgtatctcaaggtacttaaactattatggtaaaatttgatgcatataccgctaacttttaaggacggtaaaatttaatatggatataattttaatttattaccgtagtgaatttgcttttattcactaaagcaacatgtcaacactaaatgtgcatgccaaaaactcgtttgcttacctccacttcagcaaccatgagatcaacgtaagtcctcagcttcgccggcttcatgatatcaccaaagaaccggaactgctcgtgtcgagtggcataatccacatcaaaagcgaccccgggaccaaaggttggtatggtgaattgcgagacctcatcctggctgatctctgaatctaaccctttgtaaaaatggcttgacgcctctgacccaaccaagaaagtcaccttctgttggagcaagctaacagtgaaaacgcttcccatcttctcataatggtggcggatgaattccaccgggccattggcgagaagcgatggtaaaacccctacaagaggagctccacgggccaagggtggaggcggtggtctagagaattttgtgccagtggttcttgttctttctcttgttgcaatcttactcaacattgttgcagcgacgaacagttgagccaggaacaaccatatggctcctgttgttaaatccattgttgaaatataatgaagtctgctgacagcaagggacgatgaaagagtgtgttagttctattacaacagcaaaagatagaaatacacaatgatatatcagaatatgtgtatgaaaacgcatagagagaaatatttaatttaagttttagtcatttttctcgcccttgagacgaaaatctaacaactctcatcgcttccatctttcactaatttaaacacaatctttgtttagccaaaaggttaaataataaattgttttaaccaatacataagctaaatttacaatcaataaagatttactaaactaacatataaaattatacgaagtaagataagattaagtaaaacaaatgcatttaaaaattgcagtaaaaataaattaaagatatttttgggccccctcattaatactcatggttataattcttatgagcaagtttaataatataagctcactgctagttataaacctatattagagacaaaaacaaaatatattagctataaagttatttagtttttcttcctctcgcacacttatacgtctaatgtgtttatcttggagcatgtgtagaattagttcttgcttgagatccaacgtcctttatttttatttttagttatctttatctccatataagcttatggagtagctcactattatccttcctctaaattaagaatgcattggaaatgaaactttgaaaatctttcacgcgacaaataaattacaatgaaaaaggaactgctaattagttaaagcctttcagcatatgtatatctgatctccacctttataagtagtacgttttttgagcaatcaatacgttatatatacgtggtatgtagatccgaacatattgctagaatctaattagcattttctctttactaaaccatctcatacggcaatactaaaggtattatcaatgaaaacatgatatcacttcgactgttatatacatgcaaagaaaattcactctagagagtgaaaaaagtgtatatgtgagagacaaaaaaaaaagaaaagaagaaggaatgtgtgtgtgtcagagagcgagagagggacctttgttttagcagaaaccaagatgcttgttgtggtagtgaggtttttagctcgtgaagatggatgatgcgtggaggcagacgctatctagcaggggtatttatagctgaactttcactcaacatgtgtctaacatatgaaaaacatggcccttttctgattggttgctaacaacatgccagaagggcaaaattgtctgtcgatttcacgaaattaatattgcctgccatgtcatttaatattgcctgctatctattgacatctggatatgacggatcgaacgcgttatcacctggaccatgtgttgttcgttatgctctcgtgtttgcaaagtacgtgtgatcatctggaatagatgtgattattttgacatgggtttgaatttacatttatatatttgttaacaagtgtactatataatttacatgtatttctcaactaatttgtgaatctctttgttgtctactgctcatccatgtcccaaccaaacaagctaaagctaatacaacaattttctcgaactattaaaatatccagatgcatgcactgaaacatttaaaattcataatgcacccatccaattttttgatgcacctcccttgtcgctccttccagtgaagcgacaacgtcatcctcgagcacgccagccttctcgaacgtgagaatagaagaagagccgctgccgcctaaatttgggacctcaagacaaatcattgcatggcgccacctcaacatcatcttccccagtgccagtgaccacgccattgtcgcacgccaccctcagggccctggtttagttcccaactttttcttcaactttcaacttttacatcacatcgtttcaattttaatcaaacttctgtaaaatcaaagtgtttttgattgttattctgttatgaacaatttgcatatgagattattagttttgatatttggaatttatttacgaagtggttttggagatgattgaaatttgcaggtgaataggaactgatgtctgtgatttgggttcggtcagaccgggcagtgtgtgccggtcagaccagtggtgatcgagcgttcagaccggccagcccgcggtctgaccggccgactctgtgttggtttcggttttgggttgtttatttggatatccatgattgtttcatatttatggcttctagatggatactatgcgtatgtaatactgttatttgctactaatgagtcaagttggagatagcttggtctcgaaatatggtttctttgtttgtttcatgtgtaggtgacttgatgcttcgggagagtattgctggtgatggatcgggagtcagcttggggataagacgatgtccgtgacggtcagatattgtgcgggatacttaggctagagttcaatgcacgtggttggtgaagattccatatggcatacgatggaggtattgtgtgcgtatgggatgcggagtcgaatttggaatgagtccaaattttttttgatgtgaaacagcaggagaggctcctactgcgctatattaataatataataataaaaaaggggacaatatttacaaaatttacaaggagtccaaatttggtatgattggagtttgtaaagtttgtttcttgtacgagaaggtttcgtagatggtttaggacttctagtatgagtttggttcgtagctttagactgcctacctcatgtataaatagagagagagtgtgaggcttcccggtatcgcttttgagagcaattgagttgatagtttagttagagtttcgagtttagtcgaaatttttgtaaagagtgctgttgttgcactttgtaaacacagagagaagcaataaagttgtcatctactttgagagttcttcgatttgtgtttcatcgggttcggtggtctaaccgacaacaaaccggcagcatcgcggcggtcagaccggcggcatacctgtggtcaaaccggcaacggcaacaggaggcagaggcgactttggagcggtttggccgggcgatcaactctagtcagaccgacagcttccaggcggtcagaccggcgcatccacttcggtcagaccgcgatccatcgaatttgagggtaacttttaattccgcaaaaagtttgggttttttggcataccaaccattcaccccccctctggttggcttagttcttgtatttcgatcctataagtggtatcagagccttgttttcttctttggattttaaccgatttagagtttttgccatggctaataagtttacaactaagccccatgttttcgatggaacggatttttcttattggtgtagtaaaatgcaatcttatattatggctgaggatcttgatatttggagaaaagtttctaatccttatgtgattcctgaacaaattaatactgctactttaaaaactgaatttgaacaattgcaaagctcccaatattcttttgagtgggatttctcgttcggatgatgatcgtgtttctcatcttcaaaccgccaatgagatttggattgctttgagtaattttcatcaaggaactaccaatattaaagaacttcgtcgggatcttttcaaaaaggagtacattaaatttgggatgaaacctggagaagctttggatgacgatctttctaggtttaacaaaattttgagtgatcttagatctgttgattcttcttatgatgttaattatacacaatctgaggtttctcgctactttttgaatggtcttgacatgcctatttgggagatgaaagttacagctattcaggagtccgttgacatgtctactttgactttggattcgctttacacaaaactcaaaacacatgagatgaatattcttttctcgtaaagttgattctaagtttagtgctttggtttcttcctcgacttttttggatgttggtgctccttcatcgaagtcttctattcttgttttaattaatgccatctccgatgagcaactcgaacagttcgaggaggaggatttggttttggttactaacaaattttctcgagctatgaataatgttaggtacaggaaaagaggtggaccaaatcgttgctttgaatgtggttcgtctgatcaccttcgttcgcattgtcctaagcttgggagagataagaaggaagaaaatggtggtgagaagaccaatgataacaagccgaagagcacattcaaagggaagaagatcaaagagactctcaagaaggcttttgactcaagtctatgctgcttttgagccattaagcgatgtagatggtgaaagtggagatgaagataagggaaagaacatctctggtgtttgcttcatggcacctggtgaatcggattcagagtgtgaagacaatgaggtccgttcttttgaggaagctattcttattttgagtgcaaaaaataagaagtgtgagaagatgtatagaaaataggagtttattattgaatctcttaactttgaagttgctagattaaaatctcttattcccaatgatgatgattgcaaaagttgtgaggttttaatgaatgagatttctaaaattagatatgtcaaagctgcacatgatttgaaaaatagatcttctctagctcttggatttgctttgcacgcacgcactttggatgagttgtttttgactaaaaagttgttgcaaaaatatcaaattgcttttcatgctagtttgatgtttaacatgatttgtgccaaaaagttaaaacaacaacatgatgttttggattgctcaacatgcacactaaacaagatgaaactaaaagatgctttaggtcgtgttgagtaaatggaagatattgtgaaaatcaatgaagtgcttttttccccaaatgtagtaaaagcaaaggtgtcatggtagattgtgaaaattgtgctaattttggtgtgaacaaaacacacccttatgctctcgtgtttgcatcaacgtacgtgtgatcatttgaaatagatgtgattattttgaaatgtgtttgaattaacatttatatatttgttaacaagtgtagtatataatatacaagtgtttgtcaactaatttgtgaatctccttgttgtctactgctcatctatggcccaaccaaaccagctaaagccactgcaacaattttctcgaactattgaaacatccatatgcatgcactgaaacatttaaaattcacaatgcacccatccaattttctaatgcacctcccttgtgcgctcctgccggtggagcgacaacgtcatcctcgagcacgccaaccttctcgaacgtgagaatagaagaagagccgccgccgcctagatctgggacctcaagacaaatcattacatggcgccgcctcaacatcatcttccccagtaccagtgaccatgccattgtcgcgcgccaccctcaccgctagatcctctcccccaactacctccttcactcatgcttcacataaatgaatctaaccatcccaagttacaagctccacagtgacctcgggctcatcccaacgttgtgagatcacctccatgtctgcttgtgctcaccatctaataatggaggagggggagaggagggagtggcagaagagagggagaggggccttgcctcctatgcctgcctgcagtcaccgtatggccatagaagaggggaagatgagggagcgagagaagagagggagagcgagagcaaggtatgaaatgagtggtgagaattgaggagcgcctgatatttctatcttttatcgagcgttcaagcaggagtatttccacaatgttcatcaaagacatcgtaaaaaataacagcttagtattatccaccaccccgagcaccttatcataaaatgaccactctcgaactaatatatcctccacaaaaaatccgactagatcatacccatcgtggccaagtagtgtcttaggctgcgttcgttctggggtgacagggagtttgtttgtttcgttttccgcgcgcacgcttcccaagctattaaacggtgtattttttgcaaaaagtttctataggaaagttgctttaaaaaatcatattaatccatttttgaagtttaaaatagttaatactcaattaatcatgcgctaatggctcacctcgttttgcgtatcttcccaatcttctctatctccttttcctcaaacacagccttacacaccaatgaatacgtcgatctacaaggacatgtcggagccgacgtaggccctcacacgactgcctcaattgatgcaagacaagtcagatactccctccgtttcacaatgtatatgtctaaatacattaacatcaatatgaatgtgagaaatgctagaatgatttacattgtgaaacggaggaaatatatgcttccgttatactccgtggcgtccaccgtaccacatttgcccacgtcaccagccgtccaccgtaacctcgtgccaggacacatgcatgaataggctaccactcggactcattggttggccagctggctaaggcatttaaaacaagaaaggtgcaggtcacctacaaacgaactggtgctgtgctctgctccaatggtctcggccagtgaaagcgagccaatcaaccagaagcaccaccggttcacagctgacacgtgccatgcttgcagcttgcatcacccaagaaaacaagagatggattggattttataatttcttaatgtttcgaaccgtcgaacttttataactttggccactgataattttttttaaaaaataacttaaagtattacaaagtattacgataaaattaaaatattatttatttacgtataaactgcattgacgatacataaacttatttatttatcatgtgggtacaatcgtacgaacttataaaatattaaatatttaggtattgattgtacccatatgattaataaatactccatctgtcctaaaatataacaacttttagctcttaagatttgtcccaaaatataacaacttccccaccaacattctcttcccaaccaatcagaaccctccaccattcaattttcccacctactccactactcaaccaatcgcaatcctacatcatccatttctacctactttcttaataaccgtgtctaactctaaaaataattacattctaggacggaggtcgtaggacactggatggttaatcttgctggtttaggtgtcgatcaggatatacaatgtaaatactccgtcctcctttttacttgatgtttccgatagctttatagaaattaaggaagctgtgaactgacgcttttgcccttcgctgtgatggctgcattccgtcggcgcgaccaataaataatccacgccgccatctctgatgagtccgcgacaacgagaccagcactccccagcggccacgtggagggccagcgacggtagcgccgtgtggagcgatgtcgtagaatcaaatcacaataactaatcaaaccagagagggtgaatggttggtatacccaaaaactgaaaacttttagcggaaataaaagctaccctcgaattcgacggatcgcggtctgaccgaagttgtcctgccggtctgaccgcttgattgccgtcgatctgatcgagattagatctccggtctgaccgccgagatcagttgccgcttgctgtcgccgccgccggactgaccgtctcgccaccaccggtctgaccgccgcttgccgccggtctgaccaccggtatatcgccggttagaccgccgaaacccggtgaaacacaaatcgaagaactcttaaagtagatgacgactttattgattctctctgtgtttactgcaccaacagctctccttacaaaaatttcgactaaactcgaaaccctaactcaaaattcaactcaattgctctcaacagcgataccgggaagcctcacgctccccctctatttatactcgagatagacagcctaaagccacgaaccaaactcatactagaagtcctaaacaccttagtaaaccctatagtacaagaaacaaactttacaaaaccaatcataccaaatttggactccttccaaattcgactccgcatcccatacgcacacaatacctccatcgtatgccatatggaatctccatcaaccacgtgcatcaactctagcctaagtatcccgcatgatctctgaccaccaccgacgtcgtcttatccccaagccgactcccggtccatcaccgcaaatactctcccgagacatcgagtcacctactcatgaaataaacaaagaaaccatattccgagaccaagctatctccaacttgtctcattagtagcaaacaacagaattacatatgtatagtatccatctagaagtcataatcctgaaataatcacggatatctaaacaaacaatcggaaaccgaaaccgacacagagtcggccggtcagaccgcgggctggccggtctgaccgcgcgcataccgccggtctgaccggcacacactacccggtctgaccggtcacatgaaataacagcagtacctgtagattcacctgtaaatccaatcatctccaaaactacttcgtgaattaattccaaataacaaaaccaattatctccgatgccaattgttcatcacagaataataatcaaaaacacctttgattttacaatctcccccttgatgaacacattggcaaacccatcaaaaatgttttagtgtttggaaaaataaaaacaaaagtggtaaaaaatacacttcgtacaaacgtacacatcgtgctaaaaaattcaaaagaaaacttctccccctttttaaaaagagagaaattcccaatttcaccgtctcaacaactcgaaaattttcaccttgcttctccaaaaaactcatctcttcttccccttttgacaatgatttcatcaagcatagaaagtatggtcattaatatataagagcttagcatacatatagt

SEQ ID NO: 9679 - DNA, 30819 bp, Oryza sativa
tttctacaccttttgtttcacattataaattatcttcaagccagtgttctattaatgaagatgacaaagattacaaatcgcatgttccatatgccagtgctgttggcaatcttatgcatggtatgatttccatttgcgcagatttagctcatgaagttagtgtggttagcacattcatgcataatcctggcaaagaacattgaaatgttgttaagtggattcttcgttatttaaaaggtacttctaattttggcttaatgtttgatatgaataaggtgaagatagatgatgttgtttggtttgttcttaataaaaggtctatttccggatattctctttgtgtggttctgctgtaagttggaaagcttcaattcagtctgttactgctctttccaccatagaagcagaatatatttctactactgaaggtgtctaggaagctatttggttgtgaggtcttattcctgaagttggtattcagtaggatgttaatattgtttattatgatagacagggtgctatttgtttgaccaagaatcatatgtttcatgccaagaccaagcacattgatattaagcaccattttattcgtgatattgttgctcaagggcaagtttttatgaggaagatacatactgatgacaatcccgtagatatgcttacaaagttactctcagtaactaagttcaattattgcctatacttagtaggtatttgtggtacttagcagcccttcagggttttggagacattttcttctacaacatatcctatatacctatacaaatcatccccaccactagaaattctctgcttcctggtgcttccacgtcatcattttttcctcatcattttttcctaaccgttggatctaatctaattgatccacaccccatcccggcatcccgcatccgcgtacgtcttccttcccccgcgtctcgctccgccggccccaccgcattgctactctctcacgcgagcgcacccacatcggctccctctcccgcatctctctccgccgcccccactgcatctccctcccagcgattccttgcccaatcactcctccctgtctccttggctcggccccgcctcccttggactcccgcagctgccatggaatccaaatcgatccactacgatgcagtgtctttatcacttttcatccccacggcacaccatgcagtgtcattgtgtcgcttcttctcctaacccctgcaacaaatcgatggggccatggtggcgactcgagttcggcctagcgcggcgcggctcagggatttgggtcgcttcttttctttcatccgccgtaaaagccacctggaagacgaactgcgaggaaaaaaccgtcaccaccatcaataatgggcttaattccatttattccctccctacaattcatcctccgtttagatgaacctcaagcaccatcccctccagctcagaaggcagcgtcaacagtcgggaaatcctctttctgtattttcatattttgctaatttcaatttgtgcttgcctgcaacgcagggggttccgggctactggtctctcttgcctcgcctctttggagtaggttacagcatcgacgattggacggcataattaacgaagcaagagacgagcaggtggtggagagcggaggaggcatgcatgctatggtcgatgggcttcttgcgcgagacagacgaagcaaagtgcgaggtatgaagcgggttttctttgctacgctcttacggctattgaagcttaggcaaacttagcaggctttcaacgaaattatgactatcagacagtcaggctgtaaaatatatatattctcttttgccctacactcctactgtacaacacacatccttctccacatcgattatgtttggattttactattggtaaggtaagcaacccaacatatcgatctactgagggatagcaaaccgtaaagataatcaaactatgttttcattaaacatgcgcttggcattttgccttgctgtaggtttctgtcatttgattttctactgtattgacacctgaaatgtgctgctctccttctttcaggtcatgttactaccgtgcaaacaactactttgttgcctaaataggtgtgttttctttttttggataaatatagcattcatatatttctatgtgaagttaattagttttattcaactaaaataggatagctaaatgtacattcaaagagatcatcatggttgtctctgaaggtagagagaatcccttatatgccactctaaattaaccagctcccttatatgccacttcaaattggcttctctcttttatgccaccggttcaagtttctcctcccttttatgccattgccgtcagtccaccgtcagttgaccgttaacttcattgtaaaaagacgcatttgccctttagaattagtatacaaccaataataggtattttagtactaatatagctactagatacaacatatgaaaattgatttttttctgcatcacatgcaattttagccattaccatcacaaataaattttcaatgtaagcatgaaacatgcagttttccaataatatttttaatataaagagcatttttcactgattctgacaaaattttcttcactcaaaaaggatttaaaataaattagttatgaatttttgaagtttacacattttttagttgagagggcatattggtcatttacgaaaaaaactaacctttgactaacagtcaactaacactatagtggtgggagtggcataaaatgttggaaaaacttgaactagtggtatataagggggaagccaatttttagtggcatacaagggaactggtcaaattctagtggcatataagggattctctccaaaaaagaaggtaactcgaacaattttttattctagttatcgatttactttcgctgagcattgtgaatccatccctctttgttgcaccattttgttttgtagctaggtgcttttacataatcaaccatgccaggatgtatacatgtgtgttttgcttcctttcttctttcttttagttaacaatcttatgttacattcctagaaattattttgtcatttagaaagttctgctgcaacgcgcagggtatcatctagtttatagggtttttgagtcaaggaaaggttgttggataatgactcaaatatatttagtcctagggtcttgttcaatatgtgtctaaatatatgggccacccttctacatgtaaccctgaaccatcatagttgattttgtcttctatggttattttctctctatattagagggatgttttcacataaaattatgtatctcttttgcatctattttccctatcaataacattggagcgattggagaggataatggtgtggagatgtatatgaatcgaactaggacatttaattatttgccacttttaagatgtgccaattaatgatttgccactcgctgtgtatgatgtgtgggccctcatgtatctatctcatgtgtctatgatatgttggtcaagtggcaaatcctatataaccactcgtaagagtggaaaatatttaattattttgaatccaccgagcataattccacgaacaagagtaaaattccaattttcatttgcttggtaaatcaactaatatgcaagaggataaattggacaaagtggctgaactaaaagaaggataggaggataagaaaagggagagggagtggacgtggtgtgggtggagggtgcgatgcagtgcagtacaaagggcgatgtgatgtggtgtgcatggttgatcacccgattgagatccaatggctaggataaaatgaggtgacgtggaagcacgagaaagtagaaagttgctattaactacactaagtgcgaatgacttgtatacccgcatatcatctcccatcaacttaatttttctccatgcgttttataggttgtattacaaatccatcaaacttatgcatgctgatctataacaaaaagacaaaatttgctacaggacattgaaaaaccatggcctttgctgagggatatcgtaagaacatgaatttgcttagggacactcaaaaaatgtggtaatttattggtagacaacatacacattattttatgactttttgctattttggagggagaattttcacaacatgggagatttgcccctaggaccaattagtacaaagagttttgttttctttacaaatcaagtccctggtgctttgatggagtggagcccgtgtgtcattgtctcgaggagggagagagcagtagctgaggcagagccttgccggctggcactccttcacggcgacgctgacagtgaatggcagctccttggacgatgcggccaaatagagaaagatgtgcaggcttcttgcgaacccgacggtggtcgtcttttagccggaggtggccagaattgacgacggtgctagtccggtcgagccaaggagcttatagttcgatgctaccaagatgtttgtagagacgtagagacgctacattcatgaggaattgagagacggaatcgaagatggcagcggttggccagagtttgggaagacgatgacgatctcatgattcacgacatctcatgtcaattgcttgggtcggagggctcctagggtctcggcgatgacgatggcgcgatggatggcccgaccatgcgccatggtgcccagaatgtggagatggtcttgactgtgacacagagagctcgctccggagtcacgtcggcatgacggctttcttgtcgatccgctgcatgacagagggtgaggtcaaaagttaaaacattcgacatgatgaggtgaataaggaacagggaagagatgatggagagcacggcttgacgactagcggcaacacctccttctgggcggccgacttgggaagaagaaatacgagggtaaaatagacaatttacgtggtttctccctcctcacataagtaaatattatattttaatgcttattgtgtcctttagcaaattaccgtgttttatgagtattctcggacaaattcacgttcttacgatgtccctcagcaaatatcacatttttggagtgttctgtcgtaaatttttcctaactaaaatatatccgctttcatctccaacgtttttgtataagtatttttactgcatgtatttttgtgagggttatattaataacacagtatgaactgttcactctgaagtgggattatcacctactggtggagtaatgaagtttcatgtgttgtagaactctttattactatgtcttcttattagtatgctgtaaaacttttagagcaattggtttggacattggttggactggcggtgtgcggcggcaatgggcaggtagcaaggcagtgggggcaccaccggagctgtgaggatggaggccgacaatgggcagggttggcagcaacctgagcgagggaggccatatggtaactgtgcggtcggtgacaacaattccgacagcatacgggaatgacactaccgctggattatggagaaagagacggaggatggcagggatgaggaaaaggctgaggattatatggttttgtgggcctcacctgcgccgttgactccttttggcaagccgacaagccaagagtagcatcgtcgtgcagggaggagtcagcagcaacccatcatacatgtgtgcataggtgaaacggggttgaggagggaagaagtgataaggggagagagaaagagtccacccaattcttgcaatcctaaatggtcaaaaaaaattgatttttttttggggggggggggcaactgagaattagacactcccaaaaattaattaggaaaactgagccacccctgtaggacgacccagccaaacttgccgctctccatgatcaccgttcctttgagatgcatggggccaccttaggaaggggatgtttaggtcatttaattgtcagagcatgatgattatgtgtcgatgtcctcctattctgcatttaaccactcaagatccagagtactgttgccagacttaacacatctcgggcgcgatttgatccatattccttaatttattgggtccttgattatcacgatcacttatggtcgatcatgagacgtgggtgattgtgcagcacaaataattattttaagggattgtatagattatattaattttggacttgttcggcgggaaggaggcggtggtgatgtatatcagcggttgtgatacatcatgcatgtgtgcgtgcttgaaacagggataagaagtgtagaagagatagggcgagatagaaatagtctacacgaacctcgatgcaattctaggcgtttaaaaagtgacagtcttttaggcaaaacttagacaatctaaaaagttaattaggaaaacagttactttttaaacgactctccacaatcgacattcctttgagatgcacgaggcccactatcgtaggttgaggaagtttaggccatttaattgtcagggcatgattatgtgttgatatcttcctattctgcatttaatcactgaagatccaaaacattatattaccagacttaagatttcttgggcgcgatttgatcaatattatttattaggtccttgattctcacgagtcacgaccacttacgaagttatgatcgatcaagagatgattgtgcagggaagattaatatttgagtgagtcaattttggactacatgtctacattaatagcttgacgatcaagaacgaaataagaaaaatatgctctatgatttgatcgatcgatctcgaattatacgttatgatatgtaaacaccagagaaaattgggatcgggatatgcaatctagtactagatattatttaattacatactctagtatgaaaactatcgtgcaaatcgggatactcttgagctggccggaatatttttcctggaatgcaaaaataattacgaattacagatcaatgccgtgcgcccgtgcagatgcaatggatatatatatcggccacgttgctgcttcttctaatataataaggcaatctcgttgcctactttgcacgatgtgagctaatcacacgaagtggacaacaagttcgtcatgtgatttgttgtctttctcctttgtgctttgtgcatcgaatggcatcccacaattatccaaaaaaatttacaaaaagcatttcactgagcttttgtacgtacgttatttatactacctccgtttttatgtaataaatacataagcctgttaacatttcgatattacatttgtcttcctaaataaaactaacatttatatttggtgttgaacttttttaataattaaatgtacttggaccattatatacttttgcacatttccattaaagtttttaataagataaatgatcaaatatcacgttaaaaattaacagcatcaaatatttaaaaaccgagagagtagtttggaacacatgtttaagttacagtcatttaaacttgaaatattggctattattattgaacctaggaacaagatagtagttccaaaatttaaggtgtgatatcatattttgtattatccattttacaatatattgttgatactatctttttatggaccgccacttcgaaaaagcaaataatacttatctcagtctccagaaagttaccaggaccaaataaataaattttcaaataagtaatcttatttttcagtaaagcaaagcaataatgaacttatgattttaaggcttgctattcactctataattatatattgccgataaaattcatcacaacaaaacaaaatagtgtcaggaggagtagatttgttgagaaaaaaaagaccgagaataacgtatttggcccaattaagtatatacatatgtaatgcgtaatatacctacatgtgttgaattattttcggacaacttttgagtattcactccaatacccaagagcctccctgtgtcccaccctgaagcaaacaaaccaggaagaacaataacaacagcatgggtagatatgttggcatccctgtaaactctataactcaaacttgaaatcggcagctctaaattatttaattagtaactggactaaaatatatatttctcgaaaaacgaagtggacaaattagaacttccataaatttagttttctcattaaaataagattttgttcagatttaagcatgatattctgctggtaagttatatgatattatatggagcatgtgatgatttttttaaatattcttttaagtcatttactaatgcaaacatagttgggggttaacttggaccaggttgtcgaaaaactagtataaagccacacagccacaagctagaatatccatcaataaacacatcatactgccatctccctcaactagttgcaaaagcacacgttcttccaatattccatcagccatgcctggagcagctgctgccgctgttgttgacagccgcctgtgcacacagcacgcggaaggccctgctgcggtcctcgccatcggcactgcaaacccggcaaatatcgtctatcaagatgggtttgccgactactactttggtctaaccaagagcgagcatcttattgagctgaaggacaaaatgaagaggatatgtaagtagaacaatcctttcatttcgatcgttgcattgatcatcattatcgttagttgtttttcataaactctaatgagaataaattatgcaagcgcttaaatttttaggacactcctgccataattcattataaaccatacaaatatttatactatactacgtagaaagaagagtgaaatgatgttggagttcagccaaattttctttatttcgcgtgtgggatgcaatgtggatgcatggggtgtggttgcatcccaaaatttttgaaaaaaaatctactatatacagtatatacttggtacatatacgcagtatgctcaatacgaggcccacttaaggtcatccaggactatatgctccatttgaatttctacattatttatgtcattgtatttgtactcgctatatttaagtgttttgctagtatatttttttcactttatctcttatcttgaatcataacagtaaagttttgcatctccatctctgaaatcctggatccaccactaatacctcgttaaatatgatagtttgtcatataatgtccctcctgctcatcaggctaccatctcgcacccatgccactgtactcgtatagatttaaagactacgcttttaacaaaaatacaagagatctacagagtagtcatagcaataaatccgtggatcttaataaatttgtactgaaaaatagcacttacttgtctatatgttggcaccgggaattgagtcttagtggatagagttatgcacccacaagtacatcattagaccatgtttgaacgaaacatatgtgctaatccaatctttcagaacattaaactcatgattatcttcctaaaaataggacatatataaaccatttttgttttattacggaaaatgcttgcataatatcatatattcttgttttgtaaatattcggcatcttaattgaaatgtctcatgttattcttataatctcttagtgctatgtactaattgtaagagatgtgggtgcatccttttccatttcaggtcacagatcgggaatagagaaacgctacatccaccttgatgacaagctcatctgtgagcacccggagatcatcgacaaacacatgccctcccttgaaactcgtgtagacatcgtctctactgaggtcccgaagctcgccgagtcagccacacggaaggccatcgccgagtggggccgtccggccattgacattacgcacctcatcttcagcacctactccgggtgcagtgctcctagcgctgacctcaagctggcatcactactcggcctcaacccttctgtttctcgcaccatccttagcctccacggttgctctggaggcggtagggcacttcaacttgccaaggagctcaccgagaacaaccgtgatgcacgcgttctcgtagcctgtgccgagctgacgctaatatgcttctcaaacccagatgaaagcaaaattgtcggccatggactgtttggggatggtgccggagcaatcattgtcggcgctggcccactggtcgatgaagagcgcccactattcgagatggtcctcgcctcgcaaacaacgataccaagtactgagcatgcacttggcatgcagaccaccgccagtggcatagatttccacctctctatccaggtgccaacactgatcaaggacaacatccggcagtgcttgcttgacacattccgatcggttggaaacatggatcctaattggaatgacctcttctgggcagtgcaccctggtggccgtgcgatccttgacaacatagaaggcgagcttcagctgcaaccagcaaagcttgcggcaagccgccatgtgttgaacgagtatgggaatatgagcggcacgacgatcgcgtttgttcttgatgacttgcgtcgccgtcgggagaaggaaggagatcagcatcaacaacttgagtggggagtaatgctagcctttggaccaggtatcacaatagaggcaatggtgctgcgtaacccactctcatgaagtcttaaggaaaattaattgccactatcttatgcttgtctggtatcttattacggtatatgttaattaatcaatgcatgacactaaatcaattctgcatgcttaagtggaattatgacctaccggtgatgtattgatgttgtggagttcctatctaatgtttattgctgttttttctgtatttgtaacaaaatttgtaataccctgtgtataattgaaaaagcatattgcttatatgagttgcttcaatccgagtttggatcaattgagatgtatctttcaagaaaacacttgaataagatcaagtcagtattttgcaagtgaaaaaatgttccaaaacaagataaaaagatgcaatcaatttcaacttaatctttagtaattaagattgtttttcttctcaaatatacatgagatgttgtgtatcattgcattaatggaagaacggaggcgtaagatgcaaatacaaataatcagaaaagacaaaaagtgagaaaacaaaacacgagcaaaagaagaacaaagtgcctaaccgaggctctcccaacaacctgaatcatgggccttcttaaccgggatctataatcaacgaaattcccctaggctcaataggtgagcctcgtcactcgctagaactagtcgagaagatgattggagcagcctcgttgaaaacacaggcgtttcgatgcttccaaatagaacatgccctaagaatgatcatattatttatacccttccttatagcccgttttaccaaattcttgtgtcttagctagggagatcgatctgctttcagaaccggcggcgcgttcatcttctcgtcgttcgatctgatcagcgagaacaattctgacaccggtgtgttcttcgatagatccatctgatcggcggcagcatacgcgcttcatcccacggcgagttctttgatgaatctggttggtggcggcaggcgtgcgtcctcctgtcgtctcatcgagttaatcggctcgacgtgattgagttttcggcgcagcaatccgaagcggagttcttttttgctaccacgcatccaccgaaaaagcagcagcgcatagctgcacggctctggaggaggaagaaaaatcaattgaagatactgctcgcttcgtgtttatgtgaagttccaaattcctgttggatttttgtacgtccacaaagactttatatcagggaatttcttttcttttggaatctattatatatattttttgatctggaattgtttctccaacatgtcatgtatcaaatttgacattgagaagtttgatggcaagattagtttttgcatatggcaggttcaaatgaaagttgttcctacacaagttgatgttcggaagcgaatatgattgatcaaggggaagataggctgtgttatctgtgtgaatggtaccgtatacaggttcttaagaaggaatcacaaataccgttccaaagcagcatatttcgacaacactgaatagcttgatgatccaccaggaccatgcaagggtgatagagtgttccaaatgacgaaaaatctcaaagtttttttttgagaaggcaaaaaagaaggaaaccaagcggaagcgaaatgcggaaggaccaagcgttctattcaatagatatatagatacatcattttatcggtgtcatgcacctagagaaaaatgtgttctatagaaccattgggactttagtagccataccaagcaagacaaatgatggactgaagtcacataatgtaacagcccgtcctccagaaccgcgtagcctagaccatccaatgggcgggcccacttacacataccactcccgtacacgtttatcctcgctttgtataaaagtgttaaccctggagtgatatggttggagggacaagcccactcttgctaaactagcaagatggtactaaatatacgcacacaggtcttattggccacacatgccatgtcctaattataccaggatgtcacacaccctcctcaaaggacccgacatccccgttggcccaatttacccatatagtcacacacaggcatataggtaaatgtctaggaacacaccccctcttaatgcttagtgcagtccgccttacatagagcccacatgtgccatatacccgcacactgacccatacaagcaaccgcgagggtcggaactgataccattttgtaatggcccgccctccagaatcgtgtagcccagctcgtccaacgggcggtcccacttacagataccactccacttacactttcgtcattgcttcgtgtaatagggttaaccagggagtgatatggttgaagggacaagcaaaactagcaaggtggtactaaacatgctcacacagctatcatgtactccttccaaaaatctgagacctatttcattctttggtttttctcaaaatctaagtcctatttgtagtcactatgtactaaattgaattgttgatcagaaaccaataagtcattctaataattattggttgcatgctcattggttttgccatatggtgagtgagttaattgcttcttggtattgatgcaaaaagaaataggtctcatatttttggaaggagggagtaccacataggccatatcttaattgggccaggttgtcacatgtaaggaccttgtgaatacgcagataacagaagagcttcacctgcggatgaaggtaatggaagagttgtaacatcccgcctctcctaggccaggcctacttacatctggtagcttatcttggacatagactaccctcacagaccaacacaagtcttttctgcatactttgtcctcactcgtgtgcacccgggaagaattttccggtcggtcacccatcccaaaattgctctacgccaagcacgcttaacctctgagttatttggagatcggttaaggaaaataagttgcaacctgatggtatgagtattctattaatcctattaagccctaggccaggatgtcacaagagtgcacctttcgctgacttattacaccttgacaaattatgagaaaatggcattgtacaaatccctacacgaggtgagagtccctaccggtttctcctcaaacataaagcggctagtgtcgatgaaggatttatagcttttgggctacatttctcatgactgtcatgtaatgctcataatattcattgctattgcaatcaaagtaatcaaactagtacacgtaaagatggttgtcacaaaactgtgttatttcttcaatgcaatctcacataaagtaattgaccttgaagagttaggtcatctccgtgttttcgctatagagaccttgtgcaagcttgagatgtgtttccctctgtcatttttcaatatgatgcaacacctcatggttcatatcgtgcctcagatacttgtgcttgggcccttgtaccttcatcagatgtggacattcgaacagtatatgtccaatctaaaaaggctatgtacggaaccgtgcccacccagagggttcgatgatagagggatacactaccaagaaagtcattgagtgttgcattggttacttgcaagatgggaaagcaattggtttactagtacctcgacataaaggtaggttatctggaagagggacaaaaaggaaaaaagaatcctcgacaatgactacaaagcagtgaaagatgctcatttcattgtcctgtaacagcttgtgatagtggagctgtacatagagcagcacctaaaggaattacaagcaagaaatgtcaggcgctctgaagcatggatcatgaaatggcacaaatctgactttaccgaatggttaaaggacctcggccgaccatatggtgatagcacgaaggaaaaaactatgaaaagtttggctgacgggcattcaagagtgtacacctcatggtgagcgtatatctgaatgggtacacattttataccaaagcaagagacaaaaggagtgcatctcaaaataatggcgttcaagtataggaaatcgacacaacaggtcaaaagagcacatactatgaattcatagaagaaatttgggaacgggactacgaacccaatatgcagattccaccgtttcggtgtcaatgagtgaaacacccagctggcgtgtttgtggacaaatttagacggacaattgctgaccttgacaacgtaagccacaagaataacccattggtacttgccgatcgagccacccaagttttttacgtgactaaccccatctcagttgaagaaacacatagttatttccggaaaacaaaggattttgggagttggtgatgttgaagatgttgaggcatacaatcaatacgagaacatgacactattcatggattttggaaactacattaagcttgtagaagaaacaattagtgaatcgccgaagccgtacatgaggaataaaggagtaaggaagaatgtgaacggctaataaatgtagtcgctgttcaatataaatatgaatcaatgaatatttacatatgaatgtgtgacatgatggacgatgaattttttatggatggtgaattttatattatttgttctcatggtttttggtgtttaaaaaaagagaaaagaactaaaatttataaaataagaaaataatgatatattagttactgatggtgacatcatggagactctgatagaaaaacctgtggtttacgttttggggtgagggttgggctgggtgggggcactactagagccacagggatggaggctggcagtcggcatggttggtagtaggggcgagggaggctgtgtagttaggaggaggcgattggcggtggtgattttgaaagctatggcagtgcgccactgctgttcaatcaagaaggaagagagggagggacgtgggattggggaacgggaaggaggcttgtctggtgggcctcgctggcaccgttgaccccttccggccatccggcgagccaggggtggtacgttcggcgggaaggtggcggcgatgatgtatatcagcggtaatccatcctgcatgtgtgcgtgcttgaaatagggacaagaagagcaaaagagatagggtgagatagaaatactctacacaaatgtcgatacaattctaggcgtttaaaaagtgactgtcttttaggcaaaaatcaattaggaaaactgttattttttaaatgactctccacgatcgccattccttcgagatgcacgaggcccactaccttaggaagaggaagtttatatcatttaattgtcagggcatgattatgtgtcaatatcttagtattctgcatttaatcaataaaggtctagaacattatattagcagacttaccacttcttgggcgcgatttgatcaaatattatttattgggaacttgattcgaccacttatgaagttatgatcggtcatgagatgctgtgtggattgtgcagagaagattaatatttgagtgactgaattttggactacatgtctacattaatagcttgacgatcaagaacgaaataagaaaaatatgctctatgatttgatcgatcgacctcgagttatacgttatgatatgcaaactccagagaaaattggaatcaggatatgcaatctagtattagatattatttaattacatactctagtatacaaactatcgtgcaaatcgggatactcttgagctggccggaatatttttcctgtaatgcaaaaataattacgaattacagatcaaaaatatatccgccacgttgctgcttcttctaatataataaggcaatctcgttgcctactttgcacgatgtgagctaatcacacgaagtgaagttcgtcatgtcatttttgttgtctttgtcctaatttgtgcatcgaatgactgatctcacaattatccaaaaatatttacaagaaacatttcacagagctatgtacgtaatttatactacctatgtttttaaatacataagcctgttgacatttccacattacattcgtcttcctaaataaaactaacatttatattggttgtgatttttttaataattaaatgtatttggaccatgatatacttttgcacatttccattaaaatttttaataatataaatgatcaaatatcaccttaaaaatcaacatcatcaaatattttaaaaccgagagagtagtttggaacgcacgtttaaattacagttcatttaaacctgaaatgttggcagttattattgaaccttgcaataaaatagtagttgcaaaacttaagacgtgattatccattttacagtacattgctgatacaatcgtttttatggacagccactttgaaaaggcaaataatacttatcccagtctcgagaaagttacccggactaaaaacatatcaattttcattttcaaataagtgttttttgtttcagtaaagcaaagcaacaatgaactcatgattttaaggctagctattcactcaataattattgccgataaagttcatcacaacaaaacaaaatagtgtcgggaggagtagatgtgttgagaaaagaagaccgagaataaagtattaggcccaaataagtatatacgtatgtaatatgtaatatgaaaaagtatatatacatccctaaactttatattgaagtctgtctagcacattgcactttaaaatcgaacatccaaccccctgaactttgccataccatccatattaccgttaaggtggttttggatgatggttttgcatattttagaagcttaaactgttgagttgtgatccaaatttatttacacttaataaaggctagattctgccgtagtgaagcggaggcccgtcgccggtaggcttggttcagagccttttagggttccaccttttacggtacggatcgtaataccttttagggttctacctcatatatatatatatatatctcttgtaagccgccgtgcggcattgtaacctcacccaatatagtgaagatattttactggctagcgcccgtggctttttctctcctgctttgggagggttttccacgttaaatctcatgtcttctgtgattgatctgtattgttctttatcgtttatttgcctatcgtttcctaacataaatgacaattttgaataactaatgtaacatatttacgtatcatcagttataaatcatcaatttatcattatatagtgatatcatgatattattatattggtgcttgtttgttagtgagagcaaataaaaggcaaaaagaatgatttaagtcaaaatttttgtatatatgtccaaagtatatgacatgtgatcaaactcatccaacttatatacaaattagattaaaaaaaccactatgcaaaaccatcttagggggttacatcaacggtattctaaagtttagggggttgaacgtccagttttaaagttcagggtgctagacggaattccatcagaagtatagggggttattaggattggaaaaagtttacatgtgttgaattattttcggacaacttttgagtattcacttgaatacccacgaatctccctgtgtccacccctgaagcaagcaaaccaggaagaacaataccaacagcatgggtacacattttggcctccctgtaaactctataactcaaacaagaaatcggcagttctaaattattaaattagaaactgacctaatatatatatttctccaaaaatgaattggacaaattaaaacttccataaatttaattttatcattaaaatgagattttgttcagatttaagcatgataatctgcttgtaagttatatgatgttatatggaccatgtgatgattttttaaatattcttttaagtgatttactaatgcaaacatagttgggggtttccttgggctaggttgtccaaaaactagtataaagccacacaaccagaagctagaatatccatccataaacgcatcatactgccacctccctcaactagttgcaaaagcacacgttcttccggtcatcagccatgcctggaacagctactgccgctgttgttgacagccgcctgtgcacacagcacgcagaaggccctgctgcggtcctcgccatcggcactgcaaaccccgcaaatatcgtctatcaagatgggtttgccgattactacttcggtctaaccaagagcgagtatcttactgagctgaaggataaaatgaagagaatatgtaagcagatcaatccttccactttgatcgttgcactgatcatcattatctctagttatttttcataaactctaatgagaataaattatgcatgcacttaaattttcaggacactcctgccatagttcattgtaatgatgttggagttcggtcaaattgaaatatgtcctgccattataacctcggagagctatgtactaaatgtaagagatgtgggtgcttccttttccatttcaggtcacagataaggaatagagaaacgctacatccaccttgatgaaaagctcatctgtgagcacccggagatcattgacaaacacatgccctcccttgaaactcgcgtagacatcgtcaccactgagatcccgaagcttgccgagtccgccgcacgtaaggccatcgccaagtggggccgtccagccactgacattacccacctcatcttcagcacctattccgggtgcaatgctccaagcgctgacctcaagctggcatcactactcggcctcaacccttcagtctcttgcaccatcctcagcctccacggttgctctggaggcggtagggcactccaacttgccaaggagctcgccgagaacaaccgtgaggcacgcgttcctgtagcctgcgccgagctgacgctaatatgcttctcaaacccagatgaaagaaaaatcgtcggtcatggactgtttggggatggtgccggagcaatcattgtcggcactggcccattggtcaatgcagagcgtccactattcgagatgatcgttgcctcgcaaacaacgataccaggttatgagcaagcacttggcatgcagaccaccggtagcggcatagatttccacctctctatccaggtgccaacactgatcaagaacaacatccgacagtgcttgcttgacacattccaatcggttggaaacgtggatcctaattgaaatgacctcttctgggcagtgcaccctggtggccgtgcgatccttgacaacatagaaggcgagcttcagctgcagccagcaaagcttgcggcaagccgccatgtgttgagtgagtatgggaatatgagtggcacgacgatagcgttcgttcttgatgacttgcgtcgccgtcgggagaaggaaggagatgagcatcaacaacctgagtggggagtaatgctagcctttggaccgggaatcacaatagaggcaatggtgctacgtaacccactctcatgaagtcttaaggagaattaattgtcactatcttatacttctccagtatcttattacagtatatggtaattaattaatgcatgacactaaatcaattgttcatgcttcagtgggattatgacctacttggtgatgtattgatgttgtggagttcctatataatgtttgtgaagatatttgagttgtcaattgctcaactctagtacatgttgtaattaaactctttatttctttcatatgccctctgattgttaagttttttttttgttttgtaataaaatttgtaataccttgtgtataattaaaacaccatattgcttatatggtttgcttcaatcattttgatcaattgagagtatttttaaagaaaacatttgaataagatgaagtcaacactgtaagaaaatgatattttacaagtgaaaaactgttcaaaaacaagataaaaagaggcaatcaatatcaacttaatatttactaattaagattatttttcttctcgaatatgcatgagagttatgtagcattgcattaatggaagaacggaggaatacgatgcaaatacaaagattcagaaaacacgaaaagagagaaaacataacacgagcaaaagaagaacaaagtgcctcaccaaggttctcctaccaacctgaatcacaggccttcttaactgggatccataatcaacggaagtccctatggccccgcctaaactccataggtgagcctcgtcactcgcaagaactactcaagccaaaatgcttgaggcagcctcgttgaaaacataattgttttgatgcttccaaatagtccatgcaccaagaatgatcagattatttatacccttccttatagccccttttaccaaattgttggccctgctccacctatcggagaagtgggaacaggggttccctttcccccaaggtgctcggggcgctatgcgccccaccaagccttacaagatctacatctttaaggtttcaagaagagtatggagacctacaatatctacatcttcaaggtgcagaagcaggcactggtgtgtactagtgtctcgtcgaaagtcatgcccatcatgaactccttatttatcaatatttttgagaagctcatctaatataccaacgaaatatactttcggcaatgcaaatgcgcccgaatatgtagggttgccccgaggacttggcctgccttgaggacaaggggtgacccaaacatggcggccaaccggtgacaagattgtaatccctcaagaacccgaggactccccgctcaatcaatggagaggttcaccacattaaggaaagctactcgggtccagaaatcacatttaaaccaccactttacattaattatgatggtcctattgatctaaagtgctgtcatccacaagcgacttatgagattgatctcatcgggagtggatcgggcaatatggaactcggattattggttctgtgagcttcaggaatatcacgaattcggctctggcttcctccagattgtttctcaatgtggatttgtctacggcttctcaatgtggccctccttgaacacagtggccatgtgacgggctatagtttaggcccgttagagatgagagtcatccgtgacgggcttttgtgttggcccaattgagatgcgtcatccgtgatggccggatgcctgattgagatattttctcacatcacggacctttgcttagtgacgagggccctgcccgaaagagatgatgatttaagcccgttagagatagccgatcccgttctagtgattttatgtggagtacaatgatgcaaataaatattaaaaataatatgtaatttaaaatatataagtcattaaagggttaaaaaagacatacaccatatgctaaagaggatttatatatgggatagagtggtctccggttagaactaaagcactatagtgcactatctagtcacgtcctatcctaaatggtaaaaaaaagtgacagaacttcttattttggggcatctgaattagacacttccaaaaaattaattaggaaaactagaggcacccctgaaggtcgtgccagccgaacttgccactctccatgatcaccgttcctttgagatgcatgaggccaccttaggaaagggatgtttagctcatttaattgtcatggcatgatgattatatgtgtctatgtcctcctattctgcatttaatcactcaagatccacaatgttaccagacttaacacatctcgggcgcgatttgatccatgttacttaatttatttattgggtcattgattctcatgatcacttatgatcgattatgagacgcggggtgattgtgcaaagcagataattattttaagaatgtataaattacattaattttggactaagtacattaatagcttcacgatcaaaaactaaatatgaaaatatgctctatgattcagtcgaccgatctcgcgttatacatagtgatatgtaatctccagagaaattggggtcggtatatgtattctagaattagatattatttaatggcatattctaatttaaaaactatcgtgcaaatcgggacacttttgagcaggctgggatattttcttgtaaaatccaaatacagaaaaataattagtacgaattacataccaatgccatgcgctgcaggtgcaattgaaatatcatgatatggcaatatcggccacgttgcagcgtcttctaatataataagtgtttattgcctactttgcacgatcttggagctaatcacacgaagtggacaacaagttcgtcgtccagataccacattagctgctttgttatctttctttgtgtgcatcgcatggcagatctcgagacaataatcgtcttcttaaataaatctatacgagtatcatgaaagtacattaaccattatattacttatatttttcatatttacattaaaacttttcataagacaaatgatcaagcataatattaaaaattaacagcattatattaacatttcaaaacagagtgagtgagtagtttggaacgcacataagtaactagtattaattttaaacaactattaattttaaactttgaaaattattatagaaccggcgaaacaagatagtattagtaaaattaaaggcatagtatcactttttgggttatccatcttacagtacattgctgatacaattgtttttttaccgccactttgaaaaggcaattaatatttatctaaatctttggagaattatcaaaactaaaaagatcaatattcaagtaagacattaatatgtttcggtaaagcaacgccagtaacagacacgggacttcaagactagatattcactcaacaaatactgataaaattcaatagaacagaacaaaataatgtcagaagtagattctgagaaaaaagactgagaataaaatattagacccaattaagcatacacatatataatgtaaatgcatatattgaattattttcagtgaacttttgagtgtctgctccagaagcaaaggaccaggaacaacaataccaacagcattttgaccataagatgggtagatatgttggcattcctacacatttatgtaaactctataattcaaatgaccaggaacaataccaggagcattttgactgtaagatagatatatatgttagcaatcttcacattttctgtaaactctacaacgcaaactagaaatgggtcgaggccagttcagaattacaaaattagtacctgcactaaaatatatatttctccaaaaacgatttggacaagtcatacaaaaatttaattttatgatcaaatgtgattttgttcagatttaagcatgatattctgcttgtaagttatatgatattatatggagcatgttttgattttttttaaatattcttttaagtcatttactaatgcaaacatagttgggggctagcttgcgccaggttgtcgaaaaactagtataaagccacacagccagaagctagaatatccatccataaacacatcatacagccatctccttcaactagttgcaaaagcacacgttcttccagttccatcagccatgcctggaacagctactgccgctgttgttgacagccgcccgtgcacacagcacgcggaaggccctgctgcggtcctcgccatcggcactgcaaaccccacaaatatcgtctatcaagatgggtttaccgactactacttcggtctaaccgagagcgagcatcttactgagctgaaggacaaaatgaagagaatatgtaagcagatcgatccttccactttgatcgttgcactgatcatcattttcactagttattttttcataaactctgatgagaataagttatgcaagcgcttaaattttcaggacactcctgccatagttcattataaaccatacaaatatttatactatgtagaaagaagagtataatgatgttggagttcagtcaaattttatatacctcgtgtgtctgatgcaatgtggatgcacggggtgacgttgcatcccaaaattttggaaaaaaatctactatacacacagtatatacttggcatatgtacgcagtatgctcaatacgaggcccacttaaggtcatccatgactattgatctgctccacttgaatttctacgttatttatgtcattgtatttgtactagctatttatgtactgttttgctagtatatttttttcactttatctgttatcttcaatcataacactaaagttttgcatcccatctcagaaatcctggatccaccactaatacctcgttaaatatgatagtgtgtcatatactgtctctcctgctcatcagactaccatctcgcacccatgcctctgtactcatatagatttcaacagtctacgcttttaacaaaaatacaagagatctacagagtagtcatagtaacaaatccatggatcttaataaatttgtatagaaaaatagcactcacatgtctatatgttggcaccaggaattgagtcttagtggatagagttatgtccccacgttacgagaaaatcataagatcatgtttgaacaaaacatatgatgtgctaatccaatctttcagaaaattaaacacatgttcatcttcctaaatataggacatatataaaccaattttttgtcttgttatggaaaatgcttgcaaaatctcatattttttttgtatttattcggcaacttaattgaaatatgtcctatcattcttataacctcagagtgctatgtactaattgtaagagatgtgggtgcttccttttccatttcaggtcacaggtcaggaatagagaaacgctacatccaccttgatgaaaagctcatccgtgagcacccggagatcatcgacaaacacatgccctcccttgaaactcgtgtagacatcgtcaccactgagatcccaaagctcgctgagtccgccgcacggaaggccatcgccgagtggggccgtcctgccattgatattacccacctcatcttcagcacctactccgggtgcagtgctcctagcgctgacctcaagctggcatcactactcgggctcaacccttctgtctctcgcaccatcctcagcctccacggttgctctggaggcggtagggccctccaacttgccaaggagcttgccgagaacaaccgcgatgcacgcgttctcatagcctgcgccgagctgacgctgatatgcttctcaaacccagatgaaagcaaaatcgtcggccatggactatttggggatggtgccggagcaatcattgtcggcgctgacccattggtcgatggagaacgcccgctgtttgagatggtccttgcctcgcaaacaacgataccaggtactgagcatgcacttggcatgcagaccaccagcaatggcatagatttccacctctctatccaggtgccgacgctaatcaaggacaacatccgacaatgcttgctcaacacattccgatcggttggaaacatggatcctaattggaatgacctcttctgggcggtgcaccctggtggccgtgcaatccttgacaacatagaaggtgagcttcagctgcaaccagcaaagcttgcggcaagccgccatgtgcttagcgagtacgggaatatgagtggcacgacgatcgcgtttgttcttgatgagttgcgttgtcgtcgggagaaggaaggagatgagcatcaacaacctgagtggggagtaatgctagcctttggaccaggtatcacaatagaggcaatggtgttgcgtaacccactctcatgaagtcttgatgaaaattaatggccacaatcttatgcttctccggtattttattacagtgtatggtaactaattaatgcatgacagtaaatcaattgttcatgcttaagtgggattatgtcctagcggtgatgtattgatgttgtggagttcctttctaatgtttgtgaagatatttgagctgtcaactactcaactctagtacatgttgtaagtaaactctttattgctttcatatgccctctgattgttaagttttttggatttgtaacaaaatttgtaataccctatgtataattaaaacaccatattgcttatacggttttcttcagcccgaggtttgatcaattgagatgcatttttaaagaaaatacttgaataagatgaagtccgcacggtaagaaaatggtattttgcatgtgaaaaactgttgaaaaataagataaaaagaggcaatcaatatcaacttaatatttcctaattaagattatttttcttctagaatatgcatgagagttgtgtatcattgtattaatggaagaccggaggcgtaagatgcaaatacaaagaatccgaaaacacaaaaggagaaaaaacaaaacacgagcaaaagaagaacaaagtgcctcaccaaggttctcccaacaacctgaatcatgagccttcttaattgggatcgattatcaatgaaagtccccttggcctcgcctaaactctataggagggccttctcactcacaagaactagtcaagccaaattgcttggggcagcctcgttgaacgcaatcgtttcaatgcttccatatagtccatgcaccaagaatgatcagattatttatacatttccctatagccactttttaccaaattgttggcccagctccacctgtcggagaagtggaaacaagggttccctttccccctaggtgctcatggcgctgtgggccccaccaagcactacaagatctacaccttcaaggtttcaagaagaatatggagacttcaaagtatataagcgggcattggtgtgtaccagtgtctcgtctaaagtcatgcctatcatgaactccttctttatcgatatcttcaagaagctcgtccaatataccaacgaaatctactttcggcaatggcaccgtgcctgagtgtgtaggggtgccccaaggacttgcccaccctatggacacggggtgacccgacacacggcagccaaccggttacaagcttttaatccctcagggcccgaggacgctccgttcaatcaatgaagaggttcaccccattaaggacagctgctcgggtctgatgctcacatttaaaccaccactttacattaattgtgaggtgaactcatacacaacttgggagacgtggtagcacatgcaaccccttgcatgcccacgttaccccggagaacacaaggcgtgcgacatggcgcgtccacagcaaccatccccaagttccacccctgttggctacggtcgcttatgggtagcccgtggacaattggaacgaagacttttgattcatctctccacttgttagttggtaggcatggctttcacatctggtcagctggcttggagggactactacaagactaagcatattaagtttagaggagtaggccccactcgtacatgcatgcaatggcattgtggactccccttcatgtgtaaaatgaggatccgtgccatagagaaaagggttcacactctcatctaaattagattagccaaacatccagtgatcaagtaacttctcctcacacttcttcttttcccgcatcactttgtgattcccttcaacatccatagtccacacacagaagtaaggtattatgcacccgtgcgtcttgaacctatgtactcgcttggaaatttggagcaaaagactttcacatctcaatgttctaatctcaaattcaaacaattccattgtaatgttggacaatctaaaagaacaaaaaccactttccattcaaaatggaacttctggctaatcctgagagaacacatcctaaagctactacactatagaagtacattttggaaaaaaaaaaggtgtagtatcatatgggtgaaatttggagacgataataaaaaaaattcatgctgctaccacaaaaagatatagaagtaacaagatttctcaccttcatctccatgatgggattgtgatttcctcacatgcagacaaagcacttgctttcttagcacttttaaaaataaaatgggcacctcaaagcaaaatcaaatgattaagcaaaatcaaatcattatcaatttgcaggagttatttacaccttaggagggactctctacctggcttctatgatgaaatgctcgaaatcatcaattcaatgccttgagatagagatcatgggcctgatggtttcaatgggatgttcctcgaaaaatgctggcaaattatctctgatgatatctattccttgcagattcagttttgttttggcattatatctgtgggcagtcttaatagttcactagatgaataccacgccgcgttgctgcggaaaattaagttacataatatgtacaaataaaatatatttttattatcaaaactaaaacaatttgatacaattttgagcctaaaaataattgagattgcatgtttttatgagagatgaaagacgagacaatttagatcatagatctatcatccaaatgctagaaataattggggtgatatgacttaatgggagaagagagaaatagcattaactatacttagtgtggaagaactatataagtatataggattcgtcactctaattcctaagaagccaaccctggaaacaacaaatgattagttaagattcttaaaaactagttaagcatattagatacatacaatattattaatatgtcatgataattactagcaaataatgcaaaatttataaataatatatatcacagaacgtgcacaaacgaactggctgatagtgttcagctaccaagtttagtgaccacaaaatagcaatatcattatcgaaaataaacaccgccagagaaagcatttgtaaccccggtttgtaacccctttagtcctgggtagcaaaccggggctacgaatccgggactaaagatcgctgtctttagtcccggttcaaatacctgggactaaaggttttttttttctactttaatattgatttcaaaccgtcctcattcataaaatcatccacaaattcaataacaaaatcatccacatttacaaaaacatcacaaaatcatccacaaatttacatcacaaaatcattcaaaaaaaacatctaaaaatcatccactgttcttctactttttctactccacgacggccgcgcttgccaactacccagagggcaccaccgtgctgcgggagctcatccagaactccgacgacgcgggagtgttccacgtccgcctctgcctcgaccgccgcatgcatggcgcaggctacgctgccgctggccgccctccgcaatggcagggcccccgcgcggccacgccgccacgcccgccgccacccccggctccggtgccgggcgccgcgcaccgccaccgccaccggctgcccgcccgctgccgatgttagggtagagggaaaggggaagccgggaagggcaggaggggaggaaaagatagaggatgtgagggagagaaagagatagattaacataaggatgagaggaggagggaatctctgaaatttttctctctccccctctcatgcgcgccttttgttttctctagcccgcacacgatttttttaatctttagtcccggttgtgacaccaccagactaaaatattggggggggctgacacgtcctgacaatgaatgaaccgggactaaagatgaagattaaaaatacctttgaacttataacccgggactaaaaatggcttttagtcccggtttttgttcatccgagactattgtggtttttgcccaactcacgaaagatggtttctctagtagtgaaagaagaactgtataacaagaagatggaatatcgcaagaaatgctgaacaaaaattttcagttttaccttgcatcgtggtaaacaacaaaaatttgttaaaaattatgaaattttaataatgttaatacaatattgatgaataggagtatttaaatacttcaaaccagctgggatttgcggctcgaaatggcttttgccctggcgtggccctcgctgggtgccgacacgtcatccggcactggattttggctgggtttcgagtcatgtggttgcttggttcatacgccgttcgatcatcatcgtgtggctctggcaatcatcgatacgggcagtgcaatggaccaatggcagacatactcaacaaggcccaccatggcaagcgaatggttgacgaaagagcacgcaagcaggtgaccaaaaacacaagcagctaataagttgttgctttgtttttgggtgggcgtggtgtatggctcgctctcgctgttgctgtgtacagccagccagtgtttgatgcacatagtgagaatatgtccatgtcgttcccttgtccttgtgtgacaacatttttttttgtttatgggtggattttaatgggtgctttgaagaccacgtctgtagtgggagcactgt

SEQ ID NO: 9680 - DNA, 9484 bp, Oryza sativa
ggccggtctgaccgctgcttcaccgccggtctgaccggtgtctggtctgaccgaggctcttcagtcggtctgaccgcgggacccactgcggtctggccggtttcctcgaggggaaacccgatttttgccactttaattttgcaaaagcaatctctctctcctttttctgtttatgagctaatctgaaacaaaaatcaacaatatgtccatctttgccacaaaaagaacaagtatatttttcacgatgattagacacattggtagaattagaagacttagcaacacaagcaacaataggaggttttgcatgcacaatattggattttgtagaagatgcactcaaggtagacataataccagcagatttaaacacagttttgttagtatcaggtttaaccaaaatctcaccacttatagcaccaacccctaacacaacaggaggatgtctagaattatgaacataatgattaaaacctaaaccacgattatttgtgctaaccttagattgatctaaaatcatgttgaggttctttttaccatcagaaaatctaagcaaagaatttttcaaataagaaacctctttttccaaattagcacaattttcacaatttaccatgacacctttgcttttatgacacttggggcaagaaagcacttcattgtttttcataacattttccatgtactcaacacgacctaaagcatcttttaaattcatcttattcaaattacatgttgagcaatccaaaacatcatgaggttgttttaactttttagcagaaatcatgttgaacatcaaactagcatgaaaagcaatttgatatttttgcaacaactttttagttaaaaacaactcatccaaagtgcgtgtgtgcaaagcaaaactaagagcaagagaatatttatttttcaaatcatgtgcagcattaacctctctaatttttgaaatttcattcattaaaacctcacaacttttgcaatcatcatcattaggaataagagattttaatctagcaatttcagaattaagagattcaatgataaattcctgttttctatacatcttctcatacttcttattttttgcactcaaaatattaatagcttcctcaaaagcacttacctcatcgttctcacactctgaatcagattcaccacatgccatgaagcaaacaccggagatgttctttcccttagcttcatctccactatcaccatctacgtcgcttagtggctcgaacgcggcgcagacttgatcaaaagccttcttgagattctccttgatcttccttcctttatatgtacccttcgacttgttgtcgttggtcttctcaccatctttgtcttctcttttgcctctcccaagcttaggacaatgcgaatgaagatgatcaaatgaaccacattcaaagcaacgatttggaccacctcttttcctgttcctggcattattcatagctcgagcaattctgttagcaaccaaagccaaatcctcctcctcgatctgttcgagttgatcatcgaatgtggcattaaaaatagcaagaaaagaagacttagatgaagaagcatcaacatccaaagaagaagaagaagaaaccaaagcactcgacttagaatcaactttacgagaaagaacgttcatctcatgtgttttcaattttgtgtaaagcgaatccaaagtcaaagtagacatgttaacagacttctgagtagatgtaactttcatctcccaaatagacatatcaagaccattcaaaaagtggcgagaaatctcagattgtggataattagcatcataagaagaatcaacagatctaagatcactcaaaattttattaaacctagaaagatagtcatccaaggcttctccaggtttcatctcaaatttaatgtactcctttttgaaaagatctcgacgtagttatttaatgttatttgtaccttgatgaaaattactcaaagaattccaaatctcatgcgcagtttgaagatgagcaacacgatcataatccgaacgagaaatctcactcaaaagaatattacgagctttgcaattttgttcaaactcagtttttgcagcaacagtattaataacttcaggaatcacataaggatgataaacttttctccaaatatcataatcttcagccataatgtaagattgcatcctactacaccaatgagaaaaatccgttccatcgaaaacatgaggcttagttgaaaacctagcaggagtagccatggcaaaaactctagatcgataaaagtccaaagaagaaaacaaggctctgataccacttgtaggatcgaatcacaataactaagccaaccagaggggggtgaatggttggtatacccaaaaactgaaaacttttagcggaaataaaagttaccttcgaatttgacggatcgcggtctgaccgaagttgtcctgccggtctgaccgcctggttgccgtcggtctgacagagattagatctccggtctgaccgccgagatcagctgccgcttgctgtcaccgctgccggtctgaccgcctcgccaccgccggtctgaccgccgcttgccgccggtctgaccaccagtatatcgccggttagaccgccgaaacccggtgaaatacaaaatgaagaactcttaaagtggatgatgactttattgattctctccgtgtttacaaagtgcaccaacagcactccttacaaaaaaatttgactaaactcgaaaccctaactcaaaactcaactcaattgctctcaaaagcgataccatgaagcctcacgctccccctctatttatacccgagataggcagcctaacgccacgaaccaaactcatactagaagtcctaaacaccttaggaaaccctctagtataagaaacaaactttacaaaaccaatcataccaaatttggactccttccaaattcgactccgcatcccatacgcacacaatgcctccatcgtatgccatatggaatctccatcaaccacgtgcatcaactctagcctaagtatcccgcatgatctctgaccaccacggacgtagtcttatccccaagccgacgcccggtccatcaccgcaaatactctcccgagacatcgagtcacctacagatgaaataaacaaagaaaccatattccgagaccaagctatctccaacttgactcattagtagcaaacaacagtattacatacgtattgtattcatttagaagtcataatcatgaaataatcacagatatctaaacaaacaacccgaaaccaaaaccgacacagagtcggccggtcagaccgcgggctggccggtctgaccgcgcgcataccaccggtttgaccggcacacactacccggtctgaccggtcacatgaaataacagcagtacctgtagattcacctgtaaatccaatcatctccaaaaccacttcgtgaataaatttcaaataacaaaaccaataatctccgatgccaattgttcatcacagaataataatcaaaaacacctttgattttacagatgtggccatggagcagggcggcggcggttgcggatagtcatcggagttcccctgtcacatcgagtgagtccgtcgacatccccggcagccacgcatcgggccgtcgatggcagctacagccacgcagaggaccgccttgagcacttctccgccacagccccaagcaatccggcgcgtatttgttttgtctagcaacgaggtttgtctttactgtcccgtgtgtggcacggggcttcctaatgggcgcgggcgcagccgcacacgcccctatcacgcctctccttagggctaataacgctaattagcagtgatgatgttaattagcggtgatgataattgttagtattagtttttttaaaaaataatacataaatagaacttttaacttagatttagaaaactttcaaccagatttaaaaacttctgactcagatttgaaaactttcaactcagatttaaaaactttcgactcagatttgaaaacattcaaattaagattttttaaaaacttttaactcagatttgaaaattttcaattcaagatttgaatattttcaactcagatttaaaaactttcatctgaaaattcaaaacatttaactcaattttgaaaactttttctcaaaattcaaaaattcaactcaaattgaaaactttcaactaaagttgaagacgaaagattcaacttctaaaataaaaaaatcatgaaaaaaagcaaaaagaaacaaaaaacgcggacgttagcttttccggaaaaaataaaatacggacgtgacttcatccgcacgcatacgcgccagcgccgtgggccttatgggcctaaaatgcacgccgccaacgcgcgcgcgaattagctatcgcgttgtggcaccgtattaatgcagagaattgaatcttggtctgtgtgaattttgaatctcagtattgttcctgaaaacaatcttcatctgtatgagtacttcactagaaattgcaatcttggagtagtttccactggaaaattgcaatctccgtattgttcctgaaaatgatattggtttgactcttaaccaggtctgtgaattctgcgatgatcaaactgggactaaattcagagagaatttggtcaagctcaaaccaaattcagagataagtatagaccaaattatgagagaaatttagaccaaatccagcactatactaccatgtggacatgtggatgattacacatagcatctcttcaataatttggtgttattttttcatgcaacatgattgatggcctctgcatcttttcttcagacactttggcagttctactgcatgtacatgcattttttctttaattaactctaaaactgcaaccaccagatgacaataaattaattaaccacagtgaggagaggaccaacatgaatttagtgcttgcattgacattatctaaaagaagcagaagctaatggagtacaggtttagatcagagtaatcacttaaattcagtgctctgcatatgcagcagatgaatactcacaattcacaagaaacctggaagaactcagtatcctttattgcggcacatttatatcttgttaactttacaagagtattgatgttaactttaaaagaaattgcagactaacgttacaaacaattctgtcaagctagcttgcagatcagaacactctcaaaacaaacatgctacacataggtacagtgaacatgccacacatgtggagtcaagcattttgtcaaaacttgttgtcgcatatacagtgaacaaaattcaactgtgaagaaaatgattcatcaggatctttggcttggatgaatgcagcagattgtggtctgatgctgcatgcaaagttcatggacagttcagttctgtttcaattcaccattgcacatccgcaacgaattgcaggcatatgcaggaccagctgatctgcaatggttggagacacctagtctagtaaacagatcctgatatgttaaccatgaacattttttttaaaggaatattaaccatgaacattaggccaatgtcaaatcgtcattcatggttcctagataaatttcagcagggtcgatttacatcttgcccaaacgattgagcaaatcagacaacagtaggttgggattattgtgacctcgtagcactgaaaattgcagttgcagttatccaggtgacccaaaatgaactgctatcagaaattaagaacaagttcctggaaaaagaagagaaaaaatcgtctgaaaaggatttgggggaagttgacaatttatcgacgaacaataacaaagaacataaaccacgccagggcaccaggagcatatcttcttctccttgttggttgagcatatttctatccatgcatgtgataatgatcggctgagttgtgataagataggattagattttatctctttctgttacatccgttgtcgctgctgttttcctcctgagatggcgtggttgttgctgatctcgtaggcttctgtaaacgccacggtgagggcttttctgccaaattctttcacatggtatcagagcctgatccaatctaatctagcgacgttacttgatggcgtcgtcctcctccactaccagtagtgctaatcctctccagggaagttcggtgagtgagaagcttgggaaaaccaaccatgcactatggaacgtgcaggtttgtgctgcaattcgcggcgcgcatctacagggacacctgactggcgcagcggagaagccagacgctgagatcactgtcacagctgacggcaagacggagaagaaggcgaatccggcgtttgaagattgggaagccgtggattagcaggtcctaggcttccttctcgcatctctatcaagggatgtgctcatgcaagtcgcaacgtgcacaacggctgctgaagcatggacaacgattgagcaaatgtactccacccacactagagcgcgagccatcaacactcgctttgcggtcaccaataccaagaagggaaatatgtcccttgctgagttcttcggcgagatgaaatcgctcggtgacgagatggcagctagcaccgggtgaccggttgaagaagaggacatgatcatgcacatcattgcctgaagtctatctgccgtgattttggtgatgaatttgagaatggaattctacaaagctataggcatgtaatcattgggacatgattaaaccattcatttctacaaagctagtgttgagaggatgtccagtccctctaccgatgtgattaaactttgtaagttaataagcgtcctatgtccatctgaactgtccattctatttttgtattagtgtaaaaggctagagatttttaatcatgtgatgtaactagtcttccatcatgtagacccccgtttttataacaggaatcaatcgtgtaaacagtaccatttccctggatcaagtagtctggtatacacgagttcatagctgaaatatcaaatgcacatacacgagagtctagtgcgaattattacatcataagcctgcaggcgtagtcttaaatcatcggactgtgcggtccggaatacattccaaaagcagaaatagataaagcagcggaattaaggcagcggcatgccattgccacaggcaacgaccgtaactaagacctattgagcgccattgtcttcatcaccctcctggtaataggcatagggatcctccgaagctttatctccggcctctgattaagtttatatttgcaagggtgagtaccaaccgtactcagcaagccaccacatcaacaatgcatatgacaagggtatttcaaaggatggctatggttgttttgcgcaaagcaagtttttgtaattcttttcataagcctaagacctagtattgactgatcaaattttagtaccaatgtttacatttaaacaacgacggttctgtccaccatccattgtgatcccaaggatagcttcccgccattgagtcgtcatagttttctgagaacgtccaccttccctcctctctggaagtggctccaacagcataaaaatcatcatgcaataacccatcccacacaagttaagaatttagagtctagccaagtgtaatacatgtcccggtgctcaataaccgcgagcacggctattcgaatagatttgttttactcacactgcagtggatgtacactttacccacactccgcgactgcccaacacatgagccttatcccaacacatgagacgtgtcacggcaaagcttttcgataacctcgcattggcagtacccgctccatgaacttttcatcctcatgcactctaggcgtacacggtttctagcagtgagaggacttctggcgcacccgggaagggaagactcacacaaatgcattaagttataattatgtttaaattatcacatggcagtcctaccaatggcgacaccactatagagcccctgccttacacatcaagaagccactatgcatggatactgcctccgctcagctatttactccgctaggtctatccccatacgagaagtgtggttgtacggggtcgtttcatgcttaacttcatggctcggtccttaattgaccggggacgatactagtctttcccagataccacccaaatccaccgtccgccccagtctaaaatatgtatttaatttcattcctacttcctcaaatcatgtcattattatcatggcaatgtggagctcatgtctccacatgccgcatctcaattatcttcccaaagataattgccccaagcatatagcatttgataaaatatgagtatgcataaatctagagtagcatttctaagcaagtgtcataattgactaagtactcatacgtatttatggttacaaagatttaaaagtaaacaatattcaaggcatggcataatcacaagtagaatgttcatcattgcatgcaatcttatttgtaaacaaaataatttcgcaattgggatcaatatgttcaaagaatagtgatgacttgccttgctcaaagtcttgcgggtcttgaccttcgcttggatccgcaactccctcgggctctataattacgtgcgaaggaacaatttgaattctattagaattcaaataaaatccaaataattcacacaaaagtcgaacgcgaatcaatctttctaaattgacaacaaagtttgcggaaccactttattcgaattgttgggtcatttaacctaaattaattatttcctagggtctcaacataattatttatttcctaattaaatctaaattcctaccgcgaatcgacctcttattgagattaccggaaataatctataatcatatcaacgttttacgattctaggttataattaacctataattaaattctaattactctaaattttctaaacttcttaatctccctaatttatttcccctttctctttcttttcctctcattccttttctttccttctttttctctcttttctctccttttctctctttttctctctttttctctcttttctctccttttctctctttttctctcttttctctctttttctttctttcttcctcctctccctaccggcttctccctttctctctctctctcgcctttttgcccacccggccgacgcgcccgtgaacgcgagggggggaaaagacggctcaccggcggcggcagcggcagcggcgcaaggcggtgacgctcggcaccacacccggcacggcgcggcggcttcaaggcgacggcgcggcgcacgaaggcgccggcacggcggcatgacgacggcggcgcgtggagaaggagaagaggggggagaaaatgaaggggatgggtgtggggtggagaaaaggaggggccgggttttataagggcatgggggaggggcgggcggcctcgtggcaacgcgacgggcggcgcggctgaaggaaatggccacgggcggacggcgcggcgcggggctcggcgcggctcggcacggggctcggcgcgacggtgacg

SEQ ID NO: 9681 - DNA, 57129 bp, Oryza sativa
  unsure (1)..(57129): unsure at all n locations
ataatctatggaaataattaattaaaatatatcttccaaacgggacctaacttaaattaaacttgtctattcagccattaattaaggtcgccaaatactccaatcatgggtgcagatccctggagttggtgccaaattcaccgggtggatttcaacagatctgaaccattagtttctttctaggagctagaaatagccacgtcaccttcttttttgcctaatcctatgtacgaggactgaagcataccaaaattttttaccaatctcttgatatgacattaagacattgtatagaagcatcagaatgagtacaaaatttccttcacgcggttcataatgattaatcatggcgttttgatttgctatgcccgtgccgatgtgctatatacttaaagttaaatggcataacaaatgtaacatgcatgtccgatgttttcaatcaactagcggtaatattacaatatccattccctaggaaatatatatctaactactcatattattcgatctgctcctgatgtgtgttatattccagaaaaaaaaagtaattatttgggatgtggtgtccactcgtgtagatggggagaagtaacttgcttaatcttatccgttgaaatcaaacaattgcttggatcacctgaaatacatcgggtggatttggaacgtactccaggggatctgcacccctccaatcatatcacgacaaattaggtgaatggagcagactcaacgacgtgatgctttcaatctttggttcttcctttctgttttgacagcggtgcatttttcttatctaccaaggtcctatctgtaaaaaaggcgatcccaggtatttctcaccaatggacttccaggtttgttggtggatgatattttaagaaataaacaattaaaaatcaaatttaacaaaacaacatatatttggagaaaatatcacattactacccccaccgttaaaaaaattacactcacagttcaacaacttaacgggtgggtgagatgtagtacatggacttaaaaattcttagcacagtaagtgtgtagtataataacttgacaattcagtattttttttcaagcaacttagctaagtatgtgatgttttggttaacgattgctaggtgacttcttttcacgatgtcaatatatatgccatcacatagcagttctacggatattaccttatagtattaaatttaatctttaagaattacattgcacattcaatttgcactactagtttggattttttttctctgacttctcaaatgtagacaaaaatataatattttatacatagtaaagtttaatcaacttttagttatcagaacaaaaattgaaatatacttacacaaatctgcgctagtatattgtcaaaataagtacttaaaaattgaatatgtataaaaaaatactcgaagaattaaattgtcgcatcacttcttaacatagggtgtgtttggtttatggcgaaggaggctagggctgagatgggaaacacaccagtgagaaaaaaaaaagaaaggatgggaaatgagaggaattgagagatggaagaggtgaacgtatgctctttttatttatcacgtgtgtcgcctgtcgcagggccagttcatccgaccgattcaatcggatgcaaaccatcccgcttctatagagaatattctctatgtggtgaccatatcccactcccacccttcaaccaaacacgtctaaaaaataggcgaccatatcctatccagacaaatcctattgtataaaaattagcacccaccttacgaatcattatactcatacactcacttataaagtttttacacttaaattgcaccttcagttgtccaaatgggacgggcccaaccatgtcggcctagacaggaaggaactgtggggactacctatgcatttatcgacaaatttttcctcaaaaatttgacagatgtaattatagtacaatcgtagtgtaattacactgtaacttacatataactacactgtaacttatatgtaagtttcacataattttgaatcgttagatctattacaagatttgttttggtgaggaagaaaacaaatcatagcacacacatgtgaaagaatttgttcccatgaccttcattttaccgaaataacatgttacggagagatttttgaaagttacatacaagttaaactatagttgcagtataattacatgtaagttacagtgtaattacactgcgattgtactgtaattacatctgtcaaatttttgagggaaaatttgtcgacaaatatatagcaaaatcggaacggtgggagcccatggcccggccgggccgtgccgtggttgggcctccaccccggcacggcgtggtagcacggcacagcaaagctgcacctgcgcagcgcagccttcctctcagccctgacgccgggagtagccacgaccgccgccagtgaacctagtagttttagtccgttgggatgaagtaggcagcacggcagcaacctcgtttttgtgggccaaacgtgccacttctagccccatgggccaatttttgcccggcccggcccggcccagcacagcatggcctgccaaagaattgggccatgcttgggctcttagctcagcacgtgggctggcactgcacgcccgttggaataagttcactttaggtccttctatttgtcgcccagtcctatttttgtcccttagaccgcaaaaccgggtataacccgtccccaacttatgaacaccgggtaaacgtggtccctcggtggttttgaatgcggttttggctgacgtggtgcctacgtggcttgtttgactaggtctccgtcccacgtggtattgatgtggcgcttacgtggcaattatatctcggaaaaataataaaaagcgtggccccacatgttagctgaaaaaaaagtaattttaaaatggtggggcccaccacatgtcagcctcactcctctcttattccctctcccttctctctcttctttcctttcccctttctctctctccttgccgggcagcagacggcgcgggtcggcggcggagcaacgcgagctccggcgacggcggcgggcgtggtcggtgccccaccccccgagcggagtgccgccagtctgcgtgaagacgagcagcgcggcggcgccctggaagatggcgatgaggacgacgaggagtgggagagccgagagggggaagggaacgacgaggaggacttccttgttgggtccgcctggggcgccgccgcgatggcggtggcagccgtcgcgccgccaccttcttctctggcgtagtgctcgctgctggggaggccccccggaatccgacgccgccatctgtgtcgccgccgccgaccacccggacgccctcctctcgccgccgctccctcctctctcgccgccggcgccgccgcgcgccgctccctcctgtcccgccgccgcacgctgctccctcttctcccgctggcggccatcggggagaagggcgacggatggctaggcgagcggcgcaagagagagatagccgtcgccgccccacgcgcctcgcgcgccgtcgcccaccgccggtgatgcgctgtccgtcgctatgccgcccgccgctgccacgctgtccgccgccgcccgctgtgctggacgccgcccggcgagaggaggaagcagagagatggggagaggcggagagaggaggaagaagaggattggatttggtcattttgagaatgacatttggggtccacgtgggcctcaccattttttttttagctaacatgtgagacgcaccattttaaaattatttttggtgtgcagctgacatgtgggatgacgatttttattatttttccgagatatattaccacatcaacgccacatcaataccccgtgggatggagaactagtcaaacaagccatgtaagcgtcacgttagccaaaaccgccttcaaaaccgccaagggacctcgtttgcctggttttcggaagttgggggacgggtcgtacccggttttgtagtcaagggacgaaaatcggactggacgacaaatagagagacccaaagtgaacttattccacgcccgtttcattgggatttaagtgcactttaggtccctcgtcttaacgttgagtttgaatttcgacctcgaacaaccatactagaaatatcgcgtctatcaacttgcaaatctggtgtacccaacctccaaatcaatatactatctggttttttttttacgtgactagtgggccccacatatcaggcctatttcttcttcctccaacctcccctctctcttcatctccgattccccatctcccgaactactactccattgctactgcctgttcctcccagtcagcggaagtgtactagtggatattacatttgcgagttccttaggatcaataggagataatgtatggtttatggagctgtaagtacaaatcatcaatacgttaattaaattaattgctaacaatattcattgctatgattgtgatgcaccttccaaaatttctcaagagtgaaagggagctggatgatgaagccattcagaacatacaacgagacatgtggtatttcatacaccatgaggcaaacttgttgtcaccagcttgggagaaattttttatataaaggagagtctttgaacttcccaaaaaacgagtgtcttactaactgcagtaagagtataatttcaatttcacatacgcgtcatcggtcgagctataagacattgaagtactcggatatgatcgtccaatatctatgaacatataagtgcttcacaattatgtgggttaattaattaataccttccattaattatcgtgtcttgatttatatattgcgcatgtatattaattgcaagcaataataagaaaacatttatcatcgattgctcgatcgataaatatatcctctaagtgtgattcccaaatatgcgaacaaactaaatagattatcaaattttgcaaaaaaaaaaaaatcttcgcaggcgggtcctgtatcatctaagcaactggcgaagtgcatttttactagcgggccatgtagcttaagtgcgctagcgaaggtcattttcgctggtggtcgttataaagcagccgccaacaataacggtctttgctggcggctgcattatgatgcccgcctgcgaaaatgcatcttatgctcgcggtctgttgtcaccagcgaagatgacgcatcttcactgccctttgatctctgacgaagcagtagaccgccagcaaaaaatctgttttggccgccataaaaaatgtttttcatagtagcagtgtagggagcatggtgtggcgcgatgcagctctaagggtgcgtttggttcccgatcaaggttggatgggatatggcggtccatattttgctggatatgacgatccagttttttatttggtggagtggatatggcgatccagttttttgtttggttataaggaagaagatggatttggtgatctttttttttatggttggaggagtaggatggatgagtggttgcaatcaccctttcattagaggtggtgagtatacccccttgaaattcacctaacccaaaaaatatatcaatcactacaaacaaaaaatatctaaataaaataaaaaatcagaaagaaatagaaggagaatggagaagaaggaaaaaaagaaaattggtcctcttcgccgaccgctgtcgcgcctactctcccacccgccggccgccaccgcacctcctctcccgccgcctcctccaggtccagtcgtcatccctagctatcccactcctgcccacaaactaaacacccataaaaaatgggcctccatgtgttctatccacccaaaaccctccatccaaacacacagtgagtgcaatgatcgtgcgtatcataatatgcgcacgcgatgatcgcgcgcgtcataatatgggcacggaacagcacaatgtaggcaacagatatatgatttcgtcaagcctgggaccaagatttattatgaaaaggagaaatatttaaattgaaattttataactgcatatttctccatttcatattatacgtccataatatttccctgcttcatatcataagatttttggcttttttttttctagtcaagcttccttaaatttgatcaaatttatagaaaatatgatagtattttagcacaaaacaaacatattatcaaaatatattcaatgatagattaatgaaactaatttaatatttatatgttactaaatttttctataaaattggtcaaacataaataataaattttgacaaaaaaaagtcaaacgagttatataatatgaacctgggaggttactatttatcaagtattcccatacatgtatatatagtcatcgtcaccaaagagaaaaggatttaaacattttaaagaaagacatatatgcaagattaagaactgaacaacaactaaaaaatgtacaaagtatatatataactacatatctgcctggtaaaaattacagtacacgaagaaaatgtaatgcaaaaaatacaaatcaacattataaacattaaaggaatcaatctctcaagaattcatccatctcctcgatggaaggcatgacgtccaggaaaccgccgtcgtcgacgttccgccttagccaccgtctcggcgccggcggcggcacgacgtggcgatgatggcctgttcgccgccgccggcttccctcctcctccggcgaggccgtcgccgccgtggagtccttcccggtgaggctctgcacgacggacttgaactccgcggcgtcggcctcgacgaacctggtcacgatgtacttcaccgtcatgggcttcacctcctccattctcaaactaggattagctagcaacacttaatttgcaacagatgaaatgctactaatccgaacgtacgttcttaactctcacttcatccctgacttatatagagctggcttactctttcccggtcagatttgtggttggtgcatgcatgtacagagagagagagacagtgacagagggagataattttgactttgtgacgataaagtagaagactgggcaaggacgcagtcatgttcatgtatgctgagctcggtcagggatagggattgggtgcagaccaaagatcaaccccctagtccatgctgcaaaagtatcataaatggcttagcacaatttgacttgaacagcagtacaagtggtcgattggaccttttcctctcacttttgggatttgaccatgttgagagaaaggtattacctgtgttcttatattttatatatgtatgatgatgattgtcaactgtaaagaaatttgatattgaaacagttttcaaagtacctttttatataatttctttcaaattaaatatatatatagtgttgtcaacttttggacataagaccatacatcttattttaaaaactatgtaaatattatttagtttgttctgacttattttactagtcaaggtactttaatttaaggataaattatacttctacttatctgtattaaaatttcgaattagatgaattgtcaaactttatgtcctaaagacaacagtgtcatttatttaaaattgaagtataatcataataactagtaaattaaatctacagtattatggaattaccttttgagcccggtgtgtacacgtagattttgatccattccataaaaatagttcaaaagatcaatatagttaatttgatgcatcatcaaaactatagtccaaatcaaaattttcgtaacttgtttttgtaaatatattagtactatgacattacgattatatttttatgacaacactaggaacatatttcttgatgtataggcaaactttaagcatatcgattatatattcttgaatattaagtttaataacacatgaaaatggtatgagccatagaaactaaactgttgtaaaattaatttactatcattcataatccgaagctctagtcgtcgttttttatgcatcaccactactacttttgatgcttgtatatatgatagatataataatttggatgtagtatggtttaattcggtcaaaaatctatatagatcgttatttgtgacgtcactttctttaaatatgattaatctcctagctcgtgttgacttttgtaatcttgtgttttgactggagatgttatatatgcagcgccgtttacgacagtgcgactcgacgccgttcatgcatggacaattcttgcatgcgaagcagcgaaagcctttcttgcatactcctacggaaaaagtacaccaaagatctctcaacttgtcatcgaattacaaaatcgtctcccccaaccgtaaaaccaaatatataacatcccttaacttacaaaactgtttgttttacatctttcgatggttttgaccattgttttgtccgacgtgacggacgagccagcgtaggacccacatgagccctaaatgttaggacgccacgtcatcaggctctctctttcccctcctctcccttcctcctctctccctctctcgaaaacgctttgcatctgccgtccgacggaacgaaaagtatcggacgcttccgtcctaccgcgccacgcagtcaacgctgaaacatatcggcgtccatccatccaaacttatccatccatgtaataattcctctctcctctagccttctcgtattctcctttttctctttgcttcaactaccaacgctgcgccacttttctcaaataaagatgctattagatggcaggatgaggagctagatggagtaagagtcaggccgggcatggatgccaggggagtcgcgagagatggcgacgcatcgccgacggccacaccgcagcatcggcggccgggcaaggcggcgcggggtagggaggaggtgctggatcttggcggcggccacacggcagtggcagaggtggcatggcaggggcatagggtgatgtgggatagggtggaggtggtggacctcgccgctggctgcgacggcggctaggcacagcgacgtgggatggggaggaggtgttggatctaggtgctgatgcggctagcctaggccctggccggagtccgcctacctcgcgctgtcacctccctccgccgcattggtggttgtggtggccggagtagaagaagaagatagaggtcggttcattttgccagagtttttagcgaggttgcaccatattatttttcctgttgcactttattgcattaaagcgtttcattttattttgattcgatgttgcatgtattgattcttcgtgtttgccattggtatgtgtttgaatattgtatttgcccttgtcctcgtctaacaccatcaccttatttgtctctcccatgccgatcgcttgtttccggtggccggattagaagaagatagaggtaggttttgtttgagaattttttggtaatgttgcagcttatttattattttttttactttattgtattaaggtgtttcattttgttttgactggatgttgcatgaattgatttcttggtattgcaatcagtattgttgaatgttgcatttggttgaaacaattttgctcaagcgtttgaaacatttttctctgatagtgaaacatctgaaacattttcattgaaacaatttttaccgagcggtgaaacatgtgaaacattcttcaataatacggtgcaacaccgtccgatctgtagcagcctcctctttcactcactcatctccctctgggcaggccggccggcgaggggtagatgttgtgtgctgggcgtggcgacagtgctgcacggacccacggttgaccgctgcttccaccctcgccactggaccatgctccgggagaacgcccccacagcatccacccctcgccgccgcttccgcaacgtctgcactagcaaatccgtagaggtagacctccccgagctcgatggacactacgtcttcgtccccaaaggcgagggcctcctcctcctcgtcgacaagcgcacgtccgtcgtccgcctgctcaacccgctcacgcgcgcgccacctcgcggagctcccgccgctcatcccgttgcttgaccacggcaccagcaatggtatcttgattctgatggtaataatctccggtaggacacttacatggatatattcatgggtttaagtgccggcctcgccgacgacgctacaatcgccttgcatgccttcaagcccaagatcatgctcggcgtcggccgttgccaagctgcgcgacgaacgatggacgttgccccataagggcaaatcgttcatgtcaaccatatcattcgatggctgcttctactgcgccacaagccgagctgtcttggtagtggagaccggggctgacaaagaagaaaaccacggaccggcgccgtggctggtggtggcagctcccggcgacctcctccccaccacctcaccggccttctccgcccgacgccgcctcaccggcttcgcgccgtgctgctccacatcgccatcgtcccactccgcccgccgccgtgctcgatctccccgtgctcccgccgccgcctcccttcccttctcttgtgtcgccgccgctgcatcaccggctagccatcggacctcctcgtccagacgacctcccccccaatgccggccgacctgcctaaggggagatgagtgagagagagagagaggaggaagggagaggagaggaaagagatagcctaatgacgtggcgttctgacatgtgggcccatgtgggtcccacgttgactcaccgtcacgtcggacaaactgggccaaaaccacccaagcatgtaaaacgaatggttttgtaagttaagagatggtatatatatgattttatggttggggcatgattttgtaattcgatgacaagttgaggtaccgaaggtgtattttttcctactcctatttgtgttcatacttcggagttcaactcgtcatatggcctccccgcaccggaatatgggcttgatgccgattgggctagcatatggaatatactcccgacagattattgggctgggtatcaaattttacatcctagcactctccacaggaacccaatttccaaaggggcaattgagttattgccctacttcgatatccaaaattgattttgcccatgttttttattttttcgattttacccctaattttttgaaatgaaacagtcgtttgcccatgttccgttaattcttactaaccgtgttaaatgtaggggtaaaaagacaagtatatccttagatattttcctgtacttttgacataatcaaaatacaaatctatttgatgccatactatagcagtaaatttatcaaaattttgtgaaagtttgccaaaatttgggacaaatttgaaagtggtgtacaaaagtaccggaaattatccaagggtatacttgtcctttttaccccacatttaacaccattagcaagaattaatggaatatgggcaaacggctattgcgtttaaaaaagtagggggaaaaacgaaaaccctaaaaaggcaaaatcaatattggacctcgaagtaggggccagaatgaaattgccccatttctaaaaggctattttaaatcggaaaaggtctgatcattcctcaaaaataaactgtgtatagagcgtctcacaactatcaaaaccaaatcaagtccctcggttgttttagcggtgattttctcctacgtggcatctacattgatctattttttatttgatgcaacacttatgtgtgattaccgctaaaaatgtgatgggatctatatgtcagtgcaaaaaaaactcaaaataatctgtcacacaaatgttagccacatgtaaaaattatttttttttaaaaaaaatctctattccctctccctcctccttggtcctcccctctccattcttgccccgtccacagtgcaccaacaacaccactgtgcgagaccgcgcgccccagcgagtctacctctgtgtgggaccaatacgacctcagcatcgcgccagcaccattctacgctacaagattgtcatgcgtgtaactaatgcggttgcgtctgcttacacccccttactctttttgtgcgagttcggcatgcccagctctgctcgaataactttttcttcctagatgcccagttcgccttcatgtaacccaatgcgtcagcctccttctaccgccggccccgaccggggtaccaaggagagaggtagagatactttttttctcatgtgagtgatatgggttccataaattcattcaatttttacgatataattaccactcacgtgtgggtctttttttattttcttatttttctcaatgacaataaatacatgtaagcgctacgtcagacgaaaactaggtcaacttctcacatagataccatgtagaatgaaaccgtcaaacgactggatttacacttgtgttttgatagtttgtgggcgctatatacacgtaggggtgggcatatttagaccgaaccgaaaaaccaaaccgaaaagaccgagaccgaaaagaccgagaccgagaaattcggttatctattcggtcccagccctcaaaagaccgaatttatttcggtcatttcggttattaggctcgatcggttaaccgaattaaccgaaatgaccgaaattttggcccaatagacctaggaagcccaataagcccactaaaataaaccctagaagtgatactagccctactactagtgcagcctcctcctccagcccccaccacgccgccgcctcctcctccagcccccaccgcgccgccgccgccggctccaccctccaccgcgccgccgccgcctccaccctcccctgcgccgcggcccgcctccgccctccaccgcgcggtcgccgccgccgtcctccaccgcacgaccggcgccgccgtcctccaccgcgccgcggccgatgccgccgtcctcgactgtgcggcggcagccgccgtcctccaccgcgcggcggccgacaccgtcctccaccgcaccgcggccggcgccgtcctccaccgcgccgtggccgacgccgacgccgccgtcctccactgcgccatggccgctttttcgttccaaactctcctcaaaaatttcggtcagaccgagaccgagaccgaatttgccggtcctgagtttttttggatgaaattcggtcctgagtttgcgaagaccgaactgaccaaaaaaccgaagaccgagaccgaatttttcggtctgaccaaacgcccacccctatatacacggatttacggtgagaaacacgcataaaaacatggactttttcattttaaatgcatttctaaaaagacaagtatatgacgtcatccaattatcatcatagtactctttaactaattttctatgacaaattaaacttcaaagcagtttacctcacatatcctccaacttctaaactagacctcttaattaattagcaggccccttatccatagtggtaacacatacaaaatgtgaagaatatgggtaccaggtatctacatggcctgtctaaacaactagggataggaggtggaccatatccatatactatgtaataaagtcctcaattgccatgttgccttatatcacacggcaaggtatagatactggctaaataataccttgaaacagaagtcgaagtcgtatctaaataggttttccatttttataaccgccaatctatgtaaggtgggcaggtgggcagggagccccttaagggcaacccagacataacattcagaaactggcagatacaatccaacaaacatgagtagggctaaaccttgagagggccaaaacctatataaatctttatttcctgcatccatccacttttagatcccgtacactatctcctttattattaccaataaaaacactggcacaaaacggtattgttaaaaaactgtcacatgttttttgggcaaaaaaactttcaaatgtaactgtagtatagttgtagtataactacaatgtaattacactatagttacattgtaactacagtgtaattgcactgtaactatattgtaatctctatataatttagatataaagttgcatatattattttaatacttacatacaagatattatagttatagtttaattatattacaattatattatagttagatttgaaagttttccttaaaaacttacagcagttttttagatagtcccacacaaaattccaataatcattatactggagtagaaatgtacctactcctcactgttgccttatataatcacaccacagtccacactgccatcacaactcacaagtgaccatctctctaacaagcaaacccatgcacacagctgatgggcaacatgctaacatgcttggccaattattccacagccacttcaaccatgaacaccaccatccggccacagaattctcactgctccatcgagcttcttctcacaaaaaccatccacatcatgaagcggcggcgccgacgacggcgccgcaataacaacaaggagacaccaccggtaggagatcgccggagagcgccgccgcagagcgccatggccaccccaagagctctgtttcttcagaggaagattcgtgatggcagcgagaagaagcaattacctgcagcagcaggcgtcgtcagggtcaaggtcgtcctgacgaggaaacaagcggcgcggctcgtctccctcgccggcgaggggaggaggaggaggaccgccgcgcagcttgtccgcgagctgaggaggatggaggacggcgccggccgtgtcgatggctcgccggcgacggcgacggcgacggcgtggaggccagtgctcgagaccatctccgaggagtggtaataatgtcaaatgtattatgtataaataatgtgtgtttgtgcatgcttgtacagtgtgcatgcctgcatgttagttatgtagtaagattcttttttctttgtatggtttggtcgtcaatttaggttgggttcagaggtgaggtaaacagcacaatatctactatccctcccatatgtatgtacccagattcgtgagacatattacatggtaaattggtcatggacaggtggatataatgttcatcatgctgggagacggaaaaaataagaaacaagaggatatgttgtctacttgtctcgaagaatgaaaacactttcccatcacgctgtggtgctagctacggagtactaactagatactgtatttcccttctttctgtccttgaacttctgatttgttcttcatatgtcatcactactggagaaactatcttttttcgtgggttggccaaaaatcacaataatcctggtccaaaaatcgagactaaaaaccatttttagtcccgattcaaaagcccggggatacgttttatctttagtgtcccggttgtttataccaacggggaccaaaattgaaataaaacggattgaaaaaaaaggcagccgcactcccttggcaaccgcgcgtctcgagtcttcttatcccttcgctactactcatcctcttctatccgatttctttctctccttctcactcctctcctcctcctctcgatttctctcctctagagtgcagggcggcggcaggccgtggcgggtggtggtgcacggcgggtgggcgggcggaggggacgacggcggcaggcggaggggagggcggtggcaagcggtgggcgggcggaggggaggatggtggcaggtgcagggtgggagggcagaggggtgcgcagcggcaggcggcggcctggcgggcgtagggaagggcggcgatggcccggaggggtcattggcaaccaccgaatgctgcgccggatatgacgatgtgttgtttttgtgatatacttttaaatgtgtggtgctgttgtagatttattttattgatgtttttgtgaatttgtgaatgattaatttttgttgttgagtatgtgaatctgtgataccaattatctgtgaatgtttatttaatctgtgagtttggtgcgaaatcaatatgcaaacaaaaaaacaatgaaaaaaaaacctttagtagatggtagtgtcacgtgggggtgctaacatctttagtcctggttgatgttatcaatcgagactaaagatctatttttagtcccgattattttaaacgtttcgaattggtagtcccagataagtacccaggagtaaaagaggttctgaattggaagtaaagatgggttttccgaaatgttagtgttgtttggtgagcacaatacggtttgtactacagatcgatctagagaattatttgcattatttaatgaaacggataaaacttctgccatgcatctttgttccaaaatatatgtttcaaatacaaaaaaaaaacaattactctattataaattgagcgtgcaaaatgtatcttgttttgtttatgggttagctagcctaacttactaattctcttgtatatatgcacgctttggcttcttcgtagcatcaacactttgcagggttggtggactgatcgaaaccataacaaatgcttacatttttaatggtgaagaagcgtaacttatggaattggtttataattgattaatttaattttgtaggagcatgtacgcataatttttgtttaatttgctttggaagaagacagaaacggcgttgtatagtagtacgtgtgttggtagtagtgggctaagaggaatctctcgttaattttgtccttgctgagtgttgtggttgttggttgattgagttggtacgtagcgcatggacagacaggggtcaacagcgaaacttaacattaattgtttaattaattagcaaaagatttgtttaatctttcacatttactactagtatgtagcaagtggtggcaggaagttgtgcatacgtacgtgcagattctttccctgtagaatgggggataatgttaggttatatgatgtattttttgtgatgtttagtttctaagaaaatgatagcttatattatattggattcgatcagggcgtagttagctatagagtaaattccctgtgtatccctgaaaactcacttaatccctttcatgcccctgaaatttacccgtcccttcaatacctctaaaatttcaacctcatctctttcatgcccttaccgttacatttttattcatttcactattacgtttggtgcaaatgtcttttttacccttgatgctttaagtttaaatataagcttgaaaaatgattgaaaattttatttgagtgcacagtatgtgcattttataaaactaatgggactaaataattagtgcagaaaattttgacataaattttgaaaataaaacaaatgtaataaattaaattttttatttgaaattttaataagacaatggattttttttatcgggagcattcatacaacaattattgtgagcacgggtagtcctatctttctaggaatgcttctcttttttatgactttttttaaaaaataaatacatatttttttatttcattatctaaaaataaattttaggataaataatgcaccgcacaacaaactcataactataatagtctcatgcgacaaacttttatatttttgataatgtaattaataaatttctatgtttatctaaagagtaaaatagttatttttatagaaattagacagccaactaacggttaaatgacggcatgggtatggaagggatcaaaatcaaattttgagggtacataaggaagtaaataaaattcaggggcataaaagggattaactaaaaattcaggggtatacaagaattttctcattatagagtatacaagggattttctcttaattatagcggggttaggagcaattagaaacagttatgtaataagaaaaacagtgcttgcgtattagtgaaccaaaaacagtgattgcgtattaccctgccagggtatacataccctgcttcatcagaagggagataagaaattaagaaataatgatagatgaacgaaacagatgacgtatagtccatagccatcaatcccattattaattagcaaaagtgcaaaacaactgcacaagtgacgtattgtagtaccatagtcgtccacgtcggcaaaaatttcgggtatcacggtcaatttactattcgtttggcaagtttgacaccgcaaatttgtggaattagttacgagattatggtgaaacttagttttggctttgctctcagaagtcacgaggcagaaagttgctgagatttggcagttttctcaatttttttaagcattaatcttggctaacaggcaacatgatcgagttacgtacactactaagcatacgtccactgtccacaaaacacaaggatatatgcttcactgtgtacttacactgtagggttttctttaagaaaaaaaaaaggcgataagaacgagaaatttgtctccttatctgttggacctattattttcaatgaaagatagccaatgataactaaacgaatggatgattcataattggtggcgatgacgatggtaatgataattatatatcacatttaataataggagttcatggttaactcaatgtgtatacagtagcattagcatctctagccactagcagccagtttgaggtcgtgtttttcattttgtgtttttggactatagcatgcagttatatattgtgcttacctgctcaaagataggtcctcgttttgaaaatatgttgcgatactttttcaataaatttggttaaagttaaatgaagtttgatttataaaaaattcaatgcattttatgttatgaaacaagtagagaagcgactaaagctggcattacaagctgattacatagattgaggacatacagaatcagaaacataactcggtaatgccaacattttaagagaaaaaggaataaagttaagtcaccaaatgtgctaacagcccggcactatagctacttcaattttgtgagataaaggaatgggacaaatttaaacgagcatgcctgttatttgttgggatgaggaaataggtagagaaattaaaaaaatgattgtgattagctgaaacgatgaaataggtggagaagtagttatattataagataaaatttggatgctataagtaactacataaggacggaggtacgtagtagtattgtttatgggaaaattgctttaacgttgctcactaataatttttggattatcagatttattgtacgagaattgcatggttatgattagtatgtaacatacttggataatatgttacattgttacatatattcaaatacttacatatttgttgctaaaataagtgatcagattttgaatacgagcagtagtgtttggtggaacaaatagttactattcacaagccatccaccaacaactatggtttcactttcaaaatcgcaaaactacttaagaaagcaaatgaacaatctcgagccaaaatgtatagatagtgtttctttttagcacatacaaagatgaagataaatttcactgtatgtcgagtgtgcgtaccttttcaaaatttgccattatgttcgtccattttcagaatttgtcactgaggatataaatttcttcgtaccattcattttgcttgtcagccgcaagcaccatccgtgcacaccagcaccatcatgacaccccacggcaaggagccattccacacgctactgttgtaatattaacaacgccatgaacagcgacaagaggcccaaccactactcacaaccggcggcaccacccatggcatccagaaccactggagagacagaaggacgacatacaagatctaatcgaataggccttccatcatagactcgcagcgcgtgtaaagcgaggcggtgccaaggatatatgtggtggccggtaagtggcaggttgaatgatgtcgtccccatccaccaccaacttgtgtgtctctgtacatgtattcaccaaccaaccatagcggtatgacaactgtgtagcctagtcatcgtagtagccaatgcttgccatgcctgcacctcctcctcctcctcctgcttctttatcacaggatctagaagaggggtgcttggagtgcggggtgtgctatcaatgatggtggggcaactaggatgtgatgctgatggattggaattgaaagagagggtgcaccttcagggctcgtgcagcggtggtgcatgagtggggtgctttcttcaccttaggcaactaggatgccgtcggggatgagagtgatggtggacggacgacgctggtgctgatgctagcgaacaaacgaagtgactgatgaacatgatgttggatgtatgggatggcacggggcgaatgaattcgcattcctagtggaaaatttttttaaaaaaaacacgtgaattaggtggcaaaaaatattgaaagacgtggatattcggtggcaaatagtgaggctcctctgatttgtaggaaaacctgggaaacttggaggaatcaaatcctatatgaaaaaaatcctaacaagttggatcaaatcatatccttttctttaaatttcctatggaaggaatcatcctataaaaattttggatcaaaataagcttgatgttctccttgacgttttcttctttctataaccccaaatttttggaactatcaagtgatttttgttccgtaggaattcaattggcatgatattctatttctactttttttttctattcatgtgttttaaaggggcaggaaattccttcaaagatgaatgggaaatgctctatctgttttcgtcgttggaaagcgtaatcgagaatgccgttagctatccgaaggcatcgccgtcgtctccactctttcccgccacgccatggctgccgccgtcgccgccctccccggcaagctcccacggcagccgccgccgccgccgcctccaccttcacctcccaattcgaccttcccgcgctacccgaagtccttggccgcacaccccgcgctctcctcgagccacccctccgacgtgtcggcgctgctcgccgccgccgcgcgcgccggcgacctccgcctcgggcgcgcgctccaccgtaggctcctccgcggggacctcctcgacagagacgccgtcgtcgcaaactccctcctcaccctctactccaggtgcggcgccgtggcctccgcgcgcaacgtgttcgacggaatgcgcggcctgcgggacatcgtctcctggacggccatggcgtcctgcctcgcgcgcaatggcgcggagcgggagtccctgctgctgatcggcgagatgctcgagtcggggctacttccaaatgcttacacactgtgcgccgtggcacacgcatgcttcccccatgagctctactgcttggtcggaggtgtggtccttgggttagtacataagatgggactctggggcacagacatagcagtgggcagcgcattgattgatatgcttgcaaggaatggggatctggcatcggcacgcaaggtgtttgatggattaatcgagaagacggtagtcgtctggacgcttctgatttcgcgctatgttcagggcgagtgtgcagaggaggctgttgagatttttctagatttcttggaagatggctttgagcccgataggtacaccatgagcagtatgatttcggcatgtacagagctgggatcagtcaggttggggctgcaactgcactctctcgcactccgaatggggtttgcatctgatgcttgtgtgagctgtgggcttgtggacatgtatgcaaagtcaaatatagaacaggcaatggactatgctaacaaggtattcgaaaggatgcggaagaatgatgtcatatcatggactgcactaatatcaggatatgtgcaatctggggttcaggaaaacaaggttatggtgctgtttggagagatgttgaatgaaagtatcaaaccaaaccatataacatattccagtattcttaaggcctgtgccaatatttctgaccacgattcaggcagacaggttcatgctcatgttatcaaatccaaccaagctgctgcacatactgttgggaatgctctagtcagcatgtacgctgaatcaggctgcatggaggaggctagaagggtattcaatcaactctatgaaaggagcatgatttcctgcataactgagggaagagatgctcctctagatcatcggattggaaggatggacatgggcatcagcagttccacatttgctagtctaatcagtgctgctgccagtgtaggtatgctaaccaaaggtcagcaattgcatgccatgacactgaaggcaggatttggatctgatagattcgtaagcaactcccttgtttccatgtattctaggtgtggttacttggaggatgcttgccgatccttcaatgaactgaaggatcggaatgtgatctcatggacttcaatgatcagtggcttagcaaagcatggctatgcagaacgagcactttcattgtttcatgacatgatattaactggtgtgaaaccaaacgatgtcacttacattgcagtgttgtctgcctgtagtcatgttggtctagtgagagaagggaaagagtacttcagatcaatgcagagggatcatggactcataccaagaatggagcattatgcttgcatggttgatctgcttgcaagatcaggccttgttaaagaagcccttgaattcattaacgaaatgccactgaaagctgatgcattggtttggaaaactcttctcggcgcttgtaggagccatgacaatattgaggtaggtgaaatcgctgctaagaatgtcatagagcttgagccacgagatccagctccatatgtccttctctcaaacttgtacgctgatgctggtttatgggatgaagttgcaagaataaggagtgcaatgagggacaacaacttgaacaaagaaactggcttgagctggatggaagttgagaacaccactcatgagtttcgagctggtgacaccagccatccgcgagcacaagacatctatggtaagttggacacattggtcggagaaatcaaaggaatgggctatgtgccggacacaagcattgtgctccatgacatgtcggatgagctgaaggagcagtatctgcttcagcacagcgagaagattgccgtggcatttggtttgattactacttcagcaccaaaaccaatcagaatatttaagaacctccgtgtttgtgctgattgtcattctgcaatcaaatatatgtccaaggccaccagaagagagataatattgagagatagcaacaggtttcacaggatgaaagatggggaatgctcgtgcggagaatactggtgagctgcacagcgcaggtttgtctttgctaatgatcctgatccaggcttaacacagtgaagcttttcttagatagttgtagttcataatttttgtagttgctttgtatagttcataattttttagttgctttctgttttgtacaatcacatgttggctacagacttgttgtgttggtttgtcagactgctacatgatttgtacagttacatgaataaataatttttatttcggcagaattctctactcatcatgtagtacttatttctgtagcttaatatttttctgaaatagtcgcctgattcataaatgctgacggctttaagaacacagggcaacttttttgtttttaaaatgaatatcgctaatatgtccacagccaaacagttcaacgttagagggaaatctaatctcagcattcccctttattgtgtaccgtagaaaacgtccagagataatttagtagataaagagttttgatatgatttatattgcatataacatcctaggaaatacagacaagcggacatgtaaaacaatacaagatgaaagtaaccaagaaaattgctggaaaaactgctggttcgatcagctaccgtcttcaaacccaaaaaggaacaggatgaacatatccagaaatatgttctaggacctcgcttcaccagagcaaattcatttgatttggccaacgggccagaaccaacttcatacaaaggtggaagatgatcaaacatcaaacagcaccacagatcccaaagcatcaatagtttagatccatgttttcagccatcaaccagatggaaatgcctcaggaatggatggaagacctgaccgaaaacattcttccattcatattttctaacaggtcgtcagactgatcttcgcagttctggtggaagttgcgcaacatgcattgaagaatttgatttagcttggtgttgaagctccatcatttcttccttgctgtactttattctttcatctgtcatagaatttatacaaacttacagtcaatatactcttaattgcatggcttcatctgagatgtattcctaatcaaaagagaaaatcccttacctacaaagcagatttcagcaagtctacttgggccagccgaactttttgccacttttgcttttacctgttgaggttgtctagaggacttgtgaagatgcgaagtaccaccataatttgcctgaagttcctgtataagctcatgtctcacttcaatcacagggtgacacgtacagaatgctgaaattgcatctcctgttaagatccaacagccgcttaaatccaacatacgcagcgtggcagggggaacaaactttctaagcccagtggtggacaatatattcccacagaacccaagatgtatcaaatttgaggcagaagacagtgcatgcaaggcaggatcagacaagaaatcactttttaggaacaaatatttcagtgctctaagggatgctaagggaggtataacatcatccatcagctgtgtattattcaaatttaggctttccaggtatttgagttcttcaagcgcagagagagacagtactttcacagagttttccatcatgaaacctgcaacatgattaaaatgagttactcgaagatgaggtacactgatattatcatataaaatgctgggcaagagaatcacaacctttgatacatgtgcgactcaggtttaaaattctcagtgaaggcatcatgcttatgtataataaagcagaatcatcaatttttgtatgagctaaagacagtgttgtcagacttggaactgttcctgccagaacacacagtgcttgagaagttacttcagaattactcaggctcaaaaacttaaggttcattccaatatttgcaatatattcaattgcatcgctaattattctgctgtagctaaggtccaagtgctctagattcctcatatttcccaagaaatacaagttgcttgaagagcaacttgacatatccaagtatgtcagtgaacttggtaggatgcttgaaaaaacttcatcaatgttgccaaatgatgctgcggagataatcaacttttccagatgaataagaacttggaattccccattgcaaatagaatgaattgtgcagttgctcatatttagacacctcaaggtcggaagaattggtaagcatgtcacacgtgtccaagaaatattcaagaagctcaaagatgtaaatgcaataaggacagaagctccctcattggtaatttcactgccccatatatcaaggtgctcgagctgtgtcaatacctagagaaaaattcaactaggaaaagtttatacccaatagatatcattaaaaacaaatcaccaattactagcatgctgacagcctaacatgaacataccaaattaaaaagaaaaaaaataaagaccatatgatgatgttgaaattttgttcctgaaacaaaatggctgtgcaccatgagtatacatacctgtaaagaccgtagtgctttgtctgtgaaacgaactccccccaaatctaataaacgtaagtttatcagcgacgaaatggccataactccattgtcagtcaacccggtttgcgaaacatgtagcttctccaagctttcaatggaagcgatatgtttgatgccagcatcagagatcttggagcaccttgacaaatccaactctttcaacgtacgcatacctacattatcatcacaagagtatcgcgaaagctagttcgatcgaggtctccatgatagatacaatcgtgattgagaaaagcttcaagtattgtaccggagagcgcccagaccgcagaactgttgacgttcttgcaatccgcaagcttcagaaccctcagataccggaatgctcctaggtaagccagccactccgcgtcgacggcgatgtgaccgctcagatcgatctcctccaccgagtgctggaaaaccctgcacacacacggatcaagaattcatccacgcgcgaaaccaaacggagattgatccatccatttcggccctgtaagtgccgggggggggggggaggaggaggaggaggaatcgggcggttactcgaggagggaagggaagaggaggcggcgggcggcgaggcggcggaggagcgcgtcggcgagctgcgcggggaggcgctccagggagcggcgctggcggcgccacgcctccacggtggcggccccgcccgccgccgcgtcgatgcagcggtcgaccagcggcgtctcgccgccgccgccgccgccaccggcggaggcggaggcggacgccatgggcaagacggcgtcgccgcggcgcgagctcaacgggagaagtggggggagagagagagagaggattggatccgaattgactcgtcgccggtggcgagaggttggaggagggtggaagcggatgctctgacgtggcgtgtatcccgcggcgttggctttcatctcagccgtccgtgtcctttcctcctggagaatgaaaatgcatttaggacagcgagatacggtcttcaaaacacaattttgacttcttgtttctataaaaatatttattaaaaagttatatatgtatacttttatgaaagcctttttcaagacaaatctatacatataatttttacattttcaaactcaataacttgatagttattcatgatttatattttaaggtttaacttaaatattgtcataaacgaggagtatgttagtgagaaattccctggagtgctcctcgcaacacacacgggaaaatgtgaaactttcttgtgtgatcgagttttgctcaatccttcacgtgtaaaaaaaacaaaaaactgaagggagagacatatcttcttttaagaagatattgaacgggttagggattaaacataagacctcagagccaaaaccacatacccctttccactatactatcaagtgtacaactccaattcttcacatatcacaacttatttggataatgaaaaataattctgcccttcagcttgaaatctcaatccacaacttattatattataaagttgagcatttaagttgtagcgaaaagtcatgcataacagaaaaccaacattgtttaagatgaagaagataaacaagcaaaagtcttttgctaaatatccgtctatggctgacgaaattttgtatcactaatatcaagaatacggtatgtcacatgtttgcatagatttatctttatcacactattgacacctaaatttagtaccattatgaaatttgattggatttagaaagatcatatctttccgttgaatgtcaatctaaccgtccatgtatggtaggtctacccggtctatcatacatgggcagttagaatgtgaatttctcataataacatttgatactttcttaggataatcaaagatataccattgacaaacgttcaaatttaagaaatgcgcgccatcgataaatatgagttctaagaaatgtcatcatacaaacgattttatcctaaaattgtcattgccgccgttagggctccatcaatttcacactgttaaatacactattttaggacaaagaaaatatcaattattactattgtatttttatattccttaaaaaggaaggtaattttagtgtcacgtacctcatagaagaaaggtaataatagtgttatgtatctccactatgaacaccgagttttaactccaagtcaaccattagataataacaaactcaggaattaatacaagtgaaagcatagactgtgaagaagcaaggaatttgggaatagggagaagcactaatggtgttcatgcatgactccatccaccagggtttaaatcctaatgcccagaaatattacgcacatataactggactttcaaccagattatactgagatcagagatgtgctgctagttttcatctcttagggcacccacaatggttatctataagctctctacaagagatacatgtcggcatattttcctacttggaagagattaaatgaagagagagagcaaagctatctactaacctggagatagtctatagagaaaaacgaggcaatggattagagagctatagatacccatgtagacatactattgatgtgatttactattaatctagtctattgctgagatgtatatgttttatagagagcaccttactttaccattgcgggtgctcttagagcatgtgttaggagacgcattctttagggtgtgagtgtgatgttgtgtgtgtagtggtgtgtgcgcgtttgttgtgaaattaaaaaaagaggattttaggaattagggaatggataatagagtttagggtggagactggatagagcactgctacactggcccactggggaaggaagacgagaacccaattctgttgctgctgctgcctctttttcatagcttcgacgttgcttgtttgggccccagcccaaagaccgtgacaaagggcgtatgttatcagaatttatcgcaattaaatgaagatagtagctcagtcgcatattaatagttacttaattaaacttgatagggcaaaaggaggacgatgaacaactaaatctcatctctccaaacccctaaaatcatagtattcgaggaggaagaggatgagtatacgtactcgcgttccttggactcttctctacttcctccaaataaccacactctactctctctctaccacaaattaccatttcagaatagttgagtacttgagttcatttcagaccagtttgtagccggtgacccagatgttcgccggcgccggcgccggctgcacgtacacgaacctgaggctcctccccggccgcagcgccggcagccacctcggcggcacgtacccgtacctcgcctcctccagcccccacagccgcccccggagccccgacacgcccaggtgcagctccctcaccgtcttcccccgcgacctgttcgtcaccgtcaccgcgtaccggtagtacgtcctccgcctcctcgcccacgtccccgtcacgttctgctcgatcccgatcgccgtcgccgtcgccggcagcgacgacgacgacgacgtccggttcacgaccggagtcgccgtttcttgttcgtattcctcctccttgaggccgccgcaggaggcggcgaggcgggcgaggacgccgagcagcggcgcgttgttgtaggtggcggcctccgtctgctcgtagttgtcgcgctcgtcggcgaagtcgtcgtactcgtcgggcccgccgacgacggcgccgtcgagcaggttcgggttgccggcttccctcccgtaccacgacgagtacccctcctggcagctcacgaacgacgggtccctcttgatggacacgatggacgcgccgcggtggtgcacctgccgcgggtagctcgcgccgtacccgaccatgtagctcgtccccctcggattatcacccaaaatataattcacctgaaatcaattcgacaaaatttgagtaattcgtcaaccacatttgacaatgttttttttttctcgtgaagtggaagcggtgagagtattgccgaatatattagaaggacagagttgaccctgtttataaggaaaaccggctcaaaaaccatacaattgcacggcctttgacaatgtttttgtttgttttttacctgagatttgacgaatttgaggatgtcgaatggttgggcggcgccggcggggcagtggacggcgccgcggccggagatggcggcgaagtcggcgtagacggtgaggaggaaggaggcgctggtgacgaactggaggttgttccacctctggtggtacatcatgccgccgggggtcctggcgacgttgacggcgcccttgccgacgcaggagcacacaaagaactccgcgttctgcctgtacctctgcagcgcggcggcgtggtcgccggcgcggccctggaggaggaacttggcggcgaggacctgcacgccggggtacttgacgtcccacccgaactggttgatggaccaccccgtcccgcccagcgcctcgccgttgccggcgaggtactccaggtaggacctgtcctccgtcgcctcgaacagccacgccgccgcccagagcagctcgtcctgcagcaagatcaggtcatgtcagcaaggtgttcgtccgaatcctacggcgccgccgccacgccacttaccccgtatccgctgaaggagccgtagtagtttcgcgccaccgtgatgctggcgtcgtacttgccccggtacttgtcggcgaactcgaacagctgaacgcgccacaaaattttcagaggaaatttcgtttgatttcgagctcatttgcgagagttcttggagtgtttggatgaccgacctgcttggagtgcacaaggaggaggttggcgtagccagggtacgtgccgcggaagacgatggacgcggcggccatggcggcggcggtctcggcggcgaggtctgacccggggtgctgggggtcgacgcggaacgcctggcggctcgtcgtcatgtcctccggccgctgccagcagctgtggtcggtgtcgccgtcgccgacctcgccgtagagcacgtcgggctccgggtgcgccttgatgaagtagtcggtgccccacttgacggcgtccatggcgttccggagctcgccggccgccgccatctgcttgccgtactctaatatgctccacgacatcatggtcaccgtgaacgccattggcaacccaaacttgacattgtcccctgcatcataataacctccaacaagatcaacctgaaagacaaacaaaaacacaaacatttgcattgcactccattagaacccaactcatcatatctcctgaacaaattgaacacaatgccattgatggcatcatggttttgatcaaagatttgaaggtagaatggtgcatactccattggcctttccatcaaagaggccagagctggctctccaggagaccctctggttaggagggagaacgccggaccgctgcgcctggaagtagaggatgctcttcctcaatgccatggcatagtcatggccacccccagcaacaaatcccagcttcaccattgatgcaagtgccaagagaccaaacaatgtggctgcaccgtgagcaccaccattcttggccattgcaaaattgcaatgtaccaagaaggtgagtgagtgagagtgaagcagagtgaaggagcaggggagcagaggactttggttggcttggcttggagggagctcaaaagagtgcttcttatataccactggagtggagggaagatcagataaagcaggagattcaaagcatgagaaatagtttactgaactccagggcccctttctcactttagcaagttgttgatggcaaatattattccaaatgcatgcaactgatgaactcctaggtaggttacatcctcctacaaaatggcaagttttgtccatctctttttagtaaactactgactaatatagccacttctatgattgattatattattcatcgatggtcaccatctgttgtgagatatacactgaaatgcgataagcaacattagacagtggccacataatcagggcatgtattttagaaagctttcatgaactccacaaaagtaaacatttggtgaaaaactgaaaatgaacataaatcggactaaagttgctagattgccgatataaaatcatgatatgatagttgtaattttacagttattgtcactgagaaaaattttgtgatgttatggatagttaataaatgggataaagataattcaattccattgaaaaataaataagaaagctacatattacagaagttaactttgcatgcatatgcttgagaaacaagcgattcctcgtgcaaaagaacaccataggaactaccaactttaaaaaggaaataatgcaggcaattgtcttgcaattttgggagtatctgtaaaagccaaagaaaaggaaaaggttaaagaacgtcgtttctctatagaatgatcgtaccagcgctatcactattgataatactcttgttcttgcaatatacatgttttttttattatcatttgttttctagcagtttactgaaactaatgctccatttgaaatccaagtataatatgcgaatttcattagaaacagtctcccacgtagcctagctagggagtagggactagaaaatttcccaacttcatattcttacaaaagtatatttccatcccttaattccatcggtatctttgatgatagctgacaaaattcgctctatttgaggaaattagatcccgatctttcgataggtattgataactctcgtggaaacttcacacacacgatccagcttctgatcaacatgatccaaactctggttatcagccgtgccctactcagttgacctcgccgagaagactaatccttgtatgcaaatcgaaaaacacaagcaagaacaagatagattgcaacacaattggatatgaatgactaagcactcgaatttggggttccacaaaccaaagtagcggcgaaactgcaatggcaaaataatctaagcaaaacccgattctaaactttaacgactactgaataaatatgatttaggacgtcctagggttgccctagggcgcacaccccttaggcatagcccacaacacaaaagtgacatagtgagggtagaagtggacttggaaaaggtcttggtttggtccccagtgaacttctttgattatctatgcatttcttacacttggtctcttttccttcatccaaacaagtacatttgcaaacgataacatacgaaactcattgtgtagtaacatttatttaaatatataacaagtaaatctaatataaaacatatgcacctttggttgatgaatacataaggtagtcatggtcatatctaagctagttgtgtcctcatcactattaatgtgtggttgctttgaaatattgttacttggattattagtatttgtttttacgttttaccaactatagttcatattctatgccatatgttaaagaccaaaattattgtccataaacgaacatgaacaatgaataatgagtttattgtaacacaattcatccttaatgcttaatgaaaaaatatctgtattgtttgcatcctttaaattttgaactaattagtagggatgaaaacggctagaaatggttggaaacaatatcattattttattatatttatgcaaatggtttaaagtagtcatgaaatttctatattcatgaatttaagtaactaatgtcaactataatgtgacaccgacagaaataaaaaaactaaaatttaaaactgtaatggttgataaagatattattattttattagttttttgaaaacggtatcagtatagcctggacattttcactcgtactaattaggattactttagaacaaaagaattaagaaacacataaatatgataaattatacattcacatttcctctccaatcttacagaactgacaaaattaggaaacaattaattttctatggttgaaagaaaaaaaaatagatgatgtaaaaatagagagaaggaaggagataaccttaaggccccttttaaaatgtgtgaagatgataacatatgaatagaaaaagatgaagatttttcaaaagaaaaaatggaacaacaaaactgaggattgtaaatggtgaaaaacttacgaatttaagtagtgctataataaatcaatgcactgggcctggtcgggctcagtttgaacatgccaatagaggagattcccaactcatcctcctagtttttcataggcacgctttctaaaccactgaacggtgtgtgtttttttaagaaaaaactctataacaaagtttgtttaaaaaattatattaatctattttttaaaaaaatagctaataattaatcaatcatgcgctaataagttgctccgttttacgcgcgcgaggcatgagtttccaacttcaaacatcggaacacagcctcaaggaccttgccaaaaaacaacaaacaaaatccaatgattttttgttgtgggggtttctgaagaacttgtttgggttgaaatccaatgaatatgagatgttcgttacggtaaaccagcaaattgacctgctgtctgctgcagcgcgttcgatggatcgatcgatcgacatggcgccgttagagcaagtataatagatggctatacgaaggctaaatgctgaggtggatgaggaaggagagaagagagatgagaagcgggttgtaagtttacagccggcttaggcataggaaccaagaaaatctatgagacagacatgtggactatatatttatagtgaagagttaaccactatatgagtaagctggtagataggctataagtaagcagttggctttattattatgcttgctcttagtccagccgcaccaccccaattttcaattccgccactttcgcgtcgtttgatgcaggtggtggccgcgcgcgtgaacgccgtgcgcgcgtagcgtctggtcgtcgtctcacccctcccccaaccccgtcccaaagtgtgcttttctgacttgggtagcggccggtttgacagaaatcagggcacgatcttaggagcaccagcgacagcgattgcggctgccgcccggataatacatgagctaattccacgctgtgcccctcaacttttctgtgcactcgccgtgtcctgcgccagaaatggggacataccctcttgtctagtgtctagtgttaagattgttagtacgtacaccctagatttcaactttggcaaatgaacatcttagatggtttggattattactccatcattaacatggtcagttatatgacaatgttgatgatgagtaacaatccaaataaaatgttcttgcttataattaggatgacatacgatatttcaataatatagcatccttttgagtatttgcaaatttattttctgtagaaaagacaagtagtcaaagtttaaaaacgaatagtgttggcagttatttaagaaaatggagggagtatataccaatttccttttataaacagatataccattgtttttagattacgtgaaatcaaaccataaaagttttcataatgctttctctcatgcaaccgaaacccgagagaaatatagaaatataagatgctcaaacccgctcgccaatcctcttccaccggttcctacaaacaacggcgtggtggtccacctcgagacaacgatgccacttcttccatggtgcctccccatccttctcctccgaatcttgtttctcctattgccctctccctcccctagtaactgcccttctccctaatctccctttgtcacgtttcttggagcagacctggctgcccccaatcttaaggtgccaaatctgattgagggtcacctaaaagaaaaagagtgaggtggggcgatggctttacgtagaggcttttccttagccttcattttccttgccaccacgagaggcggcgacgaaagtgaagctagtcgtaagcaatgaatgtgtgagacataccagaggctagtgtaggtggttgccagacacatagaggaagcagtgctcatggtgctattgtcggcaccaaaagttgttggaaatatggtcacaattcagcatattttaaactaaattattaagacaataagcatggcattttcagggaataaactagtgcgaatgctaatcaagagcaacatacaaatcatgcttaatatagaataagcataaacattcatcacatgtcaatgtaaaaaaacattgcggttaacaatagtatattagaaatgagcgcgttgatgatagatatataccctgagaatggctctccgctggaatatgaggtagagttgcctctgttgatggagctgttccctgcaccgcctcctccatcgccattgtcgacatctccctcagcagcaccgttgatgttgtcgtctgtcgacatgttggcgttgatgacgaacaggaacaggaacttgcagtaggagtagtcatgttgaagaacgctccctaaaaaccttattgcccacctacccgtgcaggaactcagacgaacagagtttcggaggcccgactcgtcccaatctcttgtgcatgcaagagatcagagaccggggagaacagaagcagcacaagaacagagaaactggggtggaaggagaagtgcgccgagagagaggaaagaacagaagacactcgatctgttcgtccctttggcagagtgtttctcatgagagtaatgtttgcgcaattaatcctcaaattaacagcgaatgaatcgctctccgttaatacagaatcaattcccatatattttccgcctatccgtgcaggaactcagacggacagagtttcggaggccctactcgtcccaatctcttgtgcgcacaagagatcaaagacccgggaggacggatagagtttcggaggccctactcgtcccaatctcttgtgcgcacaagagatcagagaccggggagaatagaagcactggaaggagaagaagtgcgctgagagaagaaagaacagaagacacccgagcccttttggcagagtgtttctcgtgagagtaacattcgcgcaatcaatcctcgaattaacagtgaatgaatagctctaaattaatacaaaatcaattcccgtccattacaaaacaagagagagagagccgccatggccacggccggagcgtgtgtggtagtccgcccacctttctcaactggtcaattgggagccttaattgtctcactatttaaggtgagatctctccacttaagtttccaatgaggtattattgcctctaacattaattgtagtcctatgaaatttaattgaattaaatcgagcctagcccatttattcaacagaagtgccatagaggatgcatattttttcttcattttgcaactcgccgtttgtttgaatgttccatatattagttataagaagatgctgtcgggttcttggatgttccacacattgttttctttttttggcaaattctgctacatacccaaattttatgtaatttactgatttacatcgtaaaaacgtgtcacggctgaaagacaccttaaaaatggtaatttgttagaggacactctcggcttaattaaagagataaattcttaagaaacacgagaatatccctaggattatatgcttcaaacatagcgctaaagtaaaaaattaagaaattatgtaaatctaaatttaccatcatcccaagtatatcactaacataaatcgtattctacctttcactttagtctcaactcaaaaacttttgtccttagggacattatcatctttctaaagaatttctttctcagttgagtaaaaagtgttcttcagtaaattactagtttttatagtgtattttagccatgacatgtttttgcaatgtcaactagcaaattatacaatttaagtgtcatgtagtgaattttgccttattttttattgcaattaatattttaaatgttgcatctatttaaaatatttttaatcaagtgataaaatattttttacaaagtgacgaaatattgatcaacatgttggccaggagttcctagtcactttcttaaaaatttggccccaagtatcaagatgtctcgcggagaagatgacagcagtatgttgtgacggaaaataatttcatatcacttacacgaaaagtgattgtaaatggtatttttttttctgagtggactagctgctagctaaacggtaaatgttagaggtttccaatgtcctcacaaaggattcgacgaggtagaggaagcgggtaaacggaggtcccactatcaccatcgccgttgccgccgtcgagtcactgccgccttcgcctcccgaggccagatccggcgagccctaggctagatctggttatgaggggggcggtgccagcgccccgacgaggaaggtggagggaaagccacgcgtgacgagtgacggttggggggagggagagcaccggacactggtagagaagtactttttagtcccggttcgtaacccccctatagtcccggtttttcaaccggactacgaatccgggactaaagatcgctatctttagtcccggttagctatctttagtcccggttcaaataaccgggactaaagattttttttttattttttttctttttcattattttttaatatacaatattgatttcacaccatcctcaaatcataccaagaaatcccaaatccaaatcatcagatatcatataatatctccaaatcctcaaatagatcatctccaaatacatcacaaactcttaaaaaaattacatcacaagttaaaaaaatgcttagattcagatgtaatatgaccaaacgaggacaacaatctcacgagttaggagacacaattcgtttggtgggcaggcatacagcagagaccacacaatactatatagagatgtgttgatttacatatgcagaaggaggatcggagaacggggcgggcgttctggctggtgcagttcgccggctggccgccgccgccgcgcaggccgcgcggcctcccgcgccgccgcgccggccgtcgccgagcggctgcaggccgcctccgcgcggccccacacgccgcggcaccggccaccgccgccgctgcgccacccccacgccgccgcgcaggcagccgcctggccagcccgctctcctcgtgccagtcgtcttcttcgctgtgaattgaaggaaagaaaggaaagagaagacagtgagacaaggtaaggtataagaagttattgaggaaaaaagagatacagggcaggagtttgttgtatggacgggaaaagaagatagatactattgtgtttttttatttttaatcccggtcagtaacatcaaccctatttttagtcccggttggtgttactaaccgggactaaatatcctaaggccctgacacggcctgacatgtaatcaaccgggactaaagtttatgtttagtcctgttggagttaccaatgggactaaagatgatgttacaacaaccgggactaaagatcttcctcttataaaccgggattaaaaatcatttttagtcctggtttttaatggaaccaagactattgttgatttgggtcaaccgactaaagatggtttctctaccagtgggaggaggagaggggaatcaacgatgggtggtagggagagaggggcgttatcgtcgttgctcgagccatcctgccgcagccacctcgtcgccatcgtcggcgattggaccacctcgcgcagccaccgctgctcagctctggcggctcttctggcctcagcttcctccgatggggaccgagagaagagagagagttgttggggaaagaccaagaagatagagatgaaaagtaaaaaaaatggtataggtaggacctactacaagcaacttgcactgtaaaacatgtagctcaaaacgtttttggtcaacgtggcatctgaggaacacccactgtgaatggccttaatggctctgtttttgttctttgatttgtagtgaaaatgaagacttataatagtgaagtttgttttgtagcgcaataatttgattatctcgcacctgcggctgcattgtgtttcgtaaaattatttaatacttttaaaatattttaatattattgtttgcaacacagatctaaaaataaaagtggtccaccaaacaccgaaatatccaaaagtcgttgcaccaaatgagattatcataattcaccgtaatggagcataatgataatgagtataaacacgatttactgtcaaaacttcggcttcttgggaattaacatgatgcaatataggagtataaactcttatgcttatacttatcggccaaaattgaattttcaactttaaatttggagctgattgaggtttttttatcgaagtttattttttagtctttgcttttagatcactaagaacacttatataaaagttttattcacaaacaatatttcgtttataaatatgccatttagcttattctgcaaataagcgaaccaatgggtcagatagaggtgtactaaaaatatctagataaaaaaaccaggaatttcaaatccaaaatcccgtactctttttatgttagtttggtctcatcctctttgttcccagaggtacatgcaggcattattaagtaggcaatgatgattaacctaggtataaaatgggagagcactaaagcgaaagcagttggaataatttgtacgtagacggtgaagggacagagtagtgagtgtgtgaaaaaggcaaaggcaaaggcaaacaaacaaagctaaggccgtttctcccgggaggaagccgtaatctacggtttcaatttccaataatccgaccaacataatccgagctgcataaacccttgtgagttgtgtaagcgcgctgatcaatctaactttgtcaatttgtcgcatatatactcactttgacccatgcagatctccagtgtaataagggtctgtttggcacagctccagctccagctctactcctcctggagctggagctcagccaaacaatttcagctccgccaaaactgggagtagagttggatggagctctctcacaaaatgaactagagttgtggagctgggtttaggcaactccacaactccactccagacccaactcctggagctaaattctacttcctccactgtctagatcagctcgttctatatgaatatagctttaattatttgaaatttttttgggaggaaacaaattaaagtaaggagtaataaactgctgtaaggtagcaacggcggcagcagtgtagttcgcgaaaataaaatttttggatgtcacctcagatgtttaaccggatgttggaaagtgtttctggacacgaatgaaaaaaccaatttcataactcgcttggaaaccgcgagatgaatcttttgagcctaattaagccgtcactagcacatgcggattactgtagcacttatggctaatcatggactaattaggctcaaaagattcgtctcgcgtttttcatgcaaactgtgtaattagttttatttttatctatatttagtactatatgcatgtgttcaaaaattcgatgtaacgtttttggaaaaaaaattaggaactaaaccaggcctcatccgatgacccgggacggcgttcagcccttgatcggcttagatggacatctccttggtggtagtgtccttagatgtggacaaacgactggtttacggttcagttaattaatcttcgatattattggttacacctaaacttagcacctagtattaaattaaaaaaaattaccaaagtttgaaagtctaccggttttcctctgagagggccggtcggaccgccgtatgtcggctggtcagaccggtagtttatggccggtctgaccggcagagtccgagcccgagtctatttcgtcaggtctcgaagtttccttgcttgggaaggcatatttcgggttttatttggattctatcccgacagaaaaagttgccaacaattatctttcgttttggttcaatatcggttatcggcatcgatgtacaccaaattcgataggcacaatgaacattcgctgattttggaggttttgctttctggtttgacaaaggcaataaatacatacagcttgcaagttgcaatgcaaaaacaacggttatgtagattttcgtcaagatgtttagtaatatgtgttaagtgttatctttgcgtttaaattggtattaaagtaactttcttgtttttagtcaagctgtaactttgtaattcgtagtcgttcatcaagtgatctatagtagttttgtaaaagcctgaatgattcaattattttgaagaaatagtgcctggtggatttggatgataagatgaatgggataaacaaggagagagaggatgagctgctacttgtttaagagacttggacatgagcttaagaggaagagtagattagacaaacaaataaactattataactagttataactatgttgctcatttttccagttctaaaaatgacacatacaaagggattggaacgtagggatataaaccataggaatataaaacgtaggaattactgtaaaatatattggaatgcgagcgttaaacggacgaatgaaaaaacatgaaaaatctagatttttaaagtggtgtctggaatagaggaattctagaatatgtattaattacctagcactaatgatctctgttttacctgtgatgactgtccagtccaattaaacgttatcatgagataattgcttctgaaattatgttttatgtcctgtgttttgcttctgaaatggaggaaaggaaacctttcatctgttttggttttgcttcaattccttcgaaccaaacgcagctacatacattagttttcccttcaaggaactaataaatcctttgaaagcagctgctacggcagtttttcttccttttggagctctgcggtgccggagtgtcggtcagatcgatgaagccgtagcccgtaaagactgtacttggcagactgacaatgctccttcagttcgctgctttttgtttgctgctttcgctcaaccatccacagcttcatatcccgagagagaaaagccacaaacatagatccactttcccttttcttttcttttgtggggggatcatttgaggggagcatggatgtcttttttttctctctttttcttcccaaaagaaatgcatgtttttattaagtaaagatacaaatagaatactcaagaaatataaatgtaattatcatattctctatattcattatgtaataaaactgaagtctagaataaataaataaatatcaagttgtgctcaaacatggaatctcaattttttttcctttgatttaactattatagtgttttcttgatttaataattttaaacttcagaaatagcaaatagtaataatattttcctaattcaaccccgtatcactattacaacttttcagtccaaccataaaatatcaggactactattgtatttgacacctattctacctattctagtagaatgtctgtaaaacttatgttcgaaagacacataaaaaaagatatgttgttttgaacgtaggaatcgagaaaacacgcgattctcgctaacttactataaaaatatctttttggttaatatatgtttaaatggtcatatgcattaattagtcttaagacttctcaaagaaaaaatataaggaggtcgtaatggatgttcaaataatctatggattttctataaaatcaatggctaacaaaaaattcctccgattttctgatgtccttttcgccattcagaaggggtgaacgataccaaatcctgtaagaattaaaatctgccaatttttcttcaaaaatacctagctccttctgaatgcaggaattttactacagtttcacataaatgagttcatttctataaataaatcccttccaaagaaggcctgaaaagtattaagtccagtcaaatatattttaccttggctgaacagagtttggtaaatataaatgaaaggagggagcagtaagccagtctataaatcctagtgttaaacttcttgtgaaattacaagataacatacaaccaaaaatagtattagctagcagccgatctttgagttgggtgccaatgtaaacaaggagcactttctgccgtccctggcaacaaattttgaactttacagaaaaatatgtaagctcgaatccgtacacacaaaacaagaacccagttctggcagcgatttgtgtctaaaacagacaaaaggaagtcaaaatacaaaaggcatgtccccacgaagaactgactcaatctattatctaccagactaccacgacccaaattcacgtgtcaacaacgattgcaattgtcaacagtttgcatttccggttagcaaatattttgcgatgtttggaatttcaatataccttccctataagcgcaatttgaagctggcattgccaccgtgataagttgaaaaacccaaaaaattcaaggcgatataaagagctatatacaacatcaatataatttcccttatattagctttgaagatgccaagccaccaaaaaacatgtccaggtaataagtagagtagtatagctttcacaattttgctacttggaacagataaaagtcacctcaagtgtttattataaaaaataagattagtcagcacaaaattttagttctacttgatggaaggctgcttactgcctaaagaaggcagtttaaataagaaagccaacaaataagtttagattgcatacatcattgcgaagaacattacaagtagcagcctgacctgagtttctcgagactcttgtctttgaatctacgactatttctcttcgtctgactgagaaggcccattgatggcatcagcaaaatactcaactggaatcatgtcaacatacaaatcatcaaacttttatagtagtgaatataggtttttcaaaattcactgtactgcatatattttaaatagacaagtacaaaattacctatgtcatcatccggggattcaaaaatatcagagtctgaaggcaggaatgggttgcctgaatagttttcaagggctgccaggtctgaaagtcaatgccaacagtagttagatgtaagcagtagcaaaagctgaaaataagttcatttagcaaagtggtgaacgtttttgtttcccgtctacaggtcaattctagatgaaatatgattgtcccagaaaaatattaagtagaaatatattcttttaagcactgacaaaaagtgaaaagcacattcaggagcttgttttcaaatactacactgctagaatactgtctataagtcaggtaattcagtatgtgggggagaacagaagcagcactactcaaacattttagccaagcgaagatcttgatttactccaacaaggggtaaacaaaattgaggagagaaatacaacactatatatggcataagttcaactaattaaccaagatatcaaacaagcaatgagaatcccagagaattaattaaaaatgcaagtgttatacaagataatatctcacaacataggacattacctcccagatttgtcaaatctgctgataaatcagaaagactgaaatcccagatctgctgccccaaggaagagctatcaccaccatttggtcctatttgcagaggtcctccattccctaaatcatctccaaaggtggcatttacagtagatgcatccacatccatccctgatatatcaggagtgaaagaaacatgattgcttgacattgcagatgatggactcacagccatctctgatgacatggctccagcatgtgcagttccaggaacttcattctctgtcatgcttcagaaacataatgcaaaaatcaaacgaattgtataggtgctgacagcaagattttaactgtagctacctgataggtacatatgtatgccattgtcttacaagacacaagaaaataattagtataagaaaaatgtattcaatttttacagtcaaaatgaacatttgctgaaataaagagggcaatttggtaattttgaaactacaacatattgcatgacttgggagagctaatgcatcagaaatttactctaaattaaataagcattcaaatttacaacatggctatcaagtggtttgatactgcaccaagaacaaattattatcattatgtatgttgtccaaatctgtataaatggtttcattctttgatttctttccaaacacctgatttggagggtttccagtaaacaacaaaagagaaaatatatgagataatctcaatagtagcaatagtcagtgtgatgataattctttctaagactaaaaaggaaagagggagggctgtattcaagacaaaacagagtttacattgtccatcttatcataatgccgtttatagagcgataaaacaacaagacaagcattagaacaaaacataagaaaaatattctttacccatttcctgagctcatgcgaatcggattataaccacctggtgcaggaattccatttaccacatggcaaccaggtggaccacaagatatcgaattaacatgaggctgaacaggagcaggtattccaggttgttggagtactggatatcccataggcaaattgttaactgcaatggtaccaagtaaattgtaaggaaaacaaatgggacttcataaagcaggccagccaacaaaattagccagctaagcatccagaccaaacagaggtgatatcagcaatgttatgatgaaaacacacgaattaacacgatttagcatgaactatatagaactgagacacaagtaacccacttcagtgtcatgtgggcctcaagaactcccagagcagcaggcactgatacacctatctttcaaaaatgtgctcatttagcatcttttctcgaagttatctagaagatacatatttatcaattagctaagctacaaatcttttaagaaaaccatgcacatcgcaaatagcccgtgacatttcaacacagtttatcaaacatctgtggctaggacataaacaaatgaaaattccacaaaatgatgaaatgagtcttccaaagtgcaatagtcattctccatatcaagacagttttgtaagagcagaaatgcaagtgtttaggaattcttccaatgttatggcatcgatatgaaagaaatttgtggacaaaggcgaaagcaatgtattcatacatattttacttcataaatcagtgcttttgtatttatttttcattttgtcagtgctaagtggtccttgagtcctgtaataaatcagtgcttttgtatttatttttcattttgtcagtgctaagtggtccttgagtcctgtaatacactggcctacaagtacagggccatgcagcacatggtgttagataggtcagggccaacatacaaccctaaacattttaactataacacctattgtttaaccctctaacacgaaatgatcatgaaatacaaggggacgctatgtgtaagtgggtctgctcctccaaagatctaggctaatacggattttggacgctgatagaggcctgtgtggtccatgttgcggcgctggttggattagtctcacatggagaacttagattggttggaactagcatataaacccacgttacaattatacctcaaggttaactcttctatacaaagcaaggccagaagtgtaagtagggtgctatctgtacatggccgctccttggaaaagttgggctaatgcggaattttgaagttggggtgttacaccttgtacaactattggtatctataagaccatgtaggggcatgagagtatgggggagaagggagaaaccaacttagaaatccaagtgccaaacatattccaatcccaagttaatccttttacatgaattggtggtttgtttgtgctccagattttgccatattcttataacggtccctaaagtacttgtctagttgaactccaaaaatccatgattgtgatcaagcgcggatgactacagactaccttatgtgaatgcatggagacaaaaaagcaaagggcttactttccaaattaagggttgaacgtagcatagtgccttgaactagttaagttcatatctgtttgataaaatctatgaagaaatttctttatgacagctctggactgaaactatgtgtgtcggatgttcaagattagcattgaccttactatgatttccaaaattttactatgaaccaagcattgcaggatcagagtgaattaatttgtctctttctatactctggttcagtgccaagctgtacacagcagagccagtaatatcaatgaaagtacattgccttagatgcacatcggtctatcaggtgataaactgatgacctaacagagaatagggcatcaattaagggcagtgctatgtatgtagtagtagtaggcaccaccaactggcaaatggcacataaaagtagcatggaaactagtaaaacaacaacattctgaacttacaataatgaacaatgatacatgagtgggtaacactgaaacaaacaaaaaaggctaaatgatggcaagaaactctgaagcatggaatcttaaaaggaatgtgtaacattataagtacaataaattttgtaaattatgattataagtgaaatcaggttttcaattaattttcacacaagtcaaatatgcacattatcacagttatggcagaatagcacatatcctacatggataatttgatttttgtgaaatcacactatagagttagatattaatactatagagatagacattaccaggcataggacgaataccgttctgtgttggggtcaacggaacctgctgtggtactgggtacttcataagatggtattggtgctccaataagtggttaaacaagttaatctgttttttcaatttcaaccttatgtagtaagcccgaaagaactcagaattttcttcttcgagtttctgccatactgaaaaaaaaacaaaagggaaggctttagagctatactagatacatcaaaatgctgaactgtctccaagcatcatagaagtcactcaagtattcaatagatctttttcattaataaacaatgttaatatatgtacgacgtaaaaaaacagctttcaagttttcactataacttccatattcaggaacagaatactaaacgaaaggaattagtggattatttcagtatccatacatatttatagtactacacgatcgatcttggctataataaaatgcaaataagcagagttgtagatgcacagctgatgttcacaaaacagattaaggagaatcttattactcaactcaataaggtgaccaaaattgtcctgactgaagaagaaagaactactcctatattatatccaggtgagctctcttcttaaaatagcataccctgagcagattataagaaacaggtgttacgaaccaactcaacataagaaccttacctaaagtagtgaaaccaggttcaattcttgcacgagtagaaagagtcctaacaacttctcctctattcatatatagctgtagacagcgttctattaaattctggacctacaacagcgcaaaatatttggttagttaataatggaaggtattatactttgtatacaaaaattatacacttttcaacattgcctccataatagaaaagactagccatcttacaagttcaatatcttcacgagaaacccttttattatcattacttgcagcggataaggaatcagaatcccctaaaggtgcatcagtatttggctgttcacccttgatttcatcatcaccttgcaccaatggatgcacctttgccttgctctcaacatcctgtagaaatatgctcattaggatatagttcacttgaaatgtggtataaatgtaaagatgtagtaacaaaaggtgaaagcaagggcaatcaatggtcatgacatcagcaaaaaagtgagaggtgccaatacaaagaatatataaccttgaatgaactagtttttatgtcagagatccacaagagtttacctcatgagcacttggtatcttgaacggttgctcttatatttaccaagtgactctactgactaatacagagttaacaggccggttactagagatgttctttattttgcctttcatagacattcttacacctctccagtcttcattgaagtccatcaactacaccatccaagttctccttactagaattgtgcagctgctacatttcacactggggacctcacagtgcatggcactaggctactggaggctatctttgccaaatcgatcattgcggtagattcatcatgttcaaaactgattagaaatcagttgcatggccaacactgttcttggagccaatagttggcaagctccgacttgttgttcctggaggctatctttgccaaatcgatcattgcggtagattcatcatgttcaaaactgattagaaatcagttgcatggccaacactgttcttggagccaatagttggcaagctccgacttgttgttcctcaaagtcgaagggggagaagattacaagggacatgattttcattttacagttcagtacaaacaaattctcaaaaaaaaaagagactggaaaaaatatattgctcttgtctaagagttgcataaaaattaaattaccatattagcctggatggtaaatcttctagcattttacactccaaaagtcatctaagtacattgcatatagattctaagaagtaaaatccaatcttccgagttggcaagctatctatttccgaattaatttatatgaaaggttctctcacagtgtgactgacatcagcactttaaacaaaagacagtgcatcgaatttatttttttttcaagaaagattcttacagtacgaggtactacgacatcagcactccaaacaaaaagaaacacagcgcaacaaacaagctcacctgggaaccctccttcattgcggctcaagcccccacgtgttcgtcagattaacacttctcctgaaaagagctattaggatattattaagaattcaagattttggcaaaaattgagagaaaaagcctcgaattagtctaaagagaaacgagggttaacgcgaattggaggaagagagtgcgtgggtgggtagagtgggacgaatgctcaccaggatggatgcggccgaagcagcagctggacgaacgacggcgcacctgctcgctcgccgggatggatggggacgcgcaggcggcgggcgagctcacgaggagtcgacgacgaggtgggaatggacggggaaaaatatcctcggcagccggcaccgcaccaggatttctcctctttcttcttcttgggcacaattacgcctggaaatatgagtactaacttttttgttattgttttttttgcttattgtatatgttaatttaaactaatatttttgaatcaaatagatataattaatgatttcctagttcctacagttaaaaattacgttctaagatttaaaaattatagtggaatttacattgtaagatatggaattataatatttaaacttttttcttgaaaaatggggcactataaaatgcgtaaatatttatagctaatcctgaaaaatattggttatccagcatgtaaaaagactgcaatgtaaaataatttagttaaattgtttctcaactcaattcaaagtgagacgtttgtcaattgaacgaactttgagataataaggtgaaaagtagaggaggctaagtcaccaagacaccaaccacacacaagggaagatttgttcacatcccttataggatactagagcgggagcacgctttgcgcactgcaccagcttatctggatcaaaatgcgtttgttcttttttgggaaattagctgtgttttttcttttttgggaaattggctgtgttttttttgctgttttaggtggtgaaaaagaatgaattagtttgaagcattgaattgtgagcatttgtgaagaagggtgtcaaaatgtcgcttgttaatgtaacggcaggcattttactggaactatttagatagtataaaggcaagtcattcagctagaatgcatgcatatatgtactatgttctatagcattggtagcagatgcagtagcatcttggatcatacaatgctaaggaaggtaggtaaggcaatacttatatacaatgataatcatgacaaaaagccatgaacaaaagatcttggttctttagtcctaggtaatttcacaactgccatctgtcttctagctgggacatagctttgtacatatatataagcaaaagtcttgagatggattgcacgtcgacaactcattcactgtgtagatgaaattaagagttgtgagattaggaaatgcctttaaattgctaattagttatgtgtagataggtgagtttatgtttgaggagtaacctgtcattgcctttttgctgggcaccatccttgaacaatttcttagcaaccggaggtgttgttgtaggtgtaggcattcctctgtttattgaaatgatgtgttagttacaatggaagaaagctttattattggaatgcacctaggagtgatcaaagcaccttttttggcttgggtatctgtagggaatgatggggttgcttgtttggcttcttcggcagtttgtccctttcccttgtaaaagaagtggtggttaagtcttaatgaatgagctgaaaggaaagagatatagtagtaccttattttcagtagtatcaggcaggacaacaattgaagatttatcatgtgaggtgttttcttcagcttttgtgtcagttttgggcttgcaaaattaggaaagaagtgagagtggatgtaattcagtatgagtgacaacaagtttaagggtggctataaagtggttaccttatcatcagttttaggtttggtcctgctagactgcatgcgagacactgagacaacaatgtttttcttggtaggtgttgaagaatttgatttgctagttggggtgccctgtgttccttgagtgatagtgaacttggttggtgttgagatggtttgtcttggttgaatgggctgctgtgattcattgcttgtttcacttggtgttggtgctatttggacagagctgcttgagcttactgagacagtagctgatgtcacttgtgaagcatctggggacataaggagtagtggctggtttgaagcaccagaggatataatgctattaacttgtaggcactcttgactcatcatgacagtatcccgcgtaaagctaacattccatgcaaaattgctgccaataagtgacgtgatttcacttggaatgtattcactgtttggtggattttcttcaatgagagattctattggcctgcgtagtaggcgttgtgcgatccttccgaaaaggataaatgtagcattagcatcatcatcgccggcaattaatactactttgtacctacatgaaaaatggatatggctatagcaatgtgtggatgataattgctaaagatgtaagaagacagagcgtgttctattatgaaccttggatctggtattccgatgttagaacagctggagcatctgtagctagagccatatggttctgaagttttatagcatattcgacatgaattgtaccatcaagaatattcattgcatatccttctgacagtcacatttactataaaacatgttccctgcataagaggacagtgaaaatatcatattggtaattttattatcaaaaagtggatagatatagttaagatgtgttttagagatagtgtcaaccttgtgtttgtgagggtagatattaaggatttctgcaatactcttttcttctggtacatcttggttgtatcctgtagcaggctcatcaacccacttgattggctgaaagtttgtgctaaagctacatagaagaattgcatcttagattaatggatactgtgaaaaccttgaagaatacagtggtgcacatagattgtaagaataactgtaagtaaattaaattacctctcgtttaattctgctactttaggaatatttagattaatataccatttgcatggtgagcttccagttagtgtaaggcctatatatgtggaggaaaatattagatattgttagttacatgcagtcaatactacagtaattgaaagtttagaaagaaatgtacctaatcctctgtaatctttcataagtgttccaacaaacacaacaacttgagcttgagtttgactagcattgtatatctcatcaacatcaaaagaggttgctctttctccccagagtgtgacaggaagagtcgaattgctagttttgtggatttggaggggaaaaagtgatttaattgtaattggaagagatgaaatatgtgagatagtttgtgtgaatgctagcgaaaaagattaagtaaataataaaaatgtaaatatttagctgtactaaactaaccttgcatcgcggatctgtaatgtcctttttaagctctcagcgtttctggacttaggacgtatagtagtgactgcaccaacttcagtgatcacacccataatgtctgtttgcattgcataaaaatttaataaaatgatatggcattgcaaaatatgcatataacaatagttgtaacacaataaaagtatgttattactaacgtagaatgaattcttctcgacaagggaaggaacatcttcgaatggtgtcagtgaaaatgtaataccagtgaaatgaggagggacattaatgtgttcttcaagtgttgtccatttactgaagaggatcattaggttgtttgcaactggcctgtatgttctgtttgcagccttaacagtgaatgagtcaatgtagtaaaccttttcttcctttaaggagaggtttcatattttttgttatagggggataaatttgggcatgtatgctagtcccctgcagattataaatacaaatcatgttatcaagagaattattggtatagtaaggcaaatatagaaaatggatttggcaggtaaattattaccatttcatcgagtaagacaagatcagtgtggaaaatttttgtatcatcgttgagatcagcaaagttccatagcctggagacccttgcaaggattcttttgtttgaatctccaaatgataactgtgaaatcagtacatgcgccatatggaatctgcaataagcagaaaatacttttagtatagacaaaacaataatgctatatatgtacaagaaaatattactaagaagaacaatacataaactgcagcggacaaatcgtatactatgtatatagtatatggtatatgtgaaggaggtatatttattccaaaatatatgtacaaaattgtttcttttttagggtaaaagaggttaagtatggagcggcaaagcctgcaacagaaagctatttccatattacattatagatgttcctgatattaaataagcatagctgcaatcttgtagaagggtctatatggatttaagtacgcacacataggacaataaaaaaactacgatgatatgaatccaagcttactatcgtcaataaaataactaaactatattgaacaacatgcgtgagtaatatagtgatggtctgtatgatcagcataatttaaatcgttgaatacaacctaaaagcaacttaaatggtagatcatcctaattttctgtgcactaccattgagtgaaaactataatcatgcactacaaaatcatatagtcagtagctacaggctcgtgcgtagtttcaatgagatcagtcgttgcacccaaaaaaaaaatactggctgcaactcaactgggacaacaatggatggaacaagtagttctatggctgcaagcaacctatcatcataatgaaattcccaaagaaaagaaggggttggaagcatgagctgtcgtacatcaatattcagtagggaaatatgagagacatctatggctaactacaaaggaagaaagatgaccatggaaagttggaaacagaagctttgaccacatatctaacgacgaaatactgaggagaaggtaagaatatgtatatataagaaggcgacatactatcatcgcaagataaagtcgagaagaaagctatgcacacccatcgacttacagatagtaaaaggaattgttataacaattggtcgttataacagttgtgaccattgtaacttgtaacgtctctcttttcctactaatacccaaaattatagggggaaggagggatcactttcactatatgcacacagcacagaaccatctaattatataaaaaaatgacaaagctagggaggaattgcagttgcacacacataaacttacaggggcacacatataccatataatatcatgcaaagaattaaactaccagagaaaaataggaatgcataaaaacaagaagaagaaaataccttcagcacaaagggagaccgaattgacagggaggggaaaaagcagggaaatcagagcaatatcnactcctaattaaacaataaactgaaacaccaagcttcgcagcaaggaaagagagccaacactgtcgtgcgcaaataaacaaccagagctgcatggtacaaacatcatggttagacactaacaagtttaaatctaacgcataacagtagaagaactcctcagagaaatgccagactgaacagaaggatgaactgaaattacctgccaagtatttccagcagctcttgcacatctgactaaaaataattaagaacctttgaagctccgatgcaacccatgcagatcttctcccctaacaaaataggaaagattaaaacaaatcaataagcaattaagattgaacaccattgaaaggaagagcagcaatgaatcttaatttttgaggattttactttaaaaaaatatgctccaatagacttccaagtctccactgctagcatggagcctcatctcgtcggccctctcttccacgtccactgggcctgcgccgatctggacccgcctttttccctaacatcactctagcctcctgatccgcctcgtctcttgattttcgccgtcgcctgggctgctactaccttcgtctgcaggccttcaccccgccgccgaggggacggcgcctcctcgccgtcggccggggaacgcgccttcttctcgtcgctactggtcgagacccaccgcatataggcgtcaccatcaaatcgactccgccgccagcaaccatgtccccttctctgcctcactcctagtggcaagcacttcaggccagacacctcgagcgaacaggtctcctgccgtcctgcctcattggttcctatgctataagatcttttctttctctgtttatctggtaagaataaggaggaagagagggtctagcagcctagcacggtgagaactgagaaggggttgacctgtttgtgtggttatgctagcttggaacctgctatgcgttggacatatatcaaagtattgctactgtatcagctttttttcttgctcagagagcgttaagggggtgtttggg

SEQ ID NO: 9682 - DNA, 1978 bp, Oryza sativa
ttttttttctttaaacattgtgaacaacgagatgctttatgggtctttctaccaagataaactgggaagagatgtttagagttcacttgtttgggaagcacataaacttagccctcatatgttctcttttgtgaatgactagaatgttgaagatgtacatgactagaaatctacagcagataaacacatttgagcaatgtacacaatttcaatattgaagaaagggatgctccacttgatgacttcttttttatgaaacgctagttggtgatattgccttacaacttgttgcagggttataccatccatctactgggaggtattatcagcaatttgtagacaagctctccattctggatcgcattatttggttaattggatctcgccgcagagaacgcaatgtaatacatctttgttgacatcattttttattgttgaaaaattccaatttaacttgaaaatacactggcaattgtatggtgtgacagattaaagaattagaggtgtgcggtatgccatgctactatcttttttgttgacattatttttgttattgaaaattttcaatttaacttaaaatgcactgtccattgtgctttgcaacaagtaagaaactggagacagcgttggcgtgccctggcaagcaaaattactgtttatgtttctattcttaaacactctaggtattatactgacttctacagtaattgttaattaacaataatttttgctaagcacaaacagagctcaattaaataactccccgtctggattcttgctggtttgcacaggcggtgcgctattggcgcgccgcgtcctctagtttatgtgaaatatcattttatgccatgcttaacatgcagagtagagataagaagacgcgtgcatcatttgtttcttttaagtggcattgttatttctttattttctgcaatgtgtgctatacctatgtggataatttatgattcttaaagagttcggctttccttgtctaggtggctaaagtgtgtcgatccattcattaatcataatatgtggactgctcgggaggagaagacgacttttaccaaccgtccaacaacaaggaatgtttaactggattaacattgcagttgcattgggtactcacaggacacctttccagtgcctcgctcgttatcagcaaagttttaatcattgtatattgagtaaggactgcgctaaagaagaagatcttcaacttaaagctgctgtcaacacctttggtatcaactggtaacttgtatcagctagtatggatggttgcactggcaatcagtgctctaataggtgaaaagtatttttgtgcctttacccttctcttgccgttgacttaattcatgtatcgttttgttctctgttattggttactttctgtggtcatgtcttacattttttttaaaatttttaatgtgctctctcatgcatgggttatagcaatcatgaatatggagtttttttttgcatccgctggaaacctaatggtggtggttgtgttgaatttgccatcccaccactaactcttgatttggtcaccatattttctgaatgaagttacatcatttgtgcaggtaggttgtaataaaactatttttatatgcaggtttagaacttattatatgtttatttgtaatccattacaatgcactgatttttagctagtattcacatgtctttacattgaaactctataggtggaggaaaactttaaaccctgatagctcaagagtgggtagatggtctctcgatgatgataaacgcctcatggttaagttgtttgggtctggaagctgaataaaattgctcagttcattcctggtcacgcacggagtcaatgcaatgaaggtaacttggtagttttaacatttctctccacagtttgggttggatggtaatgatagttatttggggacattaaacaagtatctgaatgttcttgatctgatatagatctttggga

SEQ ID NO: 9683 - DNA, 8175 bp, Oryza sativa
actgaattggttaaggtgtcgatttatatgttttcaactcgcatatagttctttcatgttagtttttaaaaagtttctttcttgtgacatgtctgtgacttaaaaatgatcacatgatgacaatgtgtttggatgaaagtaatcatagaggctcatattttgggtgactgcagcccaatgaatgttgtttctagaagtaattaaatattgactgcaaaaaatagagatatgaaactttcatgttgttattcaatatgtctgaaactcctgtgtgtccaatcaggataagcgtgttgttgccttgttggctgtgtgcatgattgtgtgtttgtagtggcgaattcatgtaaaatatgttcgcactcacttttacattttaatggataaataatagtcttgtatccaagtaatccaatacaatgagatgtggggtgctgttggacttcatatttatgtgctggaggcattggtgcaggtggattttgtatatctgttggcatggctgctcattgacattgtatgcaccctgttttaaacagctatagtaggcagctaggccacatacaaggaacagtcccttgttgttgtaaaattggctggtttggtcatataatcagttttagatggggtgattgaacaataataattgttcattgttcttaaaaatgagtgatgaatatgcatgccccaagagtgatagattcatacacaatttcacatgctttagagttacatcaaagcaatgccatttagacttggtgcagaagggcacaagctcacagcacaattatgacagttttgaatatttgcttatggaaggtcaaatgtcaattgaatagcttgaatatcatatagagttgatcatgccctctgcatatttgcatgtagttgttgcttttagttgcatgttacaccagccatttacctgttatattgtaagatactgtcgctaatgaattgatatttcaaaagatttgttttagacactctatttattttactgattcaggacagtctaggtgagataactcaacctgcacacatatataataatcccaatcatcaacaagcaactctgttgaggcatggaccttcccaatacggtatagaatacatggccctctagctagcttgtgtaatgatgtagcaccatgcatgacctgatcatatctgcaggatgcaactaggaacaattttcatcagtatgctcaagatccaaatgaccgaaatactggacagatgtaccatggatccaattatcatcagtatgccaaagttttgtttaagagatacttgtacgaattacagttattagctgtccaattaatctgtcatctgattgaaaagatccttcatctgatgtttaactacccttcctttcagggaaatagtagctgctacccctctaattattttgaagaaaataatggtcctagagaagtaagattacacgactcacagttctataggcaggataatcaagagtattcaactgatggtaaataaagagcaaatcaagcaactagaaaatattccacatcatattgattgaattttttgtatttattatctagatgatcctttgcctggtattgaggggtttcaaattgttggggagcctagatcatgatttacattaacagcatgtggttaccctaccaatggtactaccctttgtaatttccaggtttgttgtgttctgagttctgattccagattgcaattacttatcttctctattaattgttaacttctgcaaataaaacctctcattatgaaatgctgttgttttaatgggttagatatcttgagaatggcaccaggcagtcaattgaaagtaaatagagattattgctcattctatttgttgctgcttagaaataatttgattgtattgattagctctctatattttgcaattcaggtgctacgatgtatgactacgtggttactgctgatgatgttgacactcttttggctgtagactgcacgcctatggatgataatacctgtcaggttattcacttatctgctgtaaactgcagtacaatgtggttatttcatgtggtcaatcatataatagtggctaagtctaaagagtttggcaacattcattttgaaacttatctctttgctaattggagggagtgtaaacttttagacgtaaagctgggatcccagggaaggaaatccatcaactgacttgggagccatctctccttcagagggggttagaacttttttctgtgtctagctgttcaaattttggtcctgtgtcctgtacatggtattgcgtattaaccccattaactgctttagtctgaatgtgttcttttactgggagtgtgccatcctcaattttttgtgaggctttcagtggcttctcattattggtattctctagaggcttacatccattttgtctcttcaactacatgttaactatatggtttgaattattattttgggtattggaatcttcttggcattctgatagcctgatattgttctgttgcatcttttcatcctttactgcatcaattgggtagcttacagagtacaacccatttttggaagctatttctttattgcatcaaccagaaaaaaaagattaactgagtcataaataactgtccctttgtgtgtttgttggtattcgtttttatatatatctgatatatgtaataagcgtacataaaggttggcacatcggctttcctttttgagcaaagatgtgcttgtgcactgataacatgagtgtgcttgaaatctgttgttaattcatgggcctgaacttctaaacagaattatccacaccacagacacatgaatattttactatgtcagtaattacacctaggaactatgcatgttaatttgatgagccgctcttcttcattgtagggtgaattggttacagagtatactaacaatgggagcaagataacttgcggtgagtttatgatgcatgcgttgctggcttgctgccatttttgggccattaattgaatgaatttattatattggcagtccctgcttcaattttgtttatcaacatatgggaattgttatactttcagtggcacatttttttaaatttattaaacaatggttgtattttaatacaaagtagacaaaggcatcctgttggcaaaagggcaattgcaccttcacaagttgaatctttatgattttgtaggtttcactgattaacctttgacattatttaattgaaatttgaccatagtggaaatataattttttggggcatatttaccttctttgcggtaactttcttgatgtaaggcttgtcatgttgtagcaaaaagaacattttaatatataaaacatctggatttcttttttgcattgctcattttactttcaggactttatttgaaaaaacataaatgcttgtattattgtttcaagcacagtttgtggaaaaatacatgtttgcttacagcagtaaccttattgacactggactggagaacatgttaacctttgaaatctgaacctgggatgtgtgtgtgtggtggtggtggtcaggccaagaagaagatggtgaggctgatacagaggatcatctgggacaagagggcaaggagggccaccacgggacgccatcgacgttctcttcagagacaccagcgatgagctcaccgacgagctcatctccgacaccatgatcgacctcatgatacccgccggggactccgtcccggttctcatcacgctcaccgtcaagttcctcagcgagtgccttctcgcccttcaccaactggaagtaagcctgtaacctgaaacctcttacatgaaaatttttcagcttgatgacaacacaataagctgttactaactggatcaatagctgcataattagatgaatcctgaacagaaaaaaaaaacaaatcctaggaagcaattaaggatcctctgttgttgggcatgggcaggcagcaaaatgggtccagaactgaaaagaggttgattttctttctttttttgtctgacaggaacatgaccaactattcattctgtcagagccatgtgttgtgcatgataatactactaccactgtctactacacacaatggcagaggatctgtgtccccaaacaaaaactatatcataaaaaagcatacgaataagggagagatacgtaggtgggcagaagggatcagcagcacataaagggttgtgccaaccttggtccatacctttcttgttggcatcttagagctatcattattgtttgttatctatgtgccatctgaaaaaagatactactacttgtgtttggaccaatctttgcaagatgacatgcgttgcatcattgtcaatgtcaggtccatacatatcattggaacagagtcgccttctcacaaaagaaaaggcttactatcatgatgtatcatctacttagttttttttctacacgtgtgtaaggaatagttattttggttgaagtatagagggttttttatcaactggggaaaaagcaaggttacataatttgtctatttattcggtggagattagaaggcagcagtaatatttcctagctagcatgtcctgttacaccagtagcattgtgtcatatactagattccatttacatcactacagtgctaagaaattactcatgcgtcgaccgtgtttctgttttgatgccatgtgaacaacaaactcattgaaacctctgcatgtctgccacttttagagaacatgcatgcatattgcggctcaagataaaatccactcagtaattacttgttgtaacaatgatgaataataacaccaatcatattcttatgctaacaggaggagaacatgcagctcaaagaggcgaaaaaccagcatgggtgagaccttgcaatggacagacatgtcattgtcattcacacatgtaagtatagttcattaacactataacataaaatttctatagctctaaatctactggcaaaaatagcacttatccttatgatccatgtgattctttttcatgaccccgtttgatttggaacattggagtgtaggtgataacagagacgctgtggttgggcaacatcatcggtgggatcatgcacaaggcggtgcgcggcgtcgaggtgaatgggtacctcattcccaaggggtggtgtgatcggtccacctcgatgatatgctctacgatgagccctacaagttcaacccatgaaggtcgaaggtaagaaagagccccacatttggtagagatgttcgtcgaattgctagccctttaggcaactccagcatgataaggatttgatgagtggggtttcggtgggactcctaacatgtgggtttacttctatatcaataatctcatgatggatttgacattgccatgtactaacacttgtattgcagaaaataacagagattccctcaaagttgcattagtgatatatacacctaggcagaagtcagttgaatcccccaaaataaatggatttggtagttctttgatctggtaaattcagacaacataagcttaagctgtcaacgaaatgaatacacacctttttttccgttattgtatactttctgtaagctctgacaatgatatgcaaataattaatctaggcaaatgatggtgctgtactactgttgaggcatcctatcattattatttgatttgggaagtctaataatgtgctaattggtcaagaaatcaatcaatctcaacaggagaaggacatgagcaatggcagcttcactccatttggtggtgggcagaggctgtgcccaggcctggatctggccaggctggaagcttccatcttttttcaccacttggtcaccagcttcaggtatggatcaccacacctcaatcttggctattcttagcgcatccattgattccaactccttagctttgtttcgtgatcacttggcaacaatagcatttttttctctctctagataatggaataaaaactacaggctttacatcatttttcatgatcgctcagcaccgtcagcaattatttttctagataatggaataaaaatcacggcctctgcatcacataatgcacgcaatcgggcaccaatggcgtgcatctcatgtccctatcatttggcctaagatagcgctgtttgtgagtcacatccccatgatttcgccatgccctctttgcatgatttcagtttttactaatggtactattttacagggttataaaagaacaagttgggctaataacatgttatttaaacaattttgaaggatgtgtgaccttttcagtgaggctttgacatgctgccttttctgctgaaaaaacaagaaaaaaagattttgtagttaatagttcattagttagtatgttggtgctctcttcctgaataacatgagttgttttggagataatatcaagattgtattttcctgttatttgaatcacaatagagttgctgctgataaatattataaggttatcacattatttatcattccatttttcttaatatttttccaatgccaattaaattggatggagtgtgtactgaatggactgtgtatatatagctcattatacttcatactctttggcgcatataatatggcagctataccatttgatcaagctattgaataccctgtggatcagtcgttgccacttgacaccaattgttgtttttttttgtttgctatctgctgtttgttataggttagaacaaggtagcaaggactgaggctaatggtaagaggaggcagaagaggaaatgagctaggactgcggattccaaaaatgtaaagtttcttgaccttgttctgccttgttatctgtttattcattgcaaactctcgtggttgcagcggatgtatttatttaggacagatagtaactggcttttatatttccatgcatgtttcatctcatgggggttcatgttaatttaggatcatagtaataattagaatacacatgcattccaaaatcagtttaattgatttgacaacagaattctttttagagctttaatgaggaatgtaatgaatgtcccagcccttagtcatagaagagatgagttattttctgtttcccattttctaaggcctttgaatataatgatggatgcaaacctacaggcaagacattttagtttgtgacaaaagggaagtagagtttagttgggcactaggccaccaagatttgcggtataattggccatatggacatgtcacctaaattatagcagtttatttggatttattttattttatttattattattattatttgcatttggtgtatgtacatttttggagttacaaacaaatatggaattttggtacaagaatcctattactcttattcccaatagtatttctattgttggatcgcatgtgcacctgctgaacaccagactattccatgttccagtgattctgtggagtgaccaagttgcagctagagaacaagctccatacctcctcttccattgggtgcctcctcccccttgtctccctcctgtttgctgcctctatggcaatgcctaacggagtagtggctggtggacgagagaaaatggagttgggggcaagtgaggactgtgatggtatgaactattcctcatcatttttcaggtattgcctacttctctccaattgttaacttacatgtcattctttacatttagagtgtttcttatacatttatattaccttttccccttgggcaaatctttagcagcagaaaagggatcttttctttatattgtcgtttcatggtgaaataagacaactacttctaatttgcctaattcagccattgcttggttaaacaaaaaggcattaatgtgggagcatggcaaacagttataaagagaatatagatctttagaatctaaaataccatccattgttaatatttgaattgcttccttgcactgaaagtatgcatcgcatcaaggttagtagtctggctaatattgctcaattgataattcttgataattaatcgtgacgaccttatagaatcttgacttttgtttcagaatatggataaaacatcatgctgcaactttacctgctatttggaaacatagagactttggatatttcttcttattttaacaagaaagacatcaacttttttcccctgaattttttcatccagatctactcaaacctcaacattt

SEQ ID NO: 9684 - DNA, 14257 bp, Oryza sativa
ccccgccccgttgccatccctagagttcgccaccgttgacgcagcttgcctccgcaccgtcggtgctgccccgaaacatagggttatagcaaaggggatcgagtgtgtggggagtgggtcgggtctggttggaaccagtggcagtcatctttacaagccgaacgacccgtgggacaaaatggtactttcaacgttctttctctctccatctagacgtgatataataaaataatgcgaggtgtgtctagcagctaataccacatttttgcggtgtccacgaaaagatacgtgttctttggatgtctcatagcaaagaccacatacttttagtgtcctatagtaaattttgcctttaatatatctagcaattatgcccatacgttgcaaaaaaaaactaaaattatacggagtagtaaacattagatgatttgggtatattttctatgatatagatccatgtcaattctatgggttcaacataaccttcatcacaatctaacgcatagacatgagcaatgcaaataatcctaaagcaaatttcagcaaaaggaatagctaaaacggagatacaacaaaagaaaacggataaactgaaaaccgaatagagattcatatgacaacaaatcatttataatgttagaaaattggaagtgagaaaaagcttgtatttatttttatttaaaggggcgcgataaaaatattggcaggggtaggtagacaaaagtgctaggggcttggacttgtagagtcactgtcacaggcagacgatagagtgtgaacgacgaacgaacgttcatgcgcgagaaaactgcctatctaccattccaaaagaatggattcgttgaaataccatcgctaaaacaggcttcaataaaataccactcttaaccacgatgtattagctgaaatgccatcttggactattttaccattggggttcttcttcctcccccaactcctcatcttctagttcgacgccctcggtggggcggccatggatgaaacgacggcgctcgctacttacagccagccgacgcggtggaggcagtggacggcgacggtgacgcccgttacttgcgcacttgcccgacgtccttggcggtggtggtggacggggatgggggacggcgacgcctgtttcttccaccggtgcttgtttagcgccctcgcgaaggcggaggtggacggcgacgacgccctcggtggcggtggtgacgatgatgacagcgcccgttaatgttgctacttctgctcttgcctggcccctcggtggtggcggtggatggcgacggcggcggcgaccgctactcccatgccagcccggcgcaatggcaacggtggatagcaacggcgccctcaactagcggcctcggtggcagtggtggacagcgacgatgacgcccgatactctcgcgcctatgcccaccactactagttgcaaaactcttctcctcgtcaactcagctcttctcgcagccatgggcaccagtgatgtgtatggaggaatacgagcgaggaagaagtccaggggtaaaaatggtctaaggcctgtttagttggagggactaaaactttagtccctaaagtaaaactttagtccattcactttagtccctaaagtcccaaacaggggtgactaaaagagaataaaagtgtattagtcaattagtctctatgggaggagcgtatagagactaaagttgcttctttccacccactgccccacgcacaaccctctctttgcatgattttagaggtaacatggtccttgtacagtgtaattaatgacctttagttccttttaatccctacatccaaacaggtatggactaaaggatccaaacaccctctaagatggtatttcggccaagtagtcctaattgagagtggtattccatcgaaacccattttagtaatggtattcgagcgaacacattcttttgcaatgacaaatatgcaattttctcatcatgcgcatagcgagtcaaacaaaggacgaaagattgacgaatgtacgatgaaatcgatctggacttgcgaatcacaatgatgatgttcatgaagtcacttgatgctatatgcattttatctccaacaaaacatggacttttctactgtatgttctatatagcatacaattaagaaaaccaaataaaatatagtactctgtttttatcaccatgcatatcaaagtaacatcagtgtaattaacaatacacgtttgcttacaaaaaaacatgcacgctagaggtttcataagaaagtcttaattaaaagtcatagttataatgataatagcggcagtcgatgcatggttctcttatctagctgtttcaatcctgacaaagaaaaacgcccatcacaacagtaccaacaacgcatccagaagcagccgccgcaatcacaatcctgttttgcctcctccgaaatgccaccatcggttccgctaccactctttggatttagaaagagtaacaaaaaaaaagaaaacagatgttatttcaataaaatatacagtaaaagacaattacaatgcttttatatagcctcttaccgtgctctctcattgatgttctcaaacataatgcgagcgtcctcctcagcattatggaaagtaaggggcttaatcttaggatttgtgttgccactcaacttatcctacagttccacacatgaagagtaaatataagttagacagtggcttatcctacagttccacacatgaagagtaaatataagttagacagtggcgaatccaagatgaaaatggaggatagactcaaaattagtgaaaatactttataaataaacaataggagtgttaaaagtatatagtgttatgcaaatcaaacttaacatatactacacgattggatgggccggagaaaaaaaagaacctcaccgatacatggtgtatccactttgccattaatcaaatacttttcaaaatacgcagaacaaatcactaaatagcctcatttgatcactactatactttttattgactgcctctgttcaatcgctgtggcctgtggataaaaagcatagctcatcgttgttgtcatcattctctccagcgcaactccaagccgaatggaccatcgttctcacaagagatgggccaaattgggccacctgctgggcattaattttccccaaccagcaggcaacatggcagcaatcaaaattgaaaacccaaaccctataaccaatttgagctgcctgctagcgtcataaaaggggggccaattaactgattaatcagtatccccgcaaaaaaaaaaaaactgattaatcagtagataatgagaaacaatttttttgttgggatagggcgatgcctacgctcgcccctcatgtggctcctccactgcaactcatgctcatgcagagcacacctttggcataaacaaacggaacatggctgtgtatatacacctttcttggtgtagagtctgggttttaatccattatcagaaaacgaaataagttaccttcagaagagacaatctaataagatcctagaacaattaatagcccaacattgtatggcccgggtgaatcactaaagccgcagctatctctccccaaccctctacagcccaaccatataccaggttagagcagctaccaaactttcagtattccacccctgtttatatctcttgtaaatccacccccatccctccctctctatatctgtctctctcaatccttctttctttttataaccttgcaaccttaaaaaactctgtaaacctcatttctatcaattgaatgactacaaggtagagccggctctaccttcttacgtcaaaagaatttgaaaagttcatattttttttctcgcagggtgcagaaataactctacagggatacgttgcagtcacatatggttgattataatcattctcaagacaaattaattatttttgaaaaaaaagactgatttttttctcgaaactaaaaactcggcgaatcggggtctaattaaactgcatggggtgattgaatagggaagacaaagataattagggaggaggaggaggaggaggagggagggggagaaggggagggaagacgaagaacacctcggggtggagggagcgcgacgccggcgcccggcggagggtggatgcgaccagcggcctgagcttcccggcgagagagcgcagcgccttagccatgccgacggcttccggttgcgggcgtcaagatctcgggagggagcgaggctagggtttcgctcgctttcatcttctcctttctccttctccttccccttcccctcccttccccttccgctcgctgtcgtctgtcgcgcacgcaccaatcaacaaaacttacggctataagcccggtctatagaccgtggtcccaccagtcagtccccagtctatacaagttgattagagaaaattgcttttttaagcctccaaagttaacgtttttagatacttttccctctgttttgtttatatttttttaaaaaactagcaaaagtgcccgtgcgttgcaacgggtgattacggagtgtgtatattaaccaaaagtgttgtttggtttatcaaaagtgtctgtgcgttgcaacgggaagcgtacagatcagaaaaatatgcaattaattaaaatacaaattcgctgaaatatttggtatttttaagtaggtatgtgtataattaaataaatttacaagtaaagcaattgtgacaaataaaatgacatggttaaatttaattttattaaattctccatgattagttaacgctcttagaaattctattggaattttcagagcttaattgttaattttcatttaacaattatttaattggaaaaagaaagaaaatacttccttttaggtttgcttcgaaataaacacattcaacaactataattgtaatgcttctgaaaaaataaagtactaaaaatgaacttcttctctttttcttcggcccgagagacctaaaatagacttatttccgtcccttgccggtcggcccatggccttttgtgcacgcgcaggcgcagttcccctctccaagccgcaacctgggcttgggccggaaaagtggcctcgctctcaatccctcttgggccgatttcggcccggccgacaccggccgtccaatctctagggtttagatcggacggccgagcgtcgagatcggggaaacaaaaccctctccctctcctcagtcgccgaaaaaaccctagcccattctctccccccccccaatcgacccagccgccacccccgcgcccgacgccgcctctccccaccggcgacaccgctccctctccccatctcccgcctctccccctcacccaagccggtcacctcccccgtcaccggcgccgtctctcccaccaccggcgccgcttctcttcccttctccctcccttctcgccggcatggcgcacaatggcggggtacggcgtcagcggcgtccgcgctccctctcccgctctccttcccgtctcgccggcacggcgcagctgcggcggagacggcggcgacggccgtccctccccctctccctctccccgtcggcctagacagcgacgacgccttctcaacggcggcgtcgacggcatcggcttcgttcgcgggtggatccgtcggcggcgtcggccactgtgggtggatccagcagcggcggctccctccaccgcctctcttctccctccggcggcggtggtggcgtcggcggccgccgattttttttttttttttgcaatttttttccatggctattgctaaccgaatcggattgcgtacgaacgagacgaaaaatagatgtgacgaaaggaaaaatacgaatatttatattagttattatagatatagatttgtataatactattgtcttatatcctatttgtataataccatggaggttgaacttgcatgtttgtatagtgatatatcacatgttaatacatcttcttaattttttttaatttttacccagtgctaagtgctataaggctgcatatgattctttgttatgtgccgtgattctttatactatgtatgtatatatgcacttgttatcttggtgatgccaaccgaataggacttggacttgtataattcaaaccaattcctattcggccaaaacagaaacaaagtcctagtcagcccaaacggaaatggattggagtttgtttcctatttttatggaatcagacagattttttttcccgatttttcttttaccgcatcgatggaattagattcgatttgttttttttatcacgtcgcttttttttaaaccgtgccacatataatatgatttgattttttttaccgccacatataattcctttttctttggaatcagactgtttttttaaaaaaatttcgccctttttctactgcgttgacagagtcggattcgtttttcttttcccttatttttgccatttttctggatcggacagatttagtttttctttttttttccggttttttcgtccggtttttttgactggacagatttggttatttgatttgatttttttaccgcgtcacatgtaaatccttctttggaatcagacatattttttatttatttcgccctttttttaccacgtcgacggagtcggattcatttttctttttcgcctttttattctggatcgggcagatttggttattcttttcttttccggttttttttcgccccggtttttgggatcggactgatttgttttttttctttttttcgcccggttttctccgtttggtttttcttttctttttccggtttttcttcgcccgttttttttgatcgaacagatttggttttttttctttcttctgtccggtttttttcgctcggttttcttgatggacgatggaagtacctcttattttttaagtagtagagagatatccgtgtgttagtaaactaaaattataataaatataaaaatattatccgattagggtttagttttacattatatgcgccctttaataaaatatattcgtaaagaaagaaagaaattttataaaaagaaaagaaaaaaaacgaaaggtaaaaaaaaaaaactagttgtacctcaccaaccagctagggcatcgcgcagcctatgaagcacgcgtggctgccaagggtggaggttcgcagcgaagatgctgtggtggtggtggcttcctcacgagatagggtgtgatggtagcttgacggaggctgtggaataaactgactaaaattgagggggtgtttatatccaaatttttgacatgtcatatcatatattatatggggtgtcgcatgggatatttgggcactaataaactaattatagaatctgtcgataaaccgcgaaacaaatttattaagcctaattaatccgttattagcaaatgtttattgtagcaccccattgtcaaatcatagagcaattaaacttaaaagattcgtctcgcaaattagtcgcaatcagtgcaattagttgttttttagcctatatttaatactttatgcagatgtttatgtttaatgtgacatagtgaaaaattttgggtgggagcaagacagagcctgagtgccagtaaacaaaattgacgagcaacgtttcttgagtctataagagctcagttgtagagtacatccccggttaacatctacttccaacaaccttgtgtaccggttcagaaacaggtcacatacacatctacttacaacctgtgtatcagctcataaacagatcacaatacagggaacgctgattatattttacggagatccctgcagacgataatggatcaccaaactagcaaattaattcaatgctcaatgaaaattcccattttctaaagaactaaaattgattttcatgtcaatttttcactccagaaaccatgagatgcgctgttcattgtaaggcaccacacagcgcgtatatatatacagtacacatgtatattccttccttccacttccagaagttgtgcctatcaatggcaataggaaaataccatacacacacgaagctcccttcagaggtttagaggattgctttctgcactgaaatcaaggaaagttgtcggtaccatattatcaccacaagaaagcataccgtatccaaagttcagacctgatattcatcagaagtttaagaagtgttgctattctcaacagaaatgggatctgctccagaaggaacggcaatagctgacccatcatcagaagttcccatttgtttggaccatgttgcttaacagcttgacactgaaacagaccaaaaaaaataagctactaggttctagtaatatgacaaaaagaaaaagaacaatgctatacgtacgactgttccatccgaccggcgtacaacagaatggcgtgaggcttcatatgacgttctacttcttgttgacgccgtgcacttcatagtcgtccaaaaatcagacactacaggtcgtgtgtgtagcatttttgaaagaaaaattgccatacctcacacatatagtgccttgcaagcctgctggatgcatttattggagcgaaggacatgcaatcggcaagatgtgtggatgtggaacattttgtccacagaatgtctagaaagagatcaagaaaatcagtccaaagctcagttgacccttaacaaccatccttagtcgacattcacatgccctcaaaaaaattaattataccaggaaagagttaaataccttggcgttgacttgtgtcaccaattgctcacatttctcatatcagcatctctttcttcagaagccatggtttgaagctccaactcaaaggccgcattagccatgctgtctgctgttgagttctctttggctcatttcatgtagagaagagaaaataatgcttattggtataacttaaactcttggggaaacatatcctaattatatcacttaagctccattggaaaagacacgccaaaaaaaagagtacattgatggtgctctcttgctttccagtacaacaccatgattatcaatagactcagcctctcattcactgtttggttgctccctcataagcacgtgagaaagagcccctcattgtctcattgacttctccctctttaccagagagagatagtgcccctccttctcttcttggccgtgccttcaccaactgagatagaggcattctctatgacaacctcatggtcatcagagatagaccccctcattttcttttctgcaacttgagtttgtcagtactagatctctttctcttcctgactccacaagaacagttagaagagttgttgacatcatctgatacagctagactttcatcactttgctttttagatccacttctgtaaaacaagcacaaaagaaactcgtgagatatgagaacaggacatgtataaggaaaatgaaaaaaattcattagagccaagcaatgtaacgttgtaatgtcagtcatacctagacgatttcctccttgaacttgttgtggctgtgttaactagtctcaccatcaatagattcagaaagagagattcatagaagctgaagaatttaatgtcactaggcaatatattgtccccacatggtattctagaacgttttttggggctttctcacttgaacaacgttaaattcctcaagatctatatctggattccccaagatctatatctggatcacgaacactaggccacctgtttaacgataacaaacaactaccattatcatccaaccctaaactgtgtagtaaaatattaaaattactaatttacctttcattgcattgactctgtgcgaccaggaatgaactgagcaaaatcttattccagctgccagacccaaacaacttcacaggtaccatgaggcgtttgtcctcatcgagagaccaactccccacttttgaactttcaggattcaaggtttctctccacctaccaagtttgatgacatgtgaaatactagctaaaattctgtacgttagaactacctaaagacatgtgaaatactccgatagcacatatagacagaagcaaaaatgtgcaaatttgtaaatgatactccgtattattctactggcctgtcgggtattcccagtcaggtccctgtcaaggactatttccctgtcggctgtcccaatatccctgatggtttttggccgtcacgaaagatacagtttcaggtagtggatggataatttagccagatgcccatcagagcaaacaccaaacattgattttacaggccacgtcattgggacacagaagcattacaatctttggttatattttcacatccttaaagcatataaagttgtcaatatcatcaacaaaaatatttactagcaactaataaaggataaggaacactaattaagaaactaattatcaaaataaaatatcaaccaaaactaatgagaaataccccaacagtgcaaacaattaagcaactcaacatcaccttcctcatcgagtccagaatcattgcttcttggtattgttgctttattcctttaggctagtttgtctttctcatcatctgaccactgttgcttctgaagtaacatggggaatacaagggtaattgcttcagtacatttttgtactttgaaacatgagggttattggcaaggccaagaaataatgcagggacttcttatttttattctgcaccaaaggttgcttctttgtaagtacatatgcttcttgacagggaaaatatctaaagcaattagttaacataactattaactaagaggactgtcgatcttaaaattgaaattccacaagtttctaatacaactcactatgtaaactggaaagtgtacttcctaaagaccagagatccaccataacaagtatactgatacaagtttcgattcatatagaactaagtgaaactgatgatcaagggagattaaaacagatgaagggcatatattgtcattaaagtggcttgaacaaagatatgctctctttcagctcgtcgaatttacaagaccctttttgtggggccaaaacatataactttgctccatttttattaataaattcttctctacattacttccatgtaggcatgccataaaatgctatttcacatgaatggggaacctataacaatatctaaaaacatttccatgacaacagtgaacatatcaaacatttcaattatagggtaaattctaactatgttacagatttataggacaaaatagtacctgcaccaccagcaaacaccaaaacgagccttgttatcacatgttgctctaattccaagctcactaacttgttcatataggagtatacaaataccttcgtgaagtaggagaatcacttctgctatgtcaatctcgtactttggtggctttcaggttgaaggcttgtttaagtataaagtgataaccagaggtacctgtattaagcaaatcaaaatactaagggctcaattgagtataataattcaacactcttttgctggatcaggaatgcgacaaatattgtattcgaacaagtatagtagtttgtactttgtacaggttttattcacgtgttagaactaaggtctcatgataacagcatatgtagggaagcacattccgtagcatatgatataatcgagcatatccgcaccgcccatggaatggcctggacatacctgtctggctgtctccaagcaggtctgcaaccttgtcgtggcttcaacaatctgccatttgggtgatggaaagacgatgctgttctgggaggataaatggctgcatggtgcaaacatccaggagctggctcctgccatgtgggagcatgtgccctgtgccgaagtgcacacgaaagagaactgacgcagaggcgctacataattgccaattggggcgcctagagctcccctgatgtatctcaagtatctcaacctttgggctcgagtgaactcaatcgttcttgagcaagaacaggacaacattcttgagcaagaacgggacaacaccttcagctggaagtgggagcactcggggcagtactcacctgaatcagtttatgccacacctgttccttgggaggtacaatttcccacatgcactgatctggaagaaccatgtgccacccaaatgcaggtacttcttatggctagttgctcacaggagatgctgcatggcggacagattaagaaaacagggtcagccaaacccagcgaaatgtgtcctctgtgatcagcaagacgagacgatcaaccacatcctagtcggttgcgcagaatcatgccaaatctggtggctcatcctcagcgtcaacaagcagccatagtgcttcccttccaacccgcagccctttctctggtggtggtgcgacagcaggaaatccatcaacaaggcggacaaagaaggcttcgacacggtggtcatcctagcagcttgggacatctggaaggaggaaaaatagggtgttcaacaatctgtcaataagcttaggtgaagtagctcatgatgctgcggaagaagctgtgctctggagctcaatcagaacaccaacatagtgtagctgcgcactggtcaagaggtcgctaaatttgttgcgagagatagccctatgatcctcgtttgttcctttcttttcacacttttacagaagttgaaatgatgtataaactatcctagctaaatacaaaaggtacgcaaatgttatgcatattccaaaaatatagtttactccatgttgttggtctttttaaaatttcttactacactagtcctacacaattcagaagagtaaaccctagagatgtcatgagaacaatatcccgatgccttagcatattatatagaagacgagttgaatagggtaatttatgttttgatcaaaaatcaactgccttggaagtttattccagtaattcagattgccaggtcatatcataccaatattcacggcctaagatataatttgattagtacaccacatggtacctatcttcgagcaagagcatgccacaaacaaatggacagaaattaactcactggagtgttagtgcgagaagaggcgctgtatcacgcggagcgtcatgaggtttgcatcctcgtcgcgctgtatcacgcggagcgtcacgaggtttacatcctcatcccccaagtcgaagggctattgcttgatggtgctctgtattgcttgtacaatgcagttatcagtagcgactgaacccctcattcgttgtttggttgctcccttctgaacaccagagatagatcccctcattctcttgttgacttctccctcattaccagagagagagagcccctcattctcttggccgtgccttccccctcattctcttgttgacttctccctcattaccagagagagagagcccctcattctcttcttggccgtgccttctacaccaacagagggagagccagtcttctgtttcatggctacctcattatagacactgatagaacaacccattgtctccacgatggccttattattaccagtggtagacaccccccatatttaaagatgcacttcataatgtagtggcaagaggtgtgtggtttcaaccccgaggtcctgtgttcaatccccaacacactcacaatttcttcttaacaaaatgtttggagggacgtctctcccctcccaatatcgtttttgaccccccgccccctcatttttcttttgcacaacgaacagattgctttctcttcctggctccactagaacaatcagaaaagttgttgatgtcataagatgaagctagatctacttctgtaaaacaagttctgtaaaacaacaaaagaaactagtgagatttggaaacataacatgcacattcattagagccaaactttgtaaagttttaatgttatgaatcatacctagatgattttatccttgaatttgctgtagttgtgtttagagaagcctcggcatcttcagaaagtatattctatctcgtcaaaaaaaaagtatattctagaatgttttcggggcttcctgacttgagcactgataaattgagattgatgaaaaacagaacataaattatcgttttttttgtgctacacactcaactattagatagatttgaaaaatgaaactaaataaaagctgtgcctcacagcgttctcatcacttccatcaacttcggagtgaataagtgacattaagtaactggatataggatttaggcctttagggttcagcaggtcgctctgtttctctatcaaaaagttggattgaaaaatggctttctttatttgttgagccgccttaactgaaggcaatttatcttgac

SEQ ID NO: 9685 - DNA, 29766 bp, Oryza sativa
cccgcccctttgtgggtccacctggccccgtcctcggactggtggccaggtcgaaatcaaaccccgtcctcggcccctccggggccccgccacccgagcgggggcccgctgtgacgggaggaggcagcaggtggaggcgtcgccgtgcgccagcaggaggaggcgtggctaggcggacgtcgtgcggcgacggacggaggtggtgcagcgatgggtggaggtggaattgagacggcaacgggcggagacggagcaaagacggcaaggggcagaggcggtgcagggacggcggcggcgtggcaacgaatggaggcggcgacaggcagtggcatggcgatgagcgaagtcagaggcggcgcgggtgcgcggcgactagcggatgcggaggcgatgcggtggtggctgtggaggatgggtgaggggagtgggagtaagggatgtggggattgagaaattagggtttagattttacatgactcacttattgggccaactgggcttgtattgttggaataggctacattttgacgcttatcttatactccggggacccgctgggtcacccgcgagtggctgacgatagatctccgcccccgtccccgaaaacatgcggggccttgtccccgctcacccgcgggtgaaaattggcccccggccccaacggagaaattgccacccctagcaagctctagtcagggcagtggtggattgaagcggtacggggtcagcattgatagagatgtgagctcagggtcgcaggcgatgtcgctggaatgtcgtttcccaggaggaagtcgcccgaaaagtggtgacctagggtgaagaaaacggtgggcactctatcttgctgcttgattcttccccgctgcctgaatagccgtttgattctgccgccccgctctcctcgaatatgaaagcgccaattgaatccgccgtcaccacagccgccctcactagtgctcgccaccctcgatgcagctcgttgcaacactgtcatcaacgcacctaaacttacagtttggaggagaggggatcatgagactgaacgggcgaatgggtctgcttcaaccttcaaacatgtcgcgattgggttaaacaacattggcccaagggcaaacttgccttttacttaagtttctctctccatctagcccgaatataataaaataatgtgaggggtgtccagcggctaattatcatatttttatgatgtccacgaaaagatatgcgttttttgggtgtctcgtagcaaaagccatagatttttcagtgtcctatagcaaattttgccaagatcaactccaattaaagttatccaggaagttctagtgatatatatatatggccaaattggtcgctcagcatggcctgaccgacacgccatgtcgtgctgttcccacacgcgggttgcacctattgccaaaaggcatgatgggcccaacgtgcttgtccttggaaaaagtctattttacctccctcatctctttgcaccttacatatggctagaataaagtctatattgcctccctcatctctctgggccggccactgacaagctatggcctacaggagtggaggatgtcgggtcgcggttatgcttatcgttgggccatgctgggccgggccggcaagtcataccgaggaagaggcctaggcacgacccaacgattaggtcgaaccgacatggcccggacaacagttaggccataccgtgcttaggccgggctaaatctccataccatgggccgggccatcgggctgtgggccttttggccaactatatgtctgtaaatctaaaagtaataagttcactttgggtccctctatttgttgccagtccgattttcgtcctttgaccgcaaaaccaggtatgacccgtcctccaacttacgaaaaccggtcaatcctcgtcctatggcagtatggagggcagtttcagctgagctggcgtattgagcatccgacgtggcacgctgaccactgtgggccttgttgactgggagtggcagttggtgtggggttaaatgagacggaaaaaagggcgcgtgtatttatcacttctcctgttctcctcagccgaaaaccctagatcgagcttgagcgaaacggcgggcgacctcgagggcggggaaggcgtgaggcggcggagggctcggggaagggcggtgcagcgatggcgagctcaaggagcgacgggtcgtcttcttcgtctcgacggcctgctcctgtcccgtatcgggtaggtccaatggagtatcaacccccggtgttctgtcgttgcaaggcgaaagcagcgagatggatatcctggagcgtagataatcctggccggcggtattttaagtgtcgcaatgctcaggtaagcagtcgatttggagtgatttggtttttttggttcgattttggttggatttggtgagttcaatgttaggttttactgttccaggatgggggatgtgatttttttgattggtgcgacaagttgacgagcagttttcttagagagttgttgaatgacctgagagatgctgtgatgtcgcttaggatggagaaggaccagctgcggcaggaggtagaggagtgcagggagcgtctggtagaggatacgaataggattgaagaaacaagggctgagcttgcagcagttaggcaaaactgctttgaaatttggaaagaattgtgttgtgtgaaagataggaatagaaaggtggagagagagagagagagagaaatattatggtaatatgtagtgtggcatgtgtgtttgtgttgtttgttgtcatgtttgggaagagtataatgtaggaaagctggaaatgtatgaatgttgtatgagcacattttgtatgctgtccatgtatgtatggatgaaccccccctggcaatgtatgaatgcttggaccttaatgttgtcttttgatgaaatgctaaattgtgtgaggtgaaagtggcattgtgtacgctggacttgtatgtcaccatttgcaatcttgtgaagtgatgaaaagaaatggctgaatggttgctattggacgaaagtcacaatttgcaatcttgtggtcctaatgaaaagaaatggttgaatggttgaatggttgctgttgttgttgacgggggatacccgtagacaggatatagagggtattgggggtacgttggaacgaggatctacgtagtacgacatcaagcaaaataaaagacagggattatactggttcaagcccctttgtaggtaatagccctaatccagttgatatgggattatatgatggaaatcacagattacaaagggaatagtgggattcgatgatatcgacgagatcgtagtcgagttggttcgactagatcacccggcgacttggctcctgtaggctccggctttgtaggctgtggtggatgtgttggcagtgatattcgatgacttaggtcctacccggggggtcccttttataccgcggatcaattgatctccaagtagaactcggagatatcggacccctcacgatatggtaacgacccagttttatccgagtaggattctttctatctgtggacttcgtttctattacgtgatagatttccttaccgcatacaggaactatccgtatacgcgcgggtataccgtctcggtatacaacgtatatccaaggatagagggtataccttatctgtaaccttgacagttgtggtcctaaaggaaatagttttgacagatggaactcaaaatttgtcaaatgaaatgaaatgatatatatttgacaaatattaggatggaacttaaaatttgacaaatatcaggatggaactcaaaatttgacaagtatgaagcaaaaatctgcatggaaccgaaatgtttcacatatagcagcatagtagcaatttgacaagtatgaagcaaaagtctggcaataagcacataaatatgtctgacaggggttcatacaggttcctaaatggaagccaaacaatacaaaagacagagtacttgatacatggccaaacatcacagccaaacagcacataaggttgcataacatctggactaaacaatagtactactggatacaagggctgcatgccctgcaacacacatgttgcataacatcacaaggttacaatcttcatcaaagtttgtcagactcccatggcaatagcagcaaggcaccgcttgtcttcctccttgatttggcatatgcaggttcctcagctgacacgcagatagaagcactccctgaagtgactctcactgatgcactggtagaactctgtgaataaggaacaattgcttgtagatcaatcctagctgaaccaccatgttgggcagaaaccttggccttggcattcaccctcaccttgttctaggaatccataggagtctgcaaaaaaaccagtacaacacatattgaagtaagacagtatgacacacagcagcagtaatggtatttttcatgcatatggaagtaaaatcagtgcaacacaattacctttgtcttagcttttttgggcatggtttgaaggcttgaactctgtccacttagtgcaactgacttcctcttctactttgagcatagctttgagttgtgttagacagaaccaggttctgattctaaatggatggtggctgattctgagttgttggtggcttagaacctcctgtgctaggacccgtcccactattttgtttcccacagcgggacttattgtgcccaactaatttgcatttgctgcatctcagccttgtgccaaacctggacatttttgtgggctttgctggctcatgcatctctctccttctctctatctttggctttccaagcattctgatatacccatgagcagtaaggggctccctatcatcctcaggccaggcagacatcccttctactggctctaggcaatgtgcatatgtggctttgaatgattccacagagtagctagtggcaatgtaatcatctaggttgtttgttctgtagtagatgcatgcaatcgcatgaaggcatggcaacctagccaactgccaatatctacaagaacagtctctcatgtctagttggactgtgaatctattgtcatgatgtttgatctcaaatttattgtcaccattgcagattgcatgacagaaagcagactcaatgatgtacacattcagtttttttagtatgcctggacaaatcacagtggtccatctagttagcttcttcctctgatcatttatcctaaccattactttccttctaatggtttctagcattgtgattatggggaaaaaaaccttgcttccaatatccatttgttaaatgattcacacatattattgtcaacagaatcacaattggaacctaacctgaaccaggctcggctccagtgctgtggatgggtgttgaggatggcctgggctccagcctgtgtaacttgaactagcttggctcttgcaagattgaaaagcattctacatggggcctttgcacatctccagaacttcttctggtactgcttatcagggaaatgtctcttccagtttgcatagatatgcctagcacaattcctatgctcagcttcaggggcacatttctcaatagcatttagaattccctacataaacataaaagttagtccaatagaaaacaccactgtgctcccagggttacttcttaacaactcaagctggtagttgaacagcttctgatactgtccttttgtggcatccatctgtttcttcatcacaatagactttgctctcttcagcttggaaatagaggcctcagcaaacatctcttcttgtactgtggccttcatgtgtgacaagttccatgaagggatggcagctatgaattccagtatttctcagctatcctgccagttgtgacaattttattatccctccttggtggaccatgcatgcaaactctcataagtcacaatctgccaactatctgaccttgagttcttggacaataaacacacccatggatagctatcccagtcacatgtgaccctaaccctcttgtgatcatctttcataaaattaaccaccttcttttcagcaaggacataccttgtcatggctttcttaaattgcttcttgccattgaacttcatgcctagttcaaatacaagcaccccttctctcttcttgtacctagggtgctttgtcacgcccagaaatttaacccaaatttccagactattttgcgtattaaatccctgtccaggaccagccagggtacacaaaacgacaagtaatatacagttccaaacgtaaataaagcgtaaaatacttacggaagaggcacttagtcctcacaccgaaacagaacgacagcagcggaaaaaggcgatcctagcggagcttcagctccactccacaggcaaaactcaactggggtctgagccttggtcctctaactccatcttcagctcagaagcactacacttctgaaaagggggaaataatagcaagactgagtacaaccaccgtactcagcaagccacaccaacgatgcagatgtgcaaggggatacaaggatggtttgtggctatttgcataaaggcggttgtaaaacattttattgagcaaaacagtaaaactgttgagtaattaaagtaacattaaatctccactgatcaacgctacaccacgttgaacaggcccaaccaacccacctgaactacaatgtattgggtcgatttattaagatgggactaatcacggtgaatctggttgaccgcccataaccgcgggctcggctattcgaatagttttactctgatcagaggtgtacaactgtacccataagacacagccccacgacacgtttccgtgcgccgacatgccaccacgacataccggaaagaggccgtgacaggacccttcgcataaccccctctagccaagcacaccacacctcaggtttcacccccatccccagcgggcaacgggcagtcccctctcgtgcctaggtgaatccggaagcgacagaggccgtcgcagggcccgccccactccattacgcccacccttgcctggatgcgtcgactagaggaaagctacactacaagcccagccgttgcccacgctggcttgtggtaagtatgataagttctccagggcatcccgcgaaccggtccttaactgccatgggtgcgaccagcaaaaccatgcacccacagcccaccattcagtcgcattttagttggataattacgaccatgaagcatggccagatgtctcgagcacgcagctcatttagatactaaaaggtctaatacgataattaccccatcaactgagctagtggtaattaagcatggctaagcatatagttctagctaggtcacataagtaacatgagctagtcgatttattacccaaggttgacaaagaacagatatcaagtaaacatggcacaagcgagcagataggtaatacccggatcccatgtaattagcaaaacatgcatatttatttgtaaacggtaaaacatttataaattgggatcaacatgctcaaggggaatgtgtgacttgccttgcttcttcaaacaatcttccgaactcttatccttgcgaccgtgatcttccgaaacgacggattctacacgcaggcacgcaaaacgaggaaaaactctaataaaaaccaaggaaacagtacataaaaagtaaacaaacatgtagagctcaattttagatgaattttgcaagttgaatggctcaattcggagttcgaatgaattagatatgaattttagaagttttgagccatttaaatgaatttctagaattattaacgaattatgacgcaattattatttatttttccaaaggaaaagagggttgctgacgtcatcaaaggggaggggcggcgccggcaagcgggccccaccggtcagcggcacaagggcgccggtccaccgtggaccgggaccaccgaggcagtccaccaccggtccacgggaaccgacggtccggatcggcccaagccgatcgggcggccaggggcggcgcggctggggcacagcacggcacaaagccggcctagctgagccatggcgcggcggtagcgcggtctccggcgacggcgaccgacgggcggcgcgggagaggtggcacgcatgggcggcggcggcgcacgagatcgacgcggtgcgacaaggggggtccgggcggcccagacgagcggggcggcggtgcacggccaggtggtcgccggcggcagccaccggcgcggcagcgcgcacgggagacagaggagggaggcaaggagggagaggaggagctcaccaaggacgcggcgacgaggggcggggaaaggcagggagctcggcgtcggcgctcctcgggacgagggcggaacggcggcccggcggcgttccgcgagcgggaaccggcggacggcggctggaaggaccggcgcgaggggaaccgtgtcccggcgggatcctggccgtgaaaagcggcggccgaggtgctcctcggcgctgcgaagcgagcggcggtggcggcgctgcttggggtggttaggagcggcgccaagcggcggctggaggtggtaaaaacggtggagagaggtggtgcgcgtggcgacggtgtttcagaggcggggaggggaaatggagcggatgccggggtgcggtgggacgctgcgatgctataggtggcagcggcgcagtgcgggggcgacggaagcggcgacggcgcgcgactggagggtcgtcggcgtgtggcggcacacgggagtggcgtggggagctcgagagagcgcgcgggagggggcagtgagttggggaaacggatgaggggaggtcggggtgcatttttataggccccggagggggagatcgtggccgtggcaggcggcaacggccgacggatggagctccggcgacgtgggcgagtggggctcgaacggcgccgatttttgggggggaaatggggaagaaagtggaggaaggggaggacgtggggtggaccacgtctgcacgcgcgcgggagcgtggaggcgcgcggaggaagcggcgtcgtggggtggctcaagcggccatggcggcagttggagctggaggaaagggatgacaggtggggtccacgggtcccacctgtcggagagagagggagggagaggccggctggggacgcagaacggacttgagggagagagagagccgagcgggccgagggaggaggccggcccgagagggagagaaagggggcgcgcgggccgcgggagagaaaggagggattgggccgaaaggggcccaaagagaggaaggaggattttatttgttttctttttattttaattgatgcaatgatctttgtgctattaaaactatttctcgagctccgaaaattcacggaaaatttcggagtacattagggcacaaagaaaattacagaatattcccggccaataatttttaaaggaaatttttaattccctcaataattcacttgattaagttgatttaacttttatttaatttctagaaaatgtattaattgatttttattcccgaacgaaaatcggggcgttacagtgcttgtctctccttatcctaacctctccatcactgccaatttcttcaattgagtcatcatattgactgtcaacataaggggtttcatccccctcatctgcagctggtctgtcactagggttggacctctctaccacaaagaacacatcatccaagatgtctaactgtgctgtcttaaccttcttcttcacctctttaaaatgcttctctatttcaactgtttcttcatcatcatcagagggcagtcatctcctgggatgtaatcactgtcagtttcactttcagagggtggcacactagcaagggggcagaatcagggtgataaaccacaagcatcctctcatcttcatcacattcttgcacagctttaccctttagtgcacttgtatcaccctgagcttcttgggttactgtttattgcacacaattgccttttatttgctctggctcaacatctgcagcaatttcttcacaatcctcttccttttcaccgtccacctccatgtcagcttcataatcactatccttgtctgaatcatcacataagtccactatttcaggctcctcaacgtacacttatgcaacccctccctcacaaatgcagtctgatatgaattggcacaccttgtcactcagtagagcacgcatcccagtttggatatctttccctagaaaaagccagtgcaaaagtgtgccctctaacaccctgcagtgctcacgcaaatgtgcaaaaatcccactcaatgtcaccttctacctagctacataaaacaatgcctccgcaccacctacatagctcttttcccttccttctgtcacaaaatcacccttcatatggaacctcaccacaagagtatcaagcacgtccatgccttcaatagccttatcctaacatgcaaaatgcaataaaaaaatgacttagctccacccacaattgtcctaaacatgcaaaaaaaacaaagcacacatcttttctgcaagcaaacgaataaaatagccccaatctgcacagatccagcaaaagcactaactaaactactcctaatatacaccgactccaacacatcatcctcctccaccaaacttaaataacggaatcctcaatcccaatactaccagcaccaaaaggcaaagaaatttacctggccactcattgatttgtcagctgccccatgtcggccgaggttatgcaccgccgtgccctgcaccgatgcctccgcaccgcccctagcctagccggcatccgccgtgccctgcgagcgggcctcggccgcgccctgcgccggagccggtggcgtgctcccctcgagccctccgccgccgccagctcgcccttcgccgagcccaatgtcgtgccccccgtcgagccctccgccgccgccagctcgccctcgaggtcgcccgccggttcgcttaagctcgatctagggttttcgactgaggagaatgggagaagtgataatacacgcgcccttttttccgtctcatttaaccccacaccaactgtcgctcccagtcagcgtgccacgtcagacggtcaatgtgccagctcagctaaaaccgccctccatactgctataggacgagaattgactggttttcgtaagttggaggatgggtcatacccggttttgcggtcaaaggacgaaaatcggagtgggcaacaaatagagggacccgagggacccaaagtgaacttattccaatcttaaaaacgtcaacgttgcaggcttcaaaagcaaattttctccaatcaacttgcatagactggctggtggggccacggtctatagaccgggcttagctaataagtactcggtttgttgattggttcgtgcgcgacagcaaggggaaggattaggaaggagaagacgaaggggaaaggaggagaggagcgaaaccctagggccaggcaggcatctccctcccgggatctcgacgcccagcaaccggaagccatcggcatggctatggcgctgcgctctctcgccgggaagctcaggccgccggtggcagccaccctccgccgggcgccggcgtcgagctccttccaccccgaggtgttcttcgtcttccctccccttctccccctccctcctcctccgtaattatcttcatcttcccgattcaatcaccgcacgctgttcaattagtccccgattcgcgagcttttagtttcgagggaaaaaaaagtccagccttttttttttcaaaaatgtttaatttgtcttgagaatgattataatcaaccactgaaaatagacacatcggttggcgcgacgggctattttatttttatagtacgtgtttacagactttcagaacgtatctatgttagttttcaagtttttatataacattttggacctctaacatagaggctgacatgtaatatctaataacaaatattattttctacatattctacataatgatcatctaagatggttttggggttttgtggtttacttttaggacgtcataaacagggcagtaatattcttaatttattttttcattttatcttttctaacacatgaaaatttgcatgcatatgcttcctgtgttctgtttagaacgtaatatttttcacaatttttacgcagcacatagtttaattctcataatatttattcacttttttaattccctatttaacttctagaagatcaacagatttctaattatcttattatagaaatttattttggtagaatcggatattttcttttctcctctgcataatttttactcgggatgtgtaaaaatcacataatttacctaatagaggtgcatacacatttgatttagcacaatttagtttgatatatgcacatgaattacatagaaagttttactttgatgcccacaaacctcatgacatagcaaaatttagtacttgataaaattagttgcgggtgacctatcaagcagaaggcaaccctcttgctgttttttgttctttcctcggttcattttatttctttttggttcacatttttaatcttatttttagctttccttcgctttgatctctaagtatagaggctgtgcatagatggaaaatttggtttttcttcttcgagggtgaatctttattttctctcttttttctacaacattctaatagttggcactaaagaagactatttttatgcaaaggaaataatagatctatttcaatcccaccagaatgggaagctctggaagttgttaatgtacttgctttttttttttgccttttttaccttgcttccagattgtggaatataatagagggaatagacacatgtcaacatattattgcacaccaaatcaaccaatcagcttgcagtgtttctgccagcgtttgatagatagatagatagattgattgattcaatgtgactgtagtgcatacgtatacctgtagagttatttatgcatcctgcgaaaaagaatatatcttttaatttgctaaaaaaaattatgaactttttaaattcacggtgaaatactaacaggcaatttgattttgtttcttactttgatggtattgtaggagaagctgagcagcatgacatcttctaagactaaaactcctgttgatgacaactgttttgaattgcttggggacaagtattttgaagagcggtctcggatttttgcccaattggttaaggaagatgcacggtactatataacaggcaacctaattccttatactttcgtgtgcgatatactcccaactagtggcatccatgtgctaactaacacctattcacatcttctttttgcaaggcgcacggaggagcagatcgctgcatacaagaagctgaagagggcaatggttgcttctagcttgggcgcagcgattggaatttttgcccttctcatcagatataacgagtagtatatctgatactgttgtctagtactagtctcttgagttttagatgatcaccagctggcctagtgcctttatctattttagagcactctgtttatctgattatgcagttaattttggtgttgcacactggtactgctatatcgctgtcccagaatattggaggaacttaattaagagccctctttgcttgtgtatcattgaacatggtaagtatccctgtcatgtattttcttcttcaagacaaatttcatcctttgtatgctactgtcgttcatgcgtgcctatgcaacagttatgagcgtgatttatacaatgtttagttgcatcactgtatgattcactgtaccagcgtatcacttataagcttgatccttcatatccactgtattaggggacgtgactagagctccgatgtccaatcggatttctgacgttggacacaacgccagtccatagatcagcgtaaggcggtccatctcgttctttgaatttccctttttaaaaaaaatagaaatatattctttgatattaatagagtgacaaagtttgctatgtgacactagcatttgctgaaagataatgaaaaatgtggctttgttacatatgagtgacgctcttattatgtccatgtacattataaattagacactccaggcagtaggcaccagaatatgatagactacaacaaggtgacgaaaaaaacagcatgagatgtcctttttagctccctctacctctgtctcccatcttcttttgggtttttctttttgatttcatgtcattctcccggatgatgtattctcaaatatcactctctcggaaaactctgatttttcaccattgaagattgggtatttcttatgccatcgttaagcatgcaaggtgtcatgttaccacatctaaggggaaatgaccatcgtgtccttcctctaactcggggacatctctcttcctccaacctccctttctgatgacaagtaagtgatgccaccaccacaaacattgagtcatcaagctgatcggtcgtcgagagaggaggacgacgaggaggccagggctacgtgggggcgattaggtgtggggacactggctaaccatgggttcccgccgccaaaggccaagatgcggcggggttatggcttttcgctccttgccctcgattccatacggtgtggtgaggacgagagaggagatagtgttggtccacactacaacgcatgcgatcttctcttgacgaatttctcgtgccatgaaagttatttgttactacctccatcccagaatgtttgacgccattgacttttttaaaaatgtttgatcgttcgtcttatttaaaaaatttaagtaattgttaattcttattctttttctatcatttgatttattgttaaatatatttttatgtatacatatagttttacacatatcacaaaagcttttgaataaaacgaacggtcaaacatgtttaaaaaagtcaacggtgtcaaacatttagggaaggagggagtattatgttatttagttttacgacggttggtagggagcgatgtggcgcttagtgatgaaaatgaggtgtccgtcactgaaactaaggacaaatcgtcataagctagtttaacattgtatcgtgatgaatgttattttgtttcatcataaatatcttttttttcattgaaaacactatcatatctttttttttcattgaaacacaatagtctgaatttgcaagaattttaaaattacataatatgtttggagttctatagtaatgtgtaaatcaattaagtttaatgaagtaaacaagggaataaaatcttcttaataaatcaaggtgtgagttttttttctaaatactccatgaactaaaataggtttcagagctacattactaatgttaataaaacaaggattgtttcagcaattactactttaaaaacataaaaggaaagaaaatctctcaatcagtattgggctaatttcagtccttctcaaggagtgggaagaaaaggaaaaagtacaccgaaggtccctcaacctgtcatcgaattacaaaatcgtcccacaaccacaaaaccagatatatgacgtcccttaacttacaaaaccgttcgttttacatccttcggtggttttgaccccggttttgtcctacatggcgggtgagtcagcgtgggatccacgtgggccccacatgtcaggacgccacgtcatcatctctcttcccccccccctcccttcctcctctctctctctctctctcactcatctccctctgggcaagccggccggcggtggggaggtcaccgggacaaggaggtcggacggccggccagcgatgcggcggcggcgacatgggagaaggggagggaggtggcggcaggagcatgaggtgctaaagcagcctccattaaaatcgatcagacgaagccgaggcggatttcgcatgagctagcgcaagcgtcggccatagaggaggtcgtcgtcggcaaggagcgcaagctcctgcgctgcgcgctcgtcggcgttggcgtcggcggccacggcggcgcgcgtggcgggcgagccgggtggcgcgcgcagcggcgggcgagaaggacaagcacagcaaagtggtgacgtcacgggggctccccgaccgccgcgtcaggctgtcggtgccgacagccatcgcgttctacgacatccaggaccgcctcggcgtcgaccaaccaagcaaggccatcgagtggctcatccgcgccgccgctgccgccatcgacgcactcccatcgctcgactgctccttcgtcctccccaacgccgcccagctcctcacccgccggaggcggaggccgtcgagcaggcggccttcgacggagcaggcgcgcacgaggaaggctacaatggcggcgtcgcctaggaagtcgggggagaagaggcggaagacgaggtcaaggtgcgcggcacggagggcggagcgcatcgcgaagttgagggcacggagggaggggtggatgccgaggcgcgaggcgagcacctcggcggcgtcgggcggccaaagctggatcaggaagccgtcgacgccgaggagcggcggcttgtgctccggcacgggagaaggagaggaaggtggcggcaggagcatgggggagataaaagaggacgagctcaagcatggcggcgagaggagtggggcgacggcgggcggagaaggccggcaaggcggtggcgcggagcgaggtggtggcggacgacgatgatggcagctcgcgcgcgcagctcctcccccgcacactcgccggctcccatctcctctaccgccacccagttcttccgtgctgccgctgcccagctcctcccccgccgccgacgccgcccagttcctcccccgccgccggcacctcgccgcctcgaccatcgctcgagctcgcttgcacctttgccacccccaccctcgattgagagacgccggtcgctggggcactggacgacgaggcgccccgcggccggcggcggcggcggtggtgtggtgccggcggtgttcttcgcagtgctggagaaaagtgaagagagagagaggagagtgagtgatgacgtggcatgctgatagatgggtcccacgctgactcagccgccacgtagaccaaaaccggagtcaaaaccactaaaggacctcgggtgaccggttttatatagttaagggaccccatatatctggttttgcggtttgaggacgttttcgtatctcggtgacaagttcagggacctccggtgtactttttccggaagaaaacagtccacccatctgatctctagtcttgggcttattttggcccatttcattatcccccaaatctctttagggagggagggagatacaggaggaaaagtaatgggctgaaatcggcccaacactgatacagtgattttttttccatttaaattaccgaatttgctatatatacggcgagaagttagccggtgtagccgccgcaggacaacgccgctgaagaccacgacgcaattctgccctgcagccactgtcgacctcctgcattgctgctacctccttttatcacctttaagatccaatcacactcgatatcagagaaatcttttgctttcagcatattataaacacatggtcattttgttatatgccttttcaaagttaatttttgggaaaatagctactttagtccctaaagtttgtctataggatcagtttagtccctaatcttttaaatggtcgaaagaaatccttaacctttgtcataagacctagaatagtccttgggtccaccaaaattatcatatgaatatgccatgtcatcattcatgtaaaatctatgatgagctgtccaatttacccttacatatatcatagaaaaataaatataatggtgaattagacataaccataggaaaaaaatacttttttttcacccttttgaggtatatttttgctcttacatataccatatatttttttaaatttttccttttgttttttattttcctatgcgtaagggtaaattggacaaatcatatagattttgcataggaaggtgacatggcatgtccatgtggcgattttggtgagaccaaggactatgttagcctacatgacaaatttaaaggacttatttgaataatataaaagattaagaaataaaatgatccaggagcgaaactttagggaccatattagctattctccattaattttttaagattgcttcttccggtacattgcgtttaatgtttcatgcagaatcaacaccccctccattatataaatcttttttcaataaaagctatctgattgacaccttctatttacttctcgtagtctccccattagacagatgagcctgaaaatctgaatcattttttgcatattttcgtttgggctactactaagtcacgcaatatatatctagctcaaaattgaaatgtcagataacactgtcaaggtaactaatgacaactacagaattttagctgcctttgtttctatagtattgaaatacttatcacaaataaagaattatagtatatatactagcagtaaagaacaccggagcatcgctctagttaattaccggtgagctttacgccactggttatcatgctcgccggaagacgcgttgtcgccggcgctgctggccggcgacgggcatccgtaaccctggtactcgctgctgtagtactccgggctggccggcgacgccgccgtccgcctgacccgctccatctgcgccgtgtacgatcccgaccccgagctggagtcgccgctgctggacgacatggcgctctgcccgggccgcgcgccgtcgccgagctcctccggcgacacgtccccctcgagcaccttcaccacctggctcatcttggggcgcctcctgccggcgtggcggacgcaggcgacggcgcaggcggcgacgcgcgccgcctccgcccggtcgtactcgccgcgcagccgcgggtcgacgatgtcgtcgtagccgccgccgccgccggcggccatcgcgcggggcagcgcctggcgcgcccagtcgacgaggcagtcggcgccgtaggagctccggtcggcggggcggcggccggtgagaagctccagcagcatgacgccgtaggagaacacgtcggacttgtccgtcagcttcccgctcgacgcgtactccggcgccaggtacccgaacgtccccatcaccctcgtcgacacgtgcgtcacgttctcgctcgtcagcttcgccatcccaaaatccgcaacctaaacacgatgatccaaattggtctcagagtcagcgatccatcgagacaatgttgcagaacacagcatatgatcgattgattgatcgatgatttgatttaccagtggctcgaagttgttgtccaggagaatgtttgccgacttgatgtcacggtgaatgatccgaggattaccttcaacagaaaaaaaaaaaggagattatcacagactgaaccaaagccaccattgatcgatgaactgatcaaaattcggagttcaacttacattcctcgtgcaggtaggcgagcccctttgctgatccgaccgcgatgcgcaacctcgtcgtccacttcatcaccggtaaccccttttctgtacacgttgaagtataaatgaattgtccgtcttttatcatgttcatagtggagtaagtaactatgtaccgtgttataatgttaaggtataagtgaattgtccatcttttatcatgttcacgatgaagtaagtaaccatgtacggtattgaagtataagtgaattacccgtcttttatcatgttaactatttaccatggaggtggtgttcgagagtgcggttggggacgaagtcgtagacgaggaggcgttgcgcgccagcgatgcagtagccgacgagggggacgaggtggcggtggtgcacgcggctgatcatgtccacctccgcctggaactcccgctccccctgcccgcccccggcgctgagctgcttcaccgccacctccttcccgtcgccgagcacgccgcggtacacgtacccgaacccgccctgccccagcatgttcccctccgagaacccgcccgtcgccgccgccagctcgtcgtacccgaacgcgttctcgtccaggcccgccggaacaggcggcggcgggggcggcacgagcggcggccgcacgacgacgtgcgggccggtcatgttcgtcgggtgcatcatcatgttcggcggcgtcgacggggcgccggtcttggtcgccgcccactgcggcctcgcgccgccggtgtggtggtagtagtacgccgtggtgttgcctgcgtcgtcgtcgcgccgtcgacgtcgccatggtcaggaacacgacgagcaatggcaagtcacagcaatggcgtgcgcgacgtgtgcctcaccttggtacccgaaggcggcggcgtggtgattctgccaccgctgcgtcgccgacctcctcctgcagcaccaggagcagcaggcgcaggcggcgaacaggaggacgaggagcagcgccgccgcgacggcggcgatgacgagctccgacgtcacgtcgagcccgccggcaaatgtgatcgacgtcgacagccgtctcgaggcgtgcgacggcgagtagaaatccgccatcgacgtcgacggcgaatcggtgcccctcggcgacgacggcgagggatcggaagacatgatcatgaattggacgcgcggccagaggattcacgatagaacatcacaaatttttttttgaagattgttgacccaattttgtttgattccaattccaaacttcaacacgaatcaatcgatctgaaaaaccaaagaggaagcacattttcatgcatgtccgatgcaagaacgatcgagcaaaattaattgcgaaattaatgcgaactgtaacctacatgcaaaattttggcaacaacatctaggagaggacgcactggatcgatcgacccaaacgcgcaactaattaattgaacaaatttgatcaagaggggggtaattaattaatcaaagatcgagcagttagttaattacccccaatgtaatgtacctgaggcgaaaggccatggcgcgagatgtgccattttggcgcgcttgctattcttgcacgatctgtactgcaatctgttcggtttggaagttgcctgcagcgagcggcagtttgcatgtcaaaaagctgacgtggaggaggaggagaattaaagggcggttacacttctgtgtgcgtgatacggggacacctagcgtcagttttctgaccggccgtgctactactcctcaggtcattacgcaggccattttactggaaggccctttgatttgtatagatattacctagagatttttttttaagtttcttgtgttttttttagagaagtagagatattacctagagatttttttttaagtttcttgtgttttttttagagaagggtattttttacccggcctctacatacaaccggatatatacggccattgaaatagggaacttagccccgcaaacaactcaatctaaaattcgctccataggagatttgaactcagaaccttggtgtactactcaggtcactgtaaccactaggctacatgccctttcgtaagtttcttgtgtatgcaggcaagtatggtttacgccctctctatttctttaaatctgttatgtgcagctgctgaaactgaaaaggtaataaattatgctttcacccacgatctctttgagtcctcttgagttagcattccaaaaatcatgtgtcctgaaacaaaatggatgataatggaaagcatgaaagctcgagagttcattacatgatcacatatggaatttgaaagcatcgagtctcataatattgtatgtctatatattgtctagggaagtaggttaatgggttgcacatttgcgattattagcttgtaatgatactatctgatcatgcaaggacatccttgaaaaaatctaaactgtcaacgacggtgcgccataaaaaaatatttcaaatgttggtcgcctacagtcagttagtacttcctagttcacttgttgcttgctagctttaatctatcgcaatggattaggtttttcattcacatgtgcatatatcaagcattaacatggtttgaaaaatcgaacttagtgggccaacacatcgtgagaggtttgaaaaatcgaactcagtgggccaacacatcatgagattttaaactaacacatattaggcgagatgccatagttggattggatctgggcctgggcctaagcggatgaattgccaacccctaaaacatgctaaagtagctaggggtttctcatgggccaactatacattcacacgcggccgcttaaagcggttggaccgtctaatgtgtttggcgctactctttatccatatctaaatctacgcattaatgagtcatcctaacatacatataaatctacacacgatacatatctcaaagatagacatcattaaagctacaaataaatgttacaaacaacccaacgtatccgtgaaaatatatcgatatgggagatggaccgatataaaaagttacacagaggagttaggaattcatctcccatcttgaacatttgtaaaggataattctacaaaagtaaggggcttaggcgaaaaagagcccctcctcgaggaaacgcggcacgctgtgcgtgcggctggcttttttatccgggcttgaggcaacagactcttccccttcgctcgctcgcctcctctttccttcctctcgctcacaaacctcccaactagggttttccccgccgccgccgccgccgccatggccgccactccggaccgcgccaatgccgacctccgccgccgcctcgccgtcgacgcccctccaccaccgccgcagatcgccaaaggtccctccccaactcagccccccgccgtctcccctcccctccctctcgatccgttcccccgggccggaaccctagctgttccgtggttgctcgggccggtccgatttggttccagttcggtcgttcgatccgccccgccgttcccggagttttggggtttttgggcggttgggaaatggtggttgtcccccccccccctcccctcacttggacttggtggtgaggcaggtgttgggggcgtgttaagggcgggtaccttgggtggttgagtgaaatcggtttgggatttgggtggattatatgcaatggtcctagtttaacctccgtctgatttgtggggttttgtgcggttgatttggctgggatggattctcttccctgcattttattactttgatttctgctgtgtatgcttgcagatttatatttttttctatgtgcatatgctgttgttggtaacttatgctttgatgttgttagcatgtgccatgtcatgtcacacccgttgttgtgtgagaaatttggatttgatgtagctatgtgtagaggatgacagcttgtttcactgattactcaacatgtggaaaaaacctacgtgttgttgtagaaacccgtttgatttaaatttgcatcctgtgccaattggcctgttcggcaagcaagggctgcagccgctgctgtcttcgtgcttgcgggactgttccagttggctacggtttgcgtcgcagccctggcagccgaacaggcccaatattgtggtaaaaagttgtagaactaatgtccaaaaccctgatctagttgtgttgatttgaggtatattattctagcctttcattttatcaagtcaaccattggtcctttatttggttaattatttgtttgttacaaacatatgagaggaatggttgtgttggtaatatcacatattaatggcgcaatctgtgttctatacattttctttgtcagcagaacatgttccatgcctcattcatgatactattttttttttgcagacaagcaaggactggatactgagatgcctctttctcctcaatggcttatgaaggtgggagaaaacaaggttagacattgagaagctaggttaataactagacttagggaactggtcatgctaatactatacatgatggttgtaacagtaggataccttttaagtgtataataacctctcttattagttattttttgcttgtctatactgaagatcgttgattgcttgtggcaggaacccagtttactgggtgttcgttcagatggttcaaagataccaggaaatgatgaggacacaagcttcagtgtgaaaagaaaggatgttttcagggcctctgtgcttgatggtgaaactgggtgtcgtgaacgctggcgtgatgatgaaagagaaccaaattcagcccctcggtggaatcgctggagggagacagacaaggaacatggtgatacacgcaaactggaaaggtggtcagatgactcctccaagtactctgtggatggtcgtcgtcctccacaggaacgttggagtgactccggtaacaaggagggaaactatgatcaacgccgtgataacaaatggagtgctcgtaggggccctaatgataaggagtctgagaattggcgtgacagatggggtgattcaggcaaagatggtgatgctgcccgtgaaaaaggtttctctcactacatagctcatggaaaagacggcaacagtcatgagaaggatgctgaaagagatgataatatttctagatcatggaaatctagttatcctgtgggccgtggacggggagattcatctcatcatccctcacagaatacacaaaaatcatctgcaacatatggatatggtagagggaagccagacaatgaaattgcaagttttccaggttctcgtggaaaatttacatctggaagtacaaacacagccagttcaggatcatcacgtccattccatcttggcctactttctgacaggcctggtggtacatcaggagatcgcacagcatttagatatagtagaatgaaactgcttgacatatacagaacttctcatgttactgacttcaagatgccccttggtggctgtgaggaactctctgcatttatgcaagaagaaactttggaacctttagcattgtctgctcctactactgatgaagcggtaattttatgctataattttctcaagtgggatgatctcattattgcagtacagtttcttatctcacagttctatttatgtttttaggccatcttaaaagcaattgataaaggggatatcataaacagtggcgtccatcaggcttccaaagatggcccggttggaaaaagtaatcctgaatttccccattaaaacaaccaaaatcatgttttcagcagtttgtttatgttgttgtgtactactaacatatgaaaatatttttttatcttactgattgaattctcactctttaattagatggtagagaagatcaacaaggaggcatggaagatgtcaagggagaaacagctgcaagtctcaggggtaccttgtttatttctgtctttacaattttgttgtacactgcattgcatttatttgaataggcatcaagtgattaactgattacacagagatgatagtgtattcactcatccttgaacattattttttgaagtaaatttcacaaaaccacatgatttatgggtaagttgcataaaaccctagatattttgattggtggcaaataaacctcaggtattatggttataaagtttcacaaaaccccagccctatgaatgttgagtatggttttacttaaaattttaaaacatagcatgtatgcaaaatttttaattattgacttcttgattaaggttgatagtttaactcttcagtcttcactactctgaaaaatattgttttagatcgagatttgaataaaggttgggtatgtgccacaagtcatattacatgtggttttccgcaaccttgaccataaaacatggggttttctgaaatttactctcttattttttttagtcaccaccaactctctgatgactaggggactttccaggtttttgttagtataattttgttttcttaaatatgtggagttgtgtacattgaccttgtttacaatcagtcaatttgacatgcgctttgaagcatttccttttctattttagtgcctctacatttaaccaaattttatatttgctgtagatgttatagcaagtttcctgtttgctcctgtatgtaaatttggttggacaagacaaagtttgcagctgcaagcattctatgtttttcttttggacaggaaaacgtttttaacttcttgtagacattcaataaaactatgctataaggtttgcaaactaatccatcaatatgatctctttgttttaaattcgtaggccatgttgaagtccttactgttttttgtattttttaaaagatatgttggaaggctgtcaaaccagctcactttgtgctgttattattctactactattctttcgtaagttcttgcagtgtctgttaaatcattttcccatgctaaaggttgccactgttggtttataataggttttcctggtaatactgatttgccggccagagcggattccttgcggccagaaacatctgcttatgttgttccacaaagatctaggctcattggagaacataggcctggaccaactgctgactatatacagcaaatgccctttgcattagatcaggaaagtaaagtcgctgttattacaggtgttgatggatttgccactccaacttatcctaatccagaaagcttatctttatattacaaagatccacaaggtcaggttcaaggccctttttctggagctgacatcattggctggttcgaggctggttactttggtatcgatttgttagttcgtgttgcaaatgcaccccctgatgcgcctttcttattgcttggggatgttatgcctcatctacgagcaaaggcaagaccacctccagggttcgctgcaacaaaacccagtgacatgctaatgccagaaactctatcaactgggaattttgtcagctcgagtaacacacatgcaggatcagccagtgttggagcatttgacagtgggctaagcaggaaagatggtgcagttgaagctcaaaatcgctttttggagtcgcttatgtctaatagtgttcgtgatccttcagctgaaatgcttgctatgactgcaggtttgttttcttagcaagaatagcggccgtttcattccatttattgttttttataaccataattctaatcttgcatgcatcctggtttaacataaaatccttttttcctttaattaggtatgactgaatatggcagcagtggcattggtaacattactgtgtctggaggagagactgggaacagcatgacttaccttttggtacagaaaagattgttggagaggcaaaaatctttgcaaaatcctggttcattttggtcaggagacagtattccagctgcacaagtgcaaaacaaagatatagaagcatctgctctacacactaaattgcaccctcccatggctgatccacctcgccaagctttgcaatctcagaatgttgatttgcttgcgatgctgcattctgcagagaaacctcaagcacctgcttctaattctggattgccagcatggtcaaactaccctgaagctaagaatcttgatcctcgtgggcatggtgtggatctcactcaagggtcacttaacatgcatggtgcaagtgtgcagagttcccaacaagccactactgctattcaacagcaaaacttcatgccactgaacatgtcacaaatagctcatttgggacctgagaagttacgtgctgaaatatcccaagacccacagcttttaactaggttgcagcaccagtatctactgtcacagctacaattgcaaccacagctacctgtgacgcctcagcctcaacctcaacctcaactctctatgttggacaagatgatgttgctcaaacagcagcagcagcagcaaatgcaacaacagatgcaacagcaacaacaaatgcaacaacaaatgcaacaacaacagaagcaacgattgcaactgctgcaacttgagcagcagcagcagcagcagctgttgttgcagcaacagcacctgctttctcaagttatacctcatgggcattccagtcagcaacctgatgatctttatgggtcacaacgtacttcattgccaactggtgattcttcgaatcttggccttcagaaaatgaaagaggttcttgaggcagaccgcgttttgactgcccatggtacacaggaggggcagcaacctagtgatccaagtattatgaataagaagggtatggagggtgtaggtccatctcaaagctctgtaccttctttattgccccatgaaatttttggtggtgtaccttcaaaagatcgctactctcacccccagaagttggaagataaggtcaatgtcaatacacaattaaaagccagtatagtgaacccgatgctaacagaagttgcaaataggcgtgaagatgattctgatcaacaggaggttagatctcatgaaaggggcattggaataggaaaaacaggaatcatgtctgaaaatattttgggctctggatcttctgaggtcataggggcagctccaagtgcacctaaggagtttcctgaggcaccgtttgatccaaaacctgaaacattgtcatctcatatttccaatcaggtgcaagatttgaaaatatcttcagaaaatatcctcggtggtagtgaaccaactgtggcaactgaagttaaagcctctgatacacaggacacaaaaaaatcagaaaagaaaaagaagcagaagaagaaacaggcaggtgcggatgtagccaaaggagctacaaagacggttacttctcaacagccaaggcaggaaactctagttggttcagatcagggtggagctaagcatgacttgcaagatgatgcagaggagctattttggggttcccccatccaagtggaaagttcttctaaatctgctgacccaccgctaggattggaatcatctctggttctacctgcgaaaagtttttccgaggattatgatactaacaaaggtgaatgggaacctaatgctgccgcagtaaaccagcgtgggtggaaacctactcagggacctagacctaaatcacttctggaaattcaagctgaggaacagcttagagcacagaggggattagcaatggagaatgctaagccagctgtttctgcagcttcagtgccatcaattccttggaatggcatgctgaccacttcggaccagcagttgatggctgtaagtaaatcagtggatggcctggaaagtgttggcgactcaaggaataggagaagccagttgcatgatttattagcagaagaagttttagcaaggtccagtaacacagataatgaggacatgggcaatactaatgatatggcttttccacctctctcttctgctgttgttcagcctgatgctcctgcttttgatgatactgacttcattgaggccaaggactctaagaagagcaagaaaaaggcgacaaaagcaaaaggatctgcagtcaaagccccagcacctgttgtttcctttgattcatcgactgtatctgtacctactgaaaagggaaagccttcaaagcaatcacatcaagagaaagaaatactaccggctccaccaagtggtccgtcttttggagattttgttccctggaagagtgatcaggcaagtgcagtacctgctccagcatggtctagtgagtcagcaaaggtgcaaaggcctctgtctttgagagatatccaaagagagcaagaaagaagatctgctgttgcccagcagcaaccaccctcgccaaccccagcaaaggtatctatcaaccaaaggaatcatgcaaatgttccttcctg

SEQ ID NO: 9686 - DNA, 18998 bp, Oryza sativa
tgtattgcaatttgcatatatcttatgaattatgtcgatcgtcggttgagaatgtgagacggagaaagaaaaacacaactgatgcaaccgtgagagaaacattggtcaggcctagctagaggaagagatcccatcttttcatttatgattatacttattagccaaaatttaaattttcaaccttaaacttagagttgattttggggggttttttttcatcgcagtttattttccagagtttgcttttcgtttgcaatgttgtttggcttattccctaaataagccaaacgatagccccgcaaatctgctgtaattcacaaaagatttgcgcatcactgcgcccccgagcttcaaattgagtaatttttgtgaatggaattcaaatcgagcaattgccaagtctaggccattgagatgccaaaacctttgtttggtgacacaaagtgcctgcctgaccgctagcaaagctaacgcaaatgccaatggcattgaaatggtgagcgagatcattccatctggttatctacagcattttaaaagtttaaattgcaggaatccacttcaaaaccgaagaacccttcaacttgcacgttttataaatacaggaatggatcgatggtaagcctataccaaacagaaagcaacgtgtatgacgcacggatgtgtccaaaagaaaatgtgcttgtgtcctatcacctttaggcaacatatgttgacactcgactgaacatttggaccagaagctttggatgtgcaaaattccgtagccgattgattagcataacacaaaacattgttttcaacattggtccatctggcagcctaactgcaatgccaaactttgatgagggacagtacatgttcaaatgtttaaacctaactagcagccaccaagatgacaaaatttgcattgtttcctaaggtcaaatcaaaagaacaaaatcgtacttcatgctagagtttattgaaacctcataaaacagttttccacaattccaaggtctcgctgcactttgattcttattgattccactacgtgtaatgatacaacagcagcgaccaattctggtatgtacacttctcttatgagtgggaaagaatatattgaaaagatgatttttcaaggactgcaaatttcaaggtggtgttccatcttgcttattcttttggtacacattctctaggcattcctttgctcggtggaccttcgactgaagataaaagctcccagattttgcatttctttcaaataaattatcatagcgctgcaatttttaaaatatatttgttaggatagtcgaatcataatcaaatgatttttttaggagcgctgcgaccacccccccccccccccaaaaaaaaaaagaagaagaagccaagtagcagacctgtgcaatctcttcccaagttgactgctcagatacaccgagtatctgcctagcttcttgctcagtcattgttttgctggctctacgaatgttattaattgtttcatgggccacaccagttttatttgcatctggcagaatataggaggaaaactaacataagtcatccttctttcaaaaaagaataataacaattctcctacagtcaaagatttggcaggaaaatattaagaaaggtcatatttgtcttgtggtggctattaataagtactaacgtatttccattttctgatattcagaagttagttgtgaacatgtttttagagttgtaaaactttagatacaagctaatcagatatatagttggcctgatctcataattatgcaaatcagagttcttagataacacagaggtgagttctgtatcattgtattgcagaggacatttatgttcaaattaggtaaataaaatccaggcaaacaagtaccattaaaactagtaaaatagagtttgtgcctttatggtacttctttaaaatctaccataagttaggcaaaaaaacaaagatatccatttcttcataaaatcataaaaccgaagaactgacttaactgcaggtaccaaattgttaaaacataagtggacccaacttgtaagtagctagcacagaatgatattagtaaacaatgaaagttcaaacttgttatgacagttttaagcccctagatgctagacatccatgtatcataaatatgtctcgcatgtgagaagaaatcaaacaacaaatctcatgagcaacaggcaacataaaaccaaattgatattgagggagatagcgttatatgtgtaagtaataccaaaaaagttatagtccaaatgcaagcatctataaaacagggtcatatcttacttggacaatgacaatatgaggaattttaattaataattatttgacaagacaatgtcaatataaggaattttaattactaagtatttgataacatcgtttatggttcattttatagaacttggtgcagtatataacaaaatgcaaaattaccgtccattttagtttttgagcgattgttgctccacgtaagcggtcttttcacaaaagtttgctgatatcaatccacatctcatgtttctatctactcagtcaaggaacaaagaggtagcctctatatacagactgcaatggatgaaaaaacttactatcaagtgctttccggtatgcttggagcatagctcttcctataatcccagagcccatgacaatcaagtttgcaataagcttccctgcctgtaaatcaaaaagcaaaactatgtaaataagtggcacaactcaaaatagcagtagttcatgcatttggattttttttggatatgtatgctttcaacactggtccttggaagggggaggacatttcgcaacatatccaatgccaaatcaaccatgaagcaaagccaatccattccaatcaaacctacgggcacgataccacgccacagcggtcgcagaaactagttaccacaaaataattgaagagcgaagtctctaattatcacaacgcgatgccgtaattcggcagcttgcacagaccaaatcatttgctgatgcggtttgacttcgtttgtactgccaaatctaacaaacgaaagcaaggtgcgatccaagtataaaaacaggcaaatccctgtgccggtttatattcgaaaattatttttcccctggagaaatctggcaaactgagcccccgggatcgcatgctgttcttccactcccctaccccgcgaaaccgcgatccattccctcatgcgtatcgaatcgagcgattacaccaaccacacgaggaaatttaacccgtgatcttacacaggcggcgtgtcgcccatcgaggagccccgaatcaagccaatcgaatccggcctcagcatccacccatccacgggtctctacttctcccaaaacaacacaaaaaaaaaacaaaaaaacaaaaaacaaaatcagagcagcatcgcgcgcgcgccgagcgggatgggggcgaggaggaaggggtgagggatgcgaggggaactcaccatggcggacaggcggcggcggcggcggcggccgtgggattgcgcagctgagggggaggggagcaatggagggagggagacgtggaggaggaggaggggtggacacgcgtggtgatgctttcgcttccccgggctgagcctcgcgtcgcgcttggatcgtccagttgggttgggccggctagcttgttctgggaggttctagagatgaaaggagcggaggctcggaccgggcagggctcaatagcctgtctctgggctcttcgttcggcctagtccattttttccttgctagtatgggcctacaagcccgtggttcagctgaggatggaaaaacaccattttgactctctcaagtactatatataaaatataaaaaatctgaaggcctcatttctttttcgcttatgcttatatttattagccaaaatttaatttttcaatcttaaatttagattgattttgaggattttttatcgtagttttatttttcagcctttgtttttagatcgttaaaaaacgtatataaaaattttattcacaaattatttttcatttgtaaatatgccgttttgttttttttctccaaatagccaaacaatggggctgtgattcgctcaaccacagaaaccatgtatgacatctttctcaacgatcaataccatttaatttgtctccctagacggtttggatgggaaaatatgcgatggaaactacatatgtagtggaaacctgtaaattaccgttagatcgaaaaatagatatctgagattcgtccacgttattatgagtaaaaattttactcgttgtccatttttcgatccaaagacagtttccactgcatttatggtttgcactacatattttctcggtttggacatcattttatgttatgtagcagctacatggcacgctaacatagtcttttaatcaatgtgacgtctacgtggtattatatccactaattcattgttaggttaaattatttcaactcctggttgactgccaataaaaattaaaattctaacggtaattctaagcatgttcaaataagttcccaatcaactaacatagttaagttttttttaaaataaataaataaagttattcctataatcaaattgataatccatggtgataatctgctcaacaatttaccatggtgataatattatatgaatattgactctaatcaaacacatacaaagctactatcaaattaccaaacgatcgattttggaaccaatccaattcagacctcagtcagatcaatgagtcagcctctcaacgcttagttacacacattgcattacgagggtgatacaaaaacaactttgctgtggtcaatcgaatctggatatcttgaaaattactgacatacatacgctactggaatactactactactactactactactactactactactactactactactactactactactactagttcttatctcggtagctaggtagaagatcaagaggacatcaagcatccaagttactacagtattcaagctgcccctgatcgaagcaaacatatacaaaatggacgcacgcacgccacactctcgttcttggctttctagctgcatcaaccaaatctttcccagcttcttgatgatgagtcgatcgacttgattcttcttcttcttcttcctcctcctcctacgtcttctgatcgatcgatcgccattgctgtctggcaatttgctgcagctgtaagtgagtacgtcagtaacctaggtggcccatctcccagttcagcttcgatgccaccctgtcgtggtaaggcacgtactcctgcagcagaaatgttcatcagagtctgcaatgttcagaggtctgcaatgcaagaacctgaaagtctgaaacccaagctcgatatatcgagtgactgtcttgtcagtcatcgtgtacctctagcttgtccatcagctcctccgccgtcggcgccatgacgatgatccgccgcgcgctggtgttgatgaacccttcctccaccgccttgtcgatgaacgtcagcagcgagttgtagtacccgtcgacgttgagcagcccaacctgaagaacaagacattcagacatttttttcagttattttgcggttctgaactttctgaagaactctgagcatgcagtatgtaatgtaccggcttatgatggatgccaagctgtgcccatgtaatcacctcgagcagctcctccagagtcccgtaccctcctgcatcatcaacacattcccatgatgaactctgaatgaatattcggtgcgcacacacagcaagatgctggacagataattttttcagtgttcatacatccatctactactactcatcagtcaaagaatcacttgcagtggtagcttagctagctccaattattggttacactagatagaaagataggtagccccagctttctttttttttttcttttcaggcatgtatggtgcatgcactgttcagtggcagaagttaatttcttgctcccatcttgctgtaactctctctgtcagggacttgaatgttctttttcacctgatccagatgagataaacttgcagactatactactgtactatactacaccatgttagtagcacagtaacattttctgactgacagtttgtaaagtaaatctcaccaggtagggctatgaaggcatcagactgccttgccatctctgccttcctttggtgcatatcagcaactggcctcacctcccccactgtctcaccacttatctgccagaaacaatgaaccatgatttggtttttgcaatcagcaatcatcctgagcaatgcatgcatgataaaatgcaaagctgaacagtaaaaagagtttcttggcatgccatgatactatcatactgtgtgttgtagtggtgatggtggtggtgtatgtgcagtgcaggcaaacactagtaggagtagcttatacattcccaagagggcatgattgtgctccaaggggagcaagaaatggcacttgatgatttaactactactctttgcctccatgaagaatggtaaaagggccaggtaggaagaggaccacaagaaattgaagacaggtgagtatggatggccagctttaatttctttgtggcatgattatggatggtataggtatagtgacatggtatacaggataagcacaaaaggtacagagtcattactactcccatactctatcacacattatgggtcaattatatacttattttttcttaagaggtttcaaatcttgcataccccaaaactcttgaaattatatactggctgatacagcctttgtcccaaatagtaactacttttagactatgtacttgaacaaacactattgttattctagtgtatgacaaccgacttagccctcatttacagcaagaccagtaggctttatccttctttttgaacaaaataattgtactagtaatatactagtactgtgaacttttttctcccaaagtaatattttttaacccaaaaagaaccttttttttttatcaaacttcacacacacaacaagaacattcctctgggcaagacaccataggcagtcaaagacagtgccctctacttctacacctctgcctataaacaacaccctgcttctgctctagcatcaagaatgcaaaaaagaaaaaggaaaaaaaaaaggtcctctttctctgtagaacaggatgatgccacagcaagactttttggggttaaggaaattaacatctgtaaagctgcatctcggtgagttgtttaatctcacgccaagatctggatttgtgcccctgaaactgaaagagcatgtagcccttgatcacaactgctcaggatttattctttttttgcccaagtgccaatgtcccctgggactccaacaacggctggttcatggggtccaaactcccaaaccccccatttgattatattttctactagtatcacttaaccaaaaaccttaaaaacttccaaaagatgagctcactgccatgattgggttcgtgacaacgcaagtactgctacgggtacaagctgaagtggatcaactcaaggttattaaaatctcgattctattaactgtcatacgattttacgactttgtaatcctagttaagatgtctgattttacgattctatacaagtagaatcttcaattttatgtttttttaatacatacgattctattattcgatcttagaacttttgattctattcagaatcacaaatttaacaataatgttgtgattataactgaaggtggaaaatagatagggcccaatcgtcagtgactcgttcggggcagtttgtgtgtatgtttctttgtgtgcatagtgacttacatgccgatgagaaccaacaatacattattcctacataatatactccctccgtcctaaaatataaaaagttttcctagtacaatgtatgtccagatttattgtactaggatgtgtcacatctatccaaaatcactcttatattatatactccctccgtcccataatatagcaacttagacatgatgtgacacttcatattataacgaatctggatagtaagcatgtccggattcattgtactatgaagtgtcacgtccgctactaggttgttatattatgggacggagggagtagcatataggagtacggtaactttgttgcaggtagacacaaaaatgagacgtacctctggcgtcatgagagtcttgggaatgaccctgcgcgtggacaacaagatgacaaaaagaagcgatcagcacaagaactcggaaacacaagctactagctagaagtactagcatgcagtaattaaaaactgctaaaactatcaaacaaggagagacacattctcctggggattcatgcagtaattagtactagtagtaacagtgtgcagctagcatggaggagtggagtacccgatgacgtggcggccgccgtcgaagaccgcctgagagacgagccccatgaggccgatgctgccgccgccgtacaccaggtctatgctcctcgccacctgcatgcataacacacacagattaaccaactaaccgcacggttaaatttcagttccagttataactcacgtacaactacgggagacatgcagccatagattaatcaaaagaaaacatgcttttaatgtattttagagccgtttacaaacgtcgattaaattcagtcgtacgtgagtcgaacaggtgggtcgtgtgcactcaaaaggggactagtatgaattaatgattgatcaactggggtagtaactaataagccggcaagatgcggtccaagttactatttttcttggattaattacccaacctgctgcagcagcagcatgtagcagctcatggcgaaatggtgattgatcgtctttaatgcgaggcgacatggatgacgcaacagcagcgatgctgagctgagctgatatgagctatggccgcgaattatggcgccgtgaatgcagtaggacccggctcggctatggaccatggaaaatttcggtcggccgccgcgcatgaacagatgggacggcgacggggaggcaggaggaggaataagaagacgatccatcagcttggtggaagaagtcggcgtgtgcagaaagttcagaaacgaaattcgctatagcttgcttgctcaatgagcagtggtagtagcagaggggattgtttggcaaaaaaagtctgcaacttttgcattatatttgcagaccgatgaactgatacggttatagtgacagactgacagtgaccatggacagaggagaagaagaagaagaagaagaagaagcatgtgtaggagtagcatgcatggacagagttagagtttaattaccagctcgttgccgagctcaatggcggcgtcatggtagctcctcttcttcccctggctgctgccgcagaagacgcagatcctcttgaacctcgactgcctcatctctctctcctctactattctcttctcttcttgctactctctacgatctatctaatccttgcagtgaaacagctagctagtaattgcctgtatttatcaccctcctctcctctgcccttagctagcgtcgtcgtcactgtgctgctgctagtgcaagcaagcgcactacgctgctgctgctgcaacgacgggttccttgtgatcagctagcaatctccctctgagctagtagtgcgccacccatggctatatactacataaaagtgggagaggagagaggaggagattgtagtgatgagttttcactttccggcgaaatggacgggtgggtgtgtagtacgttgattactggggttgatgtgtgagtccgagtcaccttatcgggattgccggtgcaaattggcttcaaaacaggccgagccggcgaaggttgctgctagctactgtatatccatcgtggggttcatctccatttgcagggtcgttttaggagaaagctaagctagcgcctgcttatacaattatactagtgcatgcgacggggaaaacgcctattacaattatactataattagatttaaaagtttttcctaaaaaaacttacggcattttttaagatagtccatattttttttcttctctttactttttgttattacctttttatttgttacttcctctgtctgaaaacatagcaagtttgttttagcctttaatatgagttttaagaagaggtttaaaaatacttgggttacctcttcgaggtgggtgcggtacaggctcatactacttagaagttaggactataataaagccaagtgatagtagagatagtataggtagtttagtgacaaaatttgttatgtttgaaacaaaaattgaaatagaagttgttatattttaatacggaggaagtactgtatttttaattatatggtaaacgcactcgccactagatacatgataccacacacactgggaatatgttcctaacacacgctaaaaaagacggggaccaacaacacatttttgacatcactgaaatcctattgaaaacccatcttattcgtgcataatatttgtggaaattaggacttaaatattaatagttggagtaatgcacccacgacttcattattcgccggtgcatcgcttactatttttgttcttttcttactaatgcaactactttctattaaataaaccatataacatagtggaatgtttcatattgatacaacagaaaaaattataagactagccttcgaaaggtataatcaagaaaaagacagtcatgccacgcgtctatgatagaaaagcccactactgagagacaacagtaagacatcccaactgcactcaagacacttttgggaacaagagggggtgggcgagagaagaatggatccactctcctatgtacagaccgctaacatggccatcttgtggtgaacggaagcgcctccaaaacaggataaaccgtctgaagcagagattggtgagaaaggacctgtctaaagcgaggacgtagttttcacctgaagaaattaattccctagggagggaaggaagacgccaagacaacaaccccaagaaagttacggctccaaaatggcatcaccgttgtcggccctgaaacaggatgggctttagcctggagatcttccagctctcccatgccactatctccccattgctaccatcttccatcagtcaaagaccgtcgtgccatgctttcaccatcgctcctccacgcccatctcctgagaccactgcgccataccgtcatcaccaagagccaatttgttggagagacattgggtctagctagtctagagaataacatcggatcctgccttggagctaccagatccgacagctccttccaccctctccactgccacctgccactccaccaccccgccatccgctggccctctcactagatacggctatgaatggtctagatctgtacgaccacctccaacctcttggtcacctcaatgcccgaactgaatatgctttctcggggagaaaattcatgtcgccgctgtccttatagccacgtggcttgtaggtgtgcctctcaaacagtggctaggcattatagaggaacagagggttggtggctatggtcgtcgcttcgtcgtctcccgtgtcatctctaggattggatgtgagatagaggacgggtgaatgctactactaatttaatccttagaataggactttgtttcaagataaaagataagagatgctgatttgcttgacatagctagaactcaattaaggctttagttattcatagatagctccacacaaagcagcatggacgcaaaatagatgttctttctgtctgcttactaataaatacttagtacatcaacttgcgtagctgcaaacagttgcacaggccaaaaacacggctaacagtggacggcaatatggattattacatgatcaaaaccccacacaattacgtgcatgtggtgtgcgcatatagtggtttgcgtgtgtgtcttctgtgtaatcgataaaaaaaataaaaaataaataaaaatccagcacaagcatgacagaaagtgatatgaatatatatatatatatatatatatatatatatatatatgatctatcatttgtccaagcttaatgccatatctgatctgcaccaatcgtatctctactgcattttttttctcatttttggttgtgcagagcagaggagttaattgactccacagtttggttgctggcgaggctggtgcgaacatgccaaccagcagcagcagcagccacacgccacgccatccgccaagacagctgttgatgggcgcgggccggggcatgtacgcaatgtagccgtgtgcaggggaggcgcgcgacaccggcatctgcatgggcatgcatcgtcgcggcgcgcgcgcacacgaggtgttcggcccgcgtggggcgccgcgcgcccgcgcgcgcgaggcgcgctgcccgctacggccgccgcgagaggggcgcgcgcggcgcggagaggcacgggcaccgaccggcacggggtgatgggggtggcgcgcgtggcgttgcgctgcgtgtggggctccgtgccggcgggcgcgcgagagttcgtgcccgaccgaccgcacggcgcgcgctttgcattggctggtgttttcggtctcgacgcgcgcgtggtccggcagcggcatggcgcgcgggcctgcacgttgtcttgggaattaaaacaaaaaaaaccaacacatgtagtataaaacccagggtgtaccaccgtacattggtcctgaactaggttgttctatgtctctttgttattatagatcgttttgattatttttactagttaaattttttctaggttcgattaaatttgtagaaaaatatagcaattttgttttaattttcatattcatttttttatattttatcaaaatatataggttccaatgttatatttaataaaacgaatttggtattgtaaatattatttttttatataaataaagtaaaaaaagacttataatataaaatggagagagtgctaacttatttataatctactctacaaaattcagagatgtggtacatagggttagaattcggagaagtatgtttcctgacagttggttagttcgatgctcaattagtttagctctacatgttgcatgcttgcagtactgtacttactgtagtgtagtattgcgcgttgtcgttggccgtgtcggtttcatgatcgatcgatgcttgtttgctaagtcactagttggacaacttactaaccgaaagaggttaaaaaatacgattaacttgcatgcgtgttagcgttcggtgccggccacccaagcacgcaccgcacgcgcgcgtgcccgttaaccggcggcgcatgtacgtcgccgagcctgcgacgccggccctgccgtacgtgctcgtcgtcacccggtgaaaagcggtctccccctgcctctatcaatatcaatagaatttcgcaccgtctcgtgcgagtcgttcaaaaaagaaaacggtctcccccacgagcaattttacagttcttgaaaatgtatcattttttccattataaatttgatacctcttgatatgtaggtactttttctgtttcacaatgtaagtcattctaggtatttacattgtgcttacattgtgaaacggagagagtagtaggtactataaggtactaaattttatactaaaattttggtatctctttaaggactgtaaaattactcctcccccacatttagagaaagtttgtagcaaccatagcttattataaaatctttggttcagtttagagaagcttaagattataagaatccgttggttggtaatcaatttgaatatgaagaagttgggttatataactagtttcttttctgaattatataactagagattcttggaatcttaataagaatccggactgtttgggggaattggagcatttgaaagaagtagcagtagctagaagctctttcaatcagggcctctagtttctccgcgcattaatttctcagttgcattgaaaaaaattgtagtagtagaattcacaaaataatctagatgtcagaaactgacaaatccagattttcgctgactactcgtaaaatactcataaattaaactgctttgaattctctaagctcccaaacagaggacacctctttgttttttggggggacaaatgttgatccttaattatggttgcagcaacgcaatattttcaaagtaattctctacacgctgcatgcaagatctaatagcaaatcaaaacaactaaaaagaaatgaagacgatcgatcggagatcggattacaccagatagccggaaggagagaaaggcagggagcttttaacatgcacgcagcagcaaagcaagccgcagcaggtgatcgatatcatatcatcactaattaatcctgaatttctgatacccctaatccgatcctttacatgagcttaattaacagtggaatccacaaactctcatccaccacttacaaagttacaaaatttttatattccacgcaactgtggggaaaagctactagcatcgctttctccccacggtttccattgctagctaatgacgcatcagaatgaagtataggttagactattaattaaataattagcactccatattataatttgggacactgctgatgtgccttctgacagccggccggtcggatttgactgtcatttgaccagcctctagctcctaataacatatgctggccctgatgcatgcctggatgcatgcctacatggctacagagagcatgcaaaacaattgatgctttggttggttagtgatcggtatgtccatccgtaaacaagaagttacactctgacactgacactgtctgctcatttggccatggagctatagcacgccacaagttgccaaactcacccagcagttgagagaaccaaaaaaaaacctactttaggggtgatcaggggcgtaaagttttaacatatcacatcggatattatatagggtgtcgtataggtggtcggatattaataaaaaaattacagaacccatcagtaaactgtaggacgaatttattaagcctaattaatctatcattagcaaatgtttactgtagtacaacattgtcaaatcatggaacaatttaggctcaaaagattcgtctcgcaaattagttgtaatatgtacaattagttattttttagcctatatttaatacttcatgcaggtgttgaaacgttcgatgtggcagggtgtaaaatttttatgtgggatataaactgggccttagtcttttccaatcgatcagactaattaaggctaagactgtttcagggaagaggaaaagaaaagattaagagagtatgtaaaataagatagttattaacgcatgattaattgagtattaattattttaaatttaaaaatgaattagtatagttttctcaaacaatttttctatagacatcttttttaagtaagcgtgcacacaaaaaattaagatggtagaaaaaaaagtagccggaaatctctaaaatgaatccgaaaatcgaattccgaaaaaaaaatactcagaaatccatagaatgaagccggtgcatgtaactcaatataataccatgaatcgacacgccatatatggcccggaaaagaaacatggagatgatgggagaaacatggaccgtccaatgatcaaggagtagggtgaggatcaaaggggatgggtacccatccatggcccatgcacacaccccactcgacacctagcttggcaaccactcctaaaggaggaggaagaagatggtgcatgatgatgcatgagctagtcttattctatgcatgcgttcgatggctgaagatggatgatgcagcctcctcctgcgttgcccccctcgtgccctagggatgggagacatatgcgccttttcggtaatgctgcgagtccaacacccactcggccaccctcccctgatacctgtatgaagttagcttattacgatccctttccatcttaaaataaatcaatcactggctaagaacggtcgtagttgatcaccatttcatcaccatcagtgaaatgataaattaaacaagcatactattttcattaaaaaaatcgatttctaggaacgaatctaaacttagactacgtttaaagatttataactagaagttattttttaaaagaactgagggagtatgtatgcaccttgcgcctctatacgggcatactctctctgtaaaaactaaaaaaagaacaaacctgagtttgaatctggacatacgctatatatgtctgatttaaacttaggctcagtttttttttcgaagggaatatgcatgatgcatacacctgctatgagttagatcaatccatgcatggccgtccaattgtactgtggtgccatcatcatgcacccatatgcactgtatccgagctggtccaaaacactaagctccctgatcactggtcccaaacactaagcccctgtttgggacgcggtgccttagtcttttccattagtactttttaaagggattaggctttttcacgtaaaactattaggggtttctttggaaaacaaaaattttacagaactttaacatgaatcggttcgattttcatgaaaagcgttcagaattccttaattcatttcaagcgaggccttatgttttgaatgaggcataaaacgaggggcgggtatacatccccttaggcattaagtgacgaaataattttccatatatttttttagataataagaaaacatatggaaaattttccatgtatatatatgggcgtggttaagaagttcttgtattatctccatgtgaattgtgaaggctaattatattggggctttaggatttactacttctcaccagcatctctttttctttaaccttggacagacagtaaggaactcccctacggtatattaagtttccttaatataacaaagtttatttacaaagtaaacaccagcatctcttgagtgacgaaatcctaaaataacactgcaaaaatgagatattttgtggtacattaaaaaaaacaaagagctagctagctagccagatgatcaccagtacattgtactgcaatctttttgtttgaaccgtgcacattgtgcaatctacagttacaacactaagccgaaatcaagttggaacaaataataagtggacaccggaaatacttggcacatcaactttgtggagcatcatatcaaggccccctgattaattaagtgaccaattaagcatttggtgtaacctagcttgagtcacccaacacaaaacacactgggaccaaccattagctctcatgggtaggcatattggatccaattctcgattccgattgtttaattagtttgatccctttcatgtgcttttattattcattgccacgaagattgaagcttttaacacatctttgccatatatagtaaggttgtttatatatgcctgctagcttaattaattatttgccataagccatagtcagaatttaatttttagaacttgaagttgatttttttattttccagcttagacttttaaattgctaagaatagaaatataaacatattaattcttaggaaaatgattctatactcctaggattacgtactcctgttcttattctaaatttatactaggttgctttgcgtttatttttctcggattacaagccatagctaactcagtcaatgacagctcttgtacaacatgttgctagctgctcgttttcgatggtcgatttccaatggcatgaacatatataattaaggtcttctttaggcacaatgagtttaatttaacggattaagatcgcacttccaccgaccaattgagttgaattccttagaattccaacatcggcacctgcttggaatgatttggcccctagtgtgctgggcactataatatttgaaaatcataagccccaggaatctcccaacatacatgcatcacccttatctttctctccctgccaagcctttttttttctctctctttttgtcttgctttcttccaaatgattattatttctccttgtgatgatgatgagccgacagtgctcaattgagctgttccgttacatgcccggaaaaagagctgttggttatatggactgagttcctcttacttaagttatgtgattttagaatcattaacatgtggtgtccatagtaaagaaagactacatgttagtgattcaaagtcaggatgtaaatccgttgttcatgtgtattggatatgccttcaagtaaaaggtagaacaaggaacgggatatgtatgtttcagtttctaaaagaatacgagtgatgaggaataacaggttattaaaatagttgcacaattaattaatattattgtctactacctcctttcttaaacagatatcattctaaattgctgtagtcaaagctataaaccttaaatgattaattaataaaaaatatgaagatttgacatgagaaaatgatatggtatatttgatcatcaaaagcaatttcatataattatatttttaatagcttttagaaacatgtagttaaaaagtagtgataaaatatatatgtgtgttggtactgggttgatttttaaaatgacaagtaaaaaagaatgcaagaagtaatagataaacatagagttagttagcaaaggatggaccatctatagacatggcgcacataagggtacgggcgccaaaaagttaaatgatacatctctaacgagatgtctaaacagtaaccatggtctctcatgcctctttgtcttataaattttggaataattaggtgccttgtcccagtaaggattagagtttctttttctggatatgcctataaaggccatttagattccattgcaatcaaatccatcttttgctatcacaattcttccattgcatgaatgaattcagctgataatctccctttatttaaagtagtgagttttccaggcatcgacaacgagatcaagcaccaagccactagctagagacccttttgtccaactgtaaaacccaaccgatgat

SEQ ID NO: 9687 - DNA, 23740 bp, Oryza sativa
ctagctagagacccttttgtccaactgtaaaacccaaccgatgatgtccaacactatacactccataaagataatattcctggtacctttgagaagtggcactagagggaaaaatctaggccccttttgagccaccaagaggaaatctgataggttatgagcgaaaatgacattgctcccttctaacaccacttgtcagcaacagttcattaaccagtggaaacaactgtgcctaaacacaaagttgaccgagaattcaaatgactatttaaccctctaacatgagagatgcacttgatagtgtaatgtatggtttcaatcttgaggtctcgtgttcaatccccaacattctcataatatttttcttaaaatatgttaaaatatattttcttattattccgatacatgtagtagctcttcctaccattttttgtagtatgatgatcacgatctctcgctttcacttaaaatcatcttctctcctataaaaacggttcaacttaaaaaaccgatttcttaaaaaaacaaacgttataaaaaccaaacagattaatcggtccaaatcctttcaccaaagtaaataaaaaaccgttataacgcacgggcctaacagtcttgagtaaaagttcatctactgcctaactagcacgcagcactgcaaccaaccaaacgaactaattcaccgaagggctctgctccggtgtttggcgagtttagccgaggcgcccgcgcgaaaaaaaattgtgcatatacttttttttaaataatttacgttcatgtatctgtatgagaagaaatgtcacaaatatatatgtcccacaaatcgaatacgcgggagcgctcacaaatcacgttgcggattgtgggagcactgtttgggccgttcccgttgaatgggcgagcggaaccgccatggtcccgcggctacaaaaatgtggcagcgtggtggccagcgggaccacacggcaccgagacggtcccacggttccgttgcgtggaactggctctgtgaatagtagtaaacaatgtccaaacagcgtaaacaatgtctcaacggtgctaaacagcaccgaacagtattatatatgtctcaccctatatatgcgcagccggtctcgcatgcccagcccgcgggaccgtcaatcccgtgtttttaggtcacgcaaaacactcggtcctgcgttttcaccatgtaggatgtgcatatttatgcaaattcttcgtatgccgtaaattattaaaagaaatatgtatattcacaattttttttttttgctggcccgcgcgagcgagcgagcgaaatcacgcgccgtatcgaggttttcggtgggccgctagcgcgcgacaagtctgtggccggtgagtggtggtctgattttgtgctgcgtcgtcgccggcggcggtacgtccacggcagaatgggggcctcggatgagttgtcgcgctcccaaaattcccaataacagtggttcatattagagttgacatctatgataacaacaatatatatacaatgttcatcgagagtttgacatctatgacaacttggtggccctgtttagcacgttggtttttttgtcttcttcacaagacccacatcatacatatccataagcgattttatcatctttttacaacccgcacaagatagtgcgatatttctattgatatagtagaaaaaatgtcatgtatattgtcgaggaaaagaaaaacaaattaagcacacaacacctctaaggaatgatcatcgcctactcgttggttggcttattagcggtaaccaaaatttaaattttattgcattattgtggagttgattttaacttttttctaagcacattttccagccttgcttttgaaccattaaaataaagatatatgtaaacgttttacctataaattattttttcttcatttattttctcacggcttttcatccatagcttaaccaatcaaaactatattaatacattaaccatctatcaacgagaaaagaaaataaattacactcttgagtagtacatgtattattcataatcaaattttatttttgcctcaacttgaataggtcgacctttagcttgcatgttagttccagaatcataaccatgtgcctaacatgcaagggatgaatgtgcatccgcttaaaggagtaaaatgaccttttcaaattaatcaacacaaacctcaactaagttccagctatataaacaccctcatctgaggatgcaattaaacgataaatttgaccaaaatttctgcttcatcgatccagattggtctcgacgtgcatagtatgtttcaacaaacatgacatgccacatgtacggggtatctactctttttttttaaaaaaaaaaaacttgggtatacttcctccatcataaaaataaatctatgatgggatatgacacatcctattatttattatttatgtagcactctctttgcttaaagttatagggtatttttttaggataagattgatcaataattactgtattaaaatatcatttgtgatataaaagttttataatcataagcaagttctttttaatattctactattataaaaattgaaaatattttgccggtattttgatactctctccgttttttaatagatgatgccgttgactttttcttcaatgtttgaccattcctcttatttaaaaattttatgcagatgtataagctataaatcacacttaaaatactatgagtgataaaacaactcataaaaaataaattataattacgtaaatttttttaataagacgaatggtcaaacatgtgagaaaaagtcaacggtgtcatctatttaaaaacggaggtagtatgtcatatgtatctaagtaggttttttaagtttgttcgcttttggaaatacatatccgtgtttgagtcggattttaagtttattttgagaaacacaaaaggagtcgtataagaaatatctttaaaaaaactcacatgctaacttgagatgaaagttggactcttaattgcagctcatgattttctaaaaaaaatatccaagcgaattcctaaattgaatttcattctagctaaatcgtataacaataataagatcaaaatagcattcacccgtagcaacgcacgggcacttttctagtaaatataaaaactttattttgtgtcacaaaaagtgtatcctagtagagcaatcgttgatcaaattcttatagtaagaaaacaaaatgtgtcatatattttaaaacggggagatatataatattagcagcccaagcccccttgtccagtcatctcattatgatcatgctgacaattactccctctgaaaaaagaaatctagtacagaatacgatatcttttgtctagatttataatattaaaatatatcatatttcatattaggattattttttattaaacggggagagtacaagttactacagcggtacagcccatccttcctttcatgatggtataacgtacggaaaggagtcgccgctcccgagtagtaactagtaaggctccattcgaaaaaacagcttggcttagtttttttaaaaaaaaacattaaacgacaaataatattatcctatactctgttcattaagtacttcgtcctgtactctgttcattaacaacttcctacttttaaaatttgtgtcaaaatatgataacttctccacttacacttttctcaactaatcacaagctcataaccttctactatttaaattccttacatatattcttttacccaataaatcataatattcatctatttaatttcaccaacctttttttaatacccatgttaattctggaattacgtatattttgggaccgaggtggtattaacttattataaacttaaaaaatgtgtttgtttgatttctctttaaaataacctctgtaaaaaaattctaaaaaataaaacacgccgtttaatgatttaagagaacatggcccaataagtcggttggactcggtttttctctggtactatatccgttccaaaataagtgtagtcatgggtatccatgtttaacatttaaccgtcctttcttatttgaaaaaattaagaatttttttttaaaaaaagtacactcataaagtattattcatgttttatcatcaaataatattacaaatactaaccataaaaaagaattgtaataagacgaatagttgggacctgaactaaggtaagttagatttaggagctgaggtctcccaaacgggctcgtagtgaagtactgatccatcgcaatgctggccatgcacccagcagcagctcatccagagagcgtggcatccagcgatctcagacaggagtagtctttccccccacgaaacacaccacgacgccaccccgctcggtgtacgtgaggccccagatcagccgagacgacgaccttgctgatcgaggcagcgatcaaccaatcataatgctccctccggttttattttaattgacgttttaaacaatgacatggtctataaaatatatctttgatcttatttttctactataatatgcctcatctgtttcaaaacgtttgacaccgttaactttttagtacgtgtttgatcattcgtcttatttaaaaaatttaagtaattatttattcttttcatatcatttgatttattgttaaatatactctcatgtaaacatatagttttacatatttcacaattttttttaaataagacgaacggtcaaacatatgctaaaaagtcaacggtgtcaaacattttgaaacggatggagtatataataaataaatgcatgtttacttttattatggtgcttatttatactaaatatttttaaagtacatatgtagaagacaaaactacatatgttgttctagtttatttatactaaatatttttaaagttatggatggtcaaatataaaagtttgaccttaaccttctttaaaacatcaattattatagaatcggagggagtactatacgggatcaaaccgcggttttgcaaaacaatgcacaaagttgccgcactcccgcatcgcaaatgaccaggaacactaatgactgctacaaattactgtaaaatcgtttgttactccgtactaagcatgtataagagcacaccgtatactaccagtagagattgatcgagatcacagtaaaataactccaactcaaatctactttcccggcacagtttacggccatactcagtgtcctgtgtccgtatacaagtatacaacagataggtgcagtgacaaattctgaggctctctttagttcccacgcaaaaatttttcaccctgtcacatcgaatatttaaacacatgtatggagtattaaatatagataaaaaaatctaattacacatattgcgtgtaaattgtgagacgaatcttttaagcctaattacgccaccatttgacaatatggtactacagtgaacatttgataatgatagattaattagacttaataaattcgtctcgcagtttacagtcggaatatgtaatttgttttgttattagactacgcttaatacttcaaacgtgtgtccgtatatccaatgtgacacgtcaaaacttttcacccttgaactaaacagggcctgagtagtactatgaaacggaggtagtatatgctaatgtactgcacgagcagtagacagcattgcagtacctcacctttcttcctctgccatcctctcttgccgcggctttcgccaacaacgacagcctgctatgctcacatcggtgcctccaggtctccactggtggaagccaaagcaagcagtgtgtgtgcctgtgagcctgtgcagcacctggcccatgattctgcttccacccttgccttctgaaacgggcaaattttcatcttcccttttcccctccctgctgccagctgctgatgatgcgttttcagaaggtaacagagatgaatgccatccatccagatgtctgatctgcacgtactagtacagcatggatccattcctggccattgacaaaattcgggacattttacttgccatatgagttcaggggacagatgcagagtgcttggctggtagactggcttaccgttcttcattttttttttaccatggtcaagtgtcactatccctcttgccgcagatcatcaacagtggaggctttatccgattgtcctctagcacgtcgtccttgagcttgttgggcatcagcttcacattttggcgccatgccatgaatgcacacactttatactccatctagcttccaaatcctgggtcttccctgttcctgaaagaaaaaaataagttggggtgcagactgtaagtgacatcaattcactcagctaaagaatcacaaaagtggtgaccaggtttacaatgttctcaagtaaagacacagtgtcatctctcttaaggattgacggcaaacctgatctgttgtctattcacctggatatatacatgcagttggctacatcatgaatgctgtacatcttaatacaaagtgctattgtttctgactaaatattcatgatctgattacaaacgtgtaactgtgaaatgcatgttagacaaactacataaagagggaaacgctggaatcccaggatggacaatgactaaagcacatgaaggacaaaaaacaacagaacaagggtggtcatctaccattccaccaagccctgaagttgtggctttcggtcatacaacagatactaacagagatctcaggagatgctagcttggtagaagagatctttggggcttagactagagatcctgggggccacctgacaagatgctcttcagtaggagagtgggatggctagcctcatccttgtcctcttccatccgacaagtaggaggttttcatgcttcatggatcccctctgatcaacttggttttcagtgatgcccacacagtgacccttcaatgaccaaaaattcgtcgttacatggatgaagttcaattggggtggcatctctgttgatacgttggaatttcacattccatgacctgtaccatgggcaagtcattttctcaatgttataccagcacacgatagattgaaacagttaacgaatccgtacctccagtcagcaccgagtgacacttaattttggttacatggcctctctgcaactactaatgacattcatgttactttcttgattgctttgttgctccatccaccgacgagccacggatggctgatggtgatggctcaccttaatgccatctgcctatctgcctcattgatggatctaagaatgagagaacaaagcattcttcagaaagcatgacaggactcctaaactctgcttactgacagtgccatagtggacatatattcgactctgagtgagaataaaatgacaagacacaaagtgacacacctagcattatttcatcattcttttgattgcaagaacacataaatgaaattttgttgtctgtacacattataatagccaaacaagaatatggagcttatttatgacaagatatgacaggatcttagatattgagttgtgagtttagatatagacaatgaaccaactgagcttttgtatagtaatgttgatggtatttataaaacaagtcttcatcaccaagaaattgtagcaatcctaccaagcaacaatcatgaaactcagatgaaacaagaacaaatctatttgacatacacctagagtaagcaaaatagtattcttggatctccaaaacagtgagtgcacggcttcacggttgcacaaattccatgatttatggtttaaagaatgaccaagccacattaagtgctttgaacaaaacaagccatttcacacatatgttttgttgattgggcaagagcaaataagtacttgtctgtatccagggcccacctgctttggatattttaaatatcctcctaaacatgtactttaaatatattgatataagcatgcaaacagggatgaaaaacgcaacaaccaagttccaatagtggagaaaccaacaaaacttagcaaaattcaaaagatataacaactacatggttatcttttaaacaaaacactacaatgactgaatggtcagactccagttacctaagaaatattcaccattgcagattcagctaaaaagatcaccaaatgacatgcgctcagtccgggcactgccaaaagaggagaaacagaattttaaatatagtcttgagctcttaaaattcttgattcagatattcttataaagtgatttaatataaaagagttgatttaatcttactctttggcacaacatatggatcctgtgattccctgggccaatattgtcctcaattgtcgattatcgagacacaaggagtcaagggcatagtgcctataaaacctgtacaacaccaaacatcaaccaaaaggtaaagtatgaattagttattcaatgtaatgtacactataagtaaaagtgataacacagtcgcactcacatgctcaaggtattaaataccagttttaacagcaagtgcatttaatatgggtagatagacaagctcactatttttctgcagagctctgcctagcacacaatatatttgagtatctgggtaaataccaacagatagcataatcgggacaaacataaaggcttctttggcaaattgtcttttgcaaagtcgattgattgctgcactgaaatcttcaatagaagcttcaaatcctgcatctagaagcttaccaactaacaaaacagcattgataggcattccttttgcgcactgagctttgataagtgttgtgtacgcaaattttctcaacttaatgccattttctctgagggactccaaaagtatttctgcttgaataacttttcccttcaaacacagcacattaataagcaagttataagtaacaggtgtcggcacaaggccacggcataacatgatgtcatgtatgtggaaagccatctgaacgttttctgattcacagaaaccttgtataagggtattgtaagttatcgggtcagcattaatacctttgctatccatatctttgagaacattgatagcctcatcaaatctgagctgcttacaaagccctttaacaatgacactgtaagttactgcatttgccttgatcctctttgcaaccatttcatcaaaaagacttagcatggtattaacttctccagcttcagagagtgcatccatcaaggtagtgtatgtcactgctgttggtagaagtccacttagctgaatagccctaaaatagctctcggcaagttgcagatccccaattttacaatacccatatagaagagaattgcatgtgacaatggttgggtgcataccagctacagtgatctgatcatacaaacgaacagcatttacaatatcaccaagttttgcataaccatcaataacgacattatagaacactacatcagttggctgatattttctagctacattttccaaataccaccttgcttcaactaacaatcctttcttgcaaagtcctagaagaatagaaaaatggttcagtgatgttggcattaccctctgagaactgcacattgcattacatacttgaagagccttttcaatttcccctagcttgcaatacccatggataaggatggaatatgcgataacatccatatccaaaccaatattgtagatctcgccgagtaggttgtcaatttcgcagaacatgccttttttgaagagagcattgagaaggacactatatgtgacaatattcaactgcaaaccttggtctaggacatccttccttaccttcattccttcttcaacatcaccactttcgcagtgaccagcaataagtatagtatatgtaacaagatcaggttcaacaccttggcctctcatcatctggatgattttaggaatttcttttgttaaaccaagcaatcggtacccattgataaggctattgtaggtcacaatctcaagttccattccttcttttgtcactctctcgaaaagatccaatgcttcctccattgaacctactttacatagaccgtgtataagggtagaaaaggtatacctgtcagggactaatccatatttcagcatcaggcataaaaatgattttgcagactgaacaaacccccaattacacaatgcagacataagaatgttaaaggtcattcccaagggtttaaactttccctccttcctagcttcctgaaggaaagataaagcttctccaaccttatcttgcttacagaggccattaataataatactatgcgaatattcactgggagagacaccacaagactccatttcttcaaaaagctccaatgccacgtctgtcatccttaagccgtgcaataaactgtcataggtgaacaccgagatttgcatgtttaggctgctcattttactaagaacgtaaagggcatcatgaaccatctgagctctagcataactgttcgctagagcatcccatacacaaccgttggaatcacactctctgaatctgttccataagatgtcacagagagcagctgcagacccagatcctacagcaggaagcgcaataagattaaacgcgaacaatttttatgttactagtttgtcatacttgcagagaccttctagtaaaaaacgaattacagtaataatactacaccaaatacaactatgtatgcattgctttcgacccttttcttactgttttttatatggtaatgatcaattgataatgcctctggaaaaacaatatatcctgtgtcacacattcatatcgatcagaagttcaaaactaccgatgccattcctacgcctcctcacaccaatcaccatagttattcagataccacatgagtagagttgataatcagaatggggaaaattcatagcatgctcaccttgctcagtcaccagctgcgccaaggctgcccgcatcgcgcgccacctcctctcccgcagaagctcatggcagagcttgatccgcgcgacagcgcgggccttcctctcgacctcctcgtcatcggcagcccccccgccattgcagccaaccctaggcgctccccgtgcaatcccgccgatggagggaggggctcgggtgtccctgccaacagccgccgcgtcctcctcggactccgtcacctccgccgccgcggccgccgccgagggataatacgagagcggtctccacgcgggcacgggcgggcggggggaggagcggcggcgccggaggtgaggcaggaggaggaggaggagggggagcgggaggcgcggtcggaagggcatccgaggaaggggcagggtctcatggcgcggggagggtgtgcagagctccggctccttctcgagctagggccaccggcgctgcacggccgcggcggcgaagagcatctccggcggcggcggcggcggcggaggcggggtttgtgtgggcggcgcttcaagggaaggggattttaggagaggtgtgacggggaagtgggccaaatgtttgtggacttatggagtttttgggtgattctttggaggcccatattgtagggcactccagcccaaatattcgccgaaaggaatatagttagcagcacagaagtctatacgaagtcctccagtatggactcaaattttcctctctcactgcaacatcagaagctgcatttgcttgaattttgaaaatcaggtgaattttacttccttggctggtttgcacagtgattttctttttatgtggtgtctacgtggtaagccccacttatcagttagaaacgatagacccacatgtgagttacaactttagtcttcaaccccacctcccctctttctctctcgttctccttagtggcactgtctgccacacgatctccttgaagacgcttgaatctagcggtggagcgatggtgtctacttagactcatgcgatgaacctgtggacaactccgatcgcctctactgcacctcgatctcatccttaagtttgatagggaggaagatgagagccatattgtcgtgtgcctgaggaggaggagtccttgccggacacgctcacgactagatctagtctctcccactctactccctttctccggtctccttcgcgttcgctacctccgccatacaccctaagctctgttgccaccacgactctttctcaagttcggttaggatagctgtaagctaaacttgaggaaaacacaggagagatgaaggtggtgtatccgtgtatgatctcagcgccacctggaggttagctaggatgacaacagcgtgatgctattgggggagttcaatagaggcagtgagatctagaagctcaacgaagccgaagaagcgactccaacgggctaattgcatcaagagccaggcatggacatggtgcagctttggttggagcatcaagaccattgtcttgtcgctgaaggccacggttagcagaaagagagtagtagagggagaatagcgtgataaattaaggttcactagcatgtgggcactacaatttttcttagtgactttagcataggagaccatgtcagcataccacgtcagacaaaattaatgtacaatctagtcatagaggtaagttgactttagttttcaaagctaagggaggtgcagatcttggtactgtggtttgaggaagcgaattcagattgagcccctagggaaggcggtgatatagacattttctgggaggaaattagttgagtacgtactccgtactaattattataaaattaaaaattggatttatctgatatttgaaaacaacttctatatgaaaaattttccgtacaaaataaactatttaacagtgtaaaccgtttaatgatttaaaaagcatgcgattcttctggacattaacaaatgtgtctattgcccccgcgtcacccccacgctggcgaccggagaagggtgaactgaaaccctagcgccgccactccctctttccctcccctgcctcgcctccaccggagctagccgccagacaccgcgcggctaactaggatggtgacgggggggctcagtttcatcatcctcatgtgcggagaggaggggcagcggcatggagcagggccgcatcaacacgttggggacaagtggcagcgatggccacatcggcgcatcagggacaagcggcggtgacgacgcgacgaagtcaagcgacggatggcatgatggaagcacgtggagacgacggcgcccctaggggacgccaagctgctcagatctggggccatctcggcttgccctcgctagttgctacaagcagctagggcaacaggtcggcatggcgatgaaggccctcccacgcaatggcaacgcaatggggcgagggttgtgcagcgctggtggcacggttggtggcgtggcggcggcggcggcgggtgtggggttccatacccaccttggttcaaaagtgctaatgggcaactggagcgactggacacgtgtcgcgtgcagaaagggggcacagacggcgtgcgtgtggagactggagacgattttttcggttttttttctatttctatttgatttttttctggttttcttttggtttctctttctttttttttaaagatgtacgtttgcaaagtttgtattcgtatgtataccaaattttgtatttgcacgtatacaaagtttgtattcgtgattttaatatgtacatatacaaagtttgtatacacatacgtgaagtttgtatacgcatatacaaactttgcatacgtgtatacaaagtttatatatgtgtacgtacgggatgtaaggtttgtatacgcgtatacaaagtttgtatttgtacatacgtataaaaacataaaaaaatacttgtatataaattttgtaaatgtgtatataaactttatatacgtgtataaaaaattagtatacgtaggtataaaaacctaaaaaaatacacatatacaaactttatatatgtgtatacaaactttgtatacatatatacaaaattggtatacgtacgtataaaaacctaaaaatacacgtatacaaaatttgtatttgtacgtatataaagtttgcatacataagtattaaaaacagaaaaagatatggaaagaaaaaaaacagaaaaaaaacaaaacggaaggtacggaagaaaaacagaaaaaaccaaaaaaaaaagagaaaccgaaaaaaaaaacaaaaaagaaacggaaaacgcgggcgctcaagagaaaccgaaaaaaaaaacagaaaacgcgggcgctccaagcgagtgctgtccgccgcactagtagtagagaggagagactagatgggttagaactgatcgcgcggggcgcagggagcacgattgatcgcccattagggctccccaccttggttggtttcggcctgctctgtcgacgacggtcagtcgaggcgcgaggaggagtgcccgctgcggtgcttgatcgaggagaagtagcagcaaccagtggcatgcaaccttcaacagctggcgacgtgagcgagtaagcggctggtggcggtgacgctttcttctcggttgccggccgaccaatatcctttcggtggagctcctcccatcctatggctagattccgttctggctgtggggagcttttgggggagggtggaggcgcaagctttgtatagcagaggatgacgcgcagcatggtgggtcggtggcctcatgggcctgcctgagttgtggggtggtgggctaggcatggtggctagagagacggtccgatggtccgacgatgtacattgtatgggttggttgtgtggttttggatgaaaatcattggcgaaagcctcgattggcctttggttggctcgactacggcggcgcccttaggcatcgtttccctccttggaggcgtcattatggcgtcttttctccctcaccgtcaatcttcctgcccgtatcatggtcgttggtagacttctgtgtcgaaactctataggcctatctgttcggtgaggccttcacattctaggctccattattggatatggcgagcgtccaacattctttgtttctgctaggtgaagccagagctgcttcgttgtgatgcgatgaagcttggttgcgataacatgttgtagtcttccaggggtgggtgttagctgttgtgcaagaagtggtgtttggcagcttgggctgaggtccaaagcgggcgtcggtattgctttatttgttttggcgatgcctttggtaataacggtgtgttagctatggagttggagctgttgtgtcgctaggcgacaagctcgccaatgataacacttgtctcaccaagtcatgatctctgcgtcgctttacaacaaactctttatcgatggatgctttgggctccaccattatttttttttcgattattggtagcgtaggtttttttcgcgcatactatgcggtagacgtaaatggaacgaaagctagccggcaagttaatttaacttagcgtgtgaagaaccgaagcgcataaagcgtagtaattgactcgaccgcgagcgacgtcgatcgatctgtctccctcgatccataaccgaccgaccaattacgcgccgtacgtacgtggaacacggtcgaacgatccctcgatcgcaccacacgatgacaccacaacccccacccccccccccccccggcaaaaaaaaaaaaaaaagctcagccacctgcgtctgcgtctgcgtgccaggcggcgatcggtacgagtagttttcgctgccagatcagaatcaggttctcctcgctcgtcgatcgtcttccgctacttaacccccgcacacacaccgcccccatttccatcctgcacacagccatttcacttgctttgctccacgcctccacctacctaaatcgctctcattagtactcaattaagtcgatcggcgagcgattcagcgcggctcctcgaccgatctctccgtttcgtcagatcgatcgatcgatcgatcaggtacgtgcaacacatggtgtacgtttcacatatatgtcattcaacaaattaggtagcatcattttagtagtgccaagattgattcaaacaagccctatatcaatttttgtgtttattgcaagtagccttctctcactcagcccatgtgctctgtagtctgtacaaatatagtcctactactactcgagttgagagattcagtttagcacatactgaattaagcccaagtttagatttgaagtttttcttcaaactttcaacttttccatcacatcaaaacttttctacacacaaacttctaacttttccatcacatcgtttcaattttaacaaaacttccaattttgatgtgaactaaatacaccctaagggcatctacaaaggtagagtctaatacgagctatctatattaattaatattattagagactatcctcctacagtagtaaagacaataagatttctaaaccattaatacactaaataattttttattatacttctttccttttctctatcctcattgcaataaattttccgttaataaataataagagtcgactctaatccgttgtcatgcgtaacagcgatatttctcttttcttccctctttttcttccacgtcatcaaatttatttgcatgacaacgaaaagagctcgttattaaccaccattgtacatgccctaagctggaactgacatatatgtatatgcatgtatcgctggttgctgatttggttgagatgggtttaatttaattctattcaatttaattgttgtttgcagggctgtgtattgcgccgtgtagtacgtgagaggatcggagtcggagcagcgagcgagatttgttgaagcaaattaagtagatcgatctcatatcgatcatccttaattaatttatcatggagctggtgctggtgatatcgctgccgctgctggcgctcatcataatcgtcgccatcgtcctctgcgtcatctgccgctagcttagctgattccttcctgcctccgcgatcattttgcatacatgtagtatgtcagtatgtggtgcatcaaatgtgatcattttgccgcccgttgttgttgggcacggtgattgacgacagaaagaattactcccttcatattttaatgtatgacaccattgactttttaaccaacgtttgaccattcgtcttattcaaattttttatacaaatacaagaatatttatgtcatgtttaaagaacatttgatgataaatcaagtcacaataaaataaatgataattacataagttttttaaataagacaaaatgttaaacgtttattaaaaaattaatggtgtcatacattaaaattaaaatacagagggagtactagagaacacatggcttcttgttccttctttggcctggtatggtgtgagtcgttgtgactagtgtgctcccaatccaggctgcctatacatttgtccatttcttcttcttcttcttctttttcttcttcttcttcttcgtttttctgttggttactgatgagttcttttgctaaggtttccaactctactctcttatttttcacgtgtatatgctttccaaactactgatcaatatctttttttttcaaaatttctatgcgaaagttactttagaaaatcgtattaacctattttttattaaaaaaactaatacttaattaatcatatattgatgagtcaatctatccttatatgtatgaaagattagttcacaccactaccaaccgaacgcagctctaacacgaaaggcatcgattccaagcgtgcggtagtctgtccatggtgagtgcgtgagaagatgatcccaacggaagaagagcacataccgtgcacagtacagctcctgtgctgtgtgtacgcctagctgcaggcagcaccggccggcacgtggcacgcggtttttctgggcttttggcctcttccccctaggctcgcacccccaccaccacccgattcccggaacccgccccatttccgcctcctccttcgccttcgcggcttcgcctctctcccacacatgcatcgccatcgccgtcatcgtcaggactaagctctgctctgcatctgcaccaccacccagctgcagcccgaacaagaagacgagcatctcatctcatctcatctgccgatcgatcgattcgctgcaggtacctactattaccactactagtacggtccttacgccctctagtgtcagagctaagcgtcaatcgatccagccttttggattcacgccgccatatagctcgcgctagctccccccaaatcgttcccggtaatacttttgctgctggtttcaggcgggcgagctgctctgcagctgctaactcgccatggcaccatcaacgctgtagagctctctgtcgttgctgcatctgtcctagctaattaaatcaagattagctgcggctgtactgatgtagtagtgctagtactgcaccttttcatttcatcgggtggatgagttttttccagatctattgattgatcatctgtttaactgttcaagatagcttttactactatatagtcaattaattagctctagtagatttgacatttgagagtttgaggctactcatgcttgcttgctctgcgatttttttttctctaagaaaaagagagagagagaggcattaatggctactggatttatgtaggaaatggagtggttgagaaaccatcaactgtagcttccaataaaattgtttgtagtagagcaaggttcaagattcatctgttgacttgtggagtcatctaatagtaacagtcaagagtgagatgtgggttagtagtgttatctaattggaatcggatccaactgttgccaactagtactagtacttgtaacatgggcagacactccagcagcacaagcagctactgtagtgtttagctgtacatttagctgatgaaaagatgacgatgctactactctgatcttagctgaatccgagaggcaacgatttctgtcggaaattgatctcttttttatgaaataaccggaattccgaatgcttcaaacaacagcaaaagaaattcagttttacgcgttagaagttaagcaatccttgagaaattcggtgaggtttatctcctcactcgcattgattccaaagaacaaatgttgatttgatagattatgatgtgcgagtgcgactttcttgtaatcgcgtagcgatatctcctcctcctcctcccctgtttcgtgcggtttcgctgccacgagtgtgaggtgtgtgaggaagctttccatcccctctcttgctctgtaccctaacttgttttcgtccctttaattcatgaggtagagctcctgcctttttcgctcaatcacatcatatttacagttacttcacccattgatatgttttctcaagaaaaattatatgcgactaaattcatcgtgctatacaattttgcaaatcgcaagcctatggttggagcacccatataccgcatgtttcagaacacataagtacagaaaaaaaaatcatgacagcattttgctgcttttctttttctagagaagtattttggtactgcctagaagtgacgaagaaggaatttatcaattttggtttgaattgcagggagagctgaacaatggagttcgtgttgatcatctcgctgccgctcctcatcctgatcataatcgtcgcggtggttctctgcatcatctgccgctagctgaatggtgacacctcattgttcttcctgcccatatcttgatgtgaacatatcatgtatcaattgattagtatctcatgactcacaacagagcagtctcgtactctctttggggggccagtgtggttgtgattagtttggccctagctttgatgagcaaaaagacattgattctgaatgtcatacatacatatgtgctgtgagaatcccctctctgctttggttcgtttttgatattattcatacgggagatcggacagctgaaagcatgatattctcattctctttgtcattcttctgaagatcagaagcatcatctgctttgtgttgttctgtaccattttgttcatgccgccccatgagaaaaaaaagccacatagtgaccatacttttgagcaggaaacgcaaagagaagcctgatgagaaaggaacatgtggactgtttggtacgccttgttctcacgccttttgtgtgagatctttgcttttgcaaaaatatatatacatgcatatagtgcatatgcttttgtctgtgctctttcggatgtccttaaatcttaaattctttagtctttttttttcttctcttttttgagttggatatgtgctggggctgaaaaagtctagcaagtgtaatgccgacactttggttcagataagaaacacttccaatcccattagaaacatctggtaaatgtgtgctgatctgggctgcaaaatagccatggcgagcaggttgcaatggcatggctcatgtggaatcttcagttacttattggtattgcgttcttcagacagatagaaagaagcatggtggagcctgaagcttcgcctgtatctgagtcgagcaaagaaaaagttgctcaagatgtacacgcacaatcagatagacatgacaacacctgtctacctgctactggtctttacatgaaagatcaactaatgacaaaccttttcaacaactaagtacctatttatgatcacaaggtcttcttttcacacgggggtattcagctaacgtcacttttgaaaccaacatctgaacaaaaatcactggaagactggttccgtttctagtcctttcatgggttctccacgctatcacttcgcattggaaaccttggagatcaacaagcagaggacgccagatccaaatggaaaacattaccaggaaacctgcaacaaaatggatgaattcagttgattacaagtatcaaacaacctgttcatgacatttgaacattactatgggggactttgaggccactcaaaatttcagtttgtggttttgctttgataaatgctattctgtgcaacagacgaaatgaagtgaaagagatgatacttccgccataaggtgagcataatattaaccagaaaaggggaaaagagtaagccatagcacaggcaccttatctaagagttttttttttttttttactttctattttcgagacattggtatggtatccaatacacacctttgactattgatttttctagttatatcttagtaagatcactaaacatataatgacatgagagaattctttgtgacatatctactgcaactgcaaaggtgagaaaatctaaaaatcaacaggtggcaattaaactgttatctctctgttgcactggagcaatgggagaatcgaagcagtactaagaagaaatgcatttgtgatatagatcgattaacaaactacacagagataacgtaatatattaaaaagtcaatagctatggttgctgtcgactgcgtctgtaccaagtatgggcctgaacattggctcggtgttgggcactgccattgcgcagggcgcctgcctgggttagacaatatcataatagtgtggccaaaaacactatatgcctttgataaaggacataaactagttgaaattaaagtcctacttatatataaaaacagtcagtactcattgccctcaacgaaagaagggaacataataaatcgtggtagaatggtatttgcagcaaatgtttccccccttcgctgctgccttagaaaaaagatatattatatggacagaataaacaaacctttatcatcagttttcagttcattagaattcagaaacagtcatcttcttgataaatgtccagtgaataaatatggcaagatatcccttcaggttattcttgctcatcataaataaaatatagctcacaagctgccaatgctttagacacctcatcttgtttttttagaaagctttgttgaggacaaaatctatgttattgccatcatttaaacctaactatttaaatattatacaggctaatgaatggtattgtccttccttttcttttgtcaatgtcagcttaagaaacaaaagatggtcagttttggagttgtggtggcatgataaatagatacgtgttggaagccttaactctagttacacctcacggttaagtttggaaaaatatgtgagattcagatctgctacagagcttataaattagattttgttgagtcaaaaattttctttgtcaaatattaagcttcagcaaatggttattaaaggcatgaagtatgaacagcacaagaaggcttgaaacttatgttcagtggtaaaagtaccgaaagcacatgatggagcagagaataacaacatgaacagggtgtaaaatgaatgtaatacaactacaaacagaaacacattcaaaatttgctgttagttgctaccaccccatagttcaataaatgtgagccaataaagctttactgaaaccttgatagcataagcatcaaactagtgcttagttttaaaacttccaaccaccattcagggtacaagaggcacaagtagcacccacaagaataacgaataggtgggtaggagagaagctctgaaagagctaattcatctaattcagaaaatgagtctacacagatatgtttaattactctttacaaaattttgtggttcattgacatcaacattaagaattatgagtacaccaggttcgaatgtaccatggttcatgcagagttcagcggcagcatagaatccatagatcaaagaaatcaggttttcatgaagtaaagttgttaacaatcataaagcataaagtgttcgatgataatacgtggtggatactcagaattaataaggaccagagactaaatattagaagtattattggagaaatcaatcctaatccaccaaacatatccagccaaaacacatcattatccaatatgcaatacctaatctaaaaggatccccatatattgtcaggtaagaaatttctattcataagctgccctacaggtcagtacactaaaagagaaaatcgaagcagcgcttagaccaacaagagaaaccagaccaaaatgtgcaaattgtgattgattcaccggaaaaaaaggagtaacaatttagcatttcatgaaccttccaagaagctaaaattatgcagatttcgtgcgaatcacccgcgtaacaggacattcagacaatcggtcctcgcacatcaaggaccaggctagcaacctgttctctcgaggattgtctatcagtctatctcctcacagagtcacagcgccacagtgcacgggtaaattattagtagcagttgtacatttttttgcaattcgtgcaccttcatgatattgatagcccacaaattcagcgagatttcaactagacatattcagactgtcctcgcacatccagactactcctagttagtaacagttcttgcaactggctatcattcgcaacgtgaccgtacaagggtaaatttggatgagagaattggggaaaaaaggggaagaggaggaattggaggagcttacatcctggggcgggggcggctagtgcttcttgctccgcgcgggctgccttgagccgtcggtggcgagcctgtagatccagtagccctgcgggggagaaggagagagggatttttaggccgaatccacggcaggaggggtagggagaggcgcgtgcgtacgagggcgaggacgtgggcggcgatgaggaggacgatgaggaaggggaggaggtcgaggagccacggcgggcggaggacggcggcggcggcggcgtaatcccgcgccatggcgacgcggcgggagatcagcgcggcggccgggtgcgggt

SEQ ID NO: 9688 - DNA, 62058 bp, Oryza sativa
  unsure (1)..(62058): unsure at all n locations
tttggtctataggaaataaggactggctttccttctttgggggaaataattatgcttctgttttaagtacctcgtcataatgaagaactatgagcattattttctgataattcttatgttactgactaatatgatagtactgagtggcagtagtgcaggatttggaaaacaaataaatcctcccaagaatttcctaaatttggccaattcggatggcaattttatactgttattgttagatccactgctcgagtcaaatgtattaaaataactcaaactgaaactttagttacaacagaccaactgaaaatattaccggattagagctccaatttggcaaattctgtttattttcttttgggattgtaaattatttaagcagactccagccatgtagactggttgatgcatataaggaaactggattatttcatgctttcctaataataaaatccacaatggtcatgaagtaatattagtagctaatccatagcatcgcaggtttcttatagtagctatattagttgtctctagtgatacattgtctcaaaatctccgtctggtaattagttttctgtgatttttacagatcaaggcaaacaatacattgatgcaaatggtaggtgctgactggataaaatctgataagcgtgaagatgacctttctggccgccctggaggactagtacaggtatattttcttaaagccagtaattttccttcaacggcaaaaggaaccgagaattttaccaagagttatattgcagaaatgtgcagcacaagggggcaacaaattcttttttatcgttaacatacaggtgggattttcattagctatacataaatattggggcctcatgtgatttacaacaacatgcctttttacttatgaccctgatggatataggttcctggttcatccacatacagcttagccttgtattatatgatggataccccattggaaaaggttcctctacttgaaagatttgtaaatggagatgacgcattcagaaattcaaggttcaaactcatcccgtacatctcaaaggtacctattctgcactaccagccttcattcttgtcaagctttacttagtaaatgctgatggtttatcttcggtatatgtgccgcttcaggggtcttggatagtaaagcaaagtgtgggaaagaaagcctgtttggttggtcaagcactagagatcaattatttccgtggaagcaattatttggaggtaaaccctcagcatgacatgtatctccattagtttctcatttcattccgtcatcagaattcagatgcttggtgtggcaatgccatacttactggcttcaataagcagtttatccaaagcattatgtctcacttacaaatagcgcagaataacaatggattgaattttggctactgttgccacttacttgcgcttacggttgacttcatttaccacaatctacgactagcgttacaaagattgtctgaaataaatcgtggcgtaatgaatctgccattctgtttggtacatccagctctgaacatctttacatgcatttttcagcttggagttgatataggctcgtcaacagttgcacggggtgtggtgagccttgtgcttggctacttgaacaacctggtgattgaaatggccttcctggtacaggtaattgtggcatatctaatcaagtaattacacaacgagcttgatgtttcttttacttctcaagattcagaacagtgctgtttcttttttcctttaatgagataaaagattcagaatggatcagtaaatagtgctatgagatgagagtttcagaattgctcttttccttcttttttttttgagatgagagatcagtaaataacacagctgaacaacctcatgaaagaactccttgattccttcctactatcatgaaacaaaaccctgtttgtgtcgtgcagggcaacacgcaagaagagctcccggagttcctcctgggcacctgccgactgaactacctcgacgcgtccaaggcagtgtccatagacgagtgctgaaggcgtcatcagccaccattgaccccgccaacattctttctgaggccaattacagtagtacagcgaaccaaggaaaaaaagaggctcaagtcattcgtttcccctgccggccccggtccaaagatactccttgtattgctccacacaaaagccgaagaattctggctcattctgcctgcctgccagcactgtacattctcctcttgccgacaggtattgcgatgtaatgatgatagcaatctacgcccattctttggcatgccatcatcgagaaaaagagaaagggaagtgtatcctaacggtgacccccgtggcgttcattctgacctgggactcgtctcagcttactgtgagtagtgagattgcatcattagatccaactccaaagcaacccattaccggacacttgactactcctgttccataatatttctcctgagttcgagtgagtggtggcagccatgattataccagagggactcgtcaacaactgaaagcgaccaaagtcacagggattgatatactatgctcctaccattggtaaggaaggaacacccaggcagacgcactcacaacccaaaccctttctttttgcctagtcacttgagctagaagggagggatggaacatgagcaagtggagccggcatttccctttgttcttgagaaaagacaggacatgcaaactatgcttaaggcagggacggatagagatgatggtgtgtgtcgccgtcgcaaagcggcgagacatcgtgtggtcgagatcgctgtgcgtcgtccgtcgtctgcgtgcttggctagctaacctaaaactaaaaggcttccgtctgcccgtgcaccccgtcgccgctgtagcagccgacgtgacaggtgaaccgatctctcctgcattttttgctcacacaaattctgtaccactagtagtagtttgccgcgtcatcgcttcgaaatggagagagattagtgtggggagaagtatatttaagtggacacttgcagggttagacagaattcccatttccattgactcgaacggatcccgatgacgccgccatcgccggcggcggctgcggcggccgggctgggcggggtcggtcgcgcgatgcacgggcccgtgcctggaggccgggctcacgtgcaaaacgcaaacgcaagcgaggccttcgaagccaaaagaccctgtgaaaaaacaaaccaaccaacaaataccaggaaggtgccaagttgccgtgtctctggatcggtcgcaacgtcgccgccggtgaacacgatgaaacgaaggtttaccaaaccgttttaggtcgggacgattatcatgagaatattattgcacatgataaccacggtaaccgtacacggaaacagccgcacgctaacgaacggtcgccggccgtaggatctgccgggatcctatgcggcggcgatggagtcgtccggcgagcgaacggatgagttgtccgggatgcgtcagcggctggtggtggaccggtgtttttttaggggtaggactgtgtaggattaaggacggatgggacgggtttcgtcgcgttctttttttgattgaagcgagaaggaagaggggaccggttgtggtgcgagccggtggtacagcgagaggcaacagtttgggtactgtttgggcgtgtggggagcgtcactgcatcagcatctacttgcggccacccaccacaccggaggattttcttttatctttttttcttttggagtattatttcagaagctttcttttgataaagtttggtttgataaaaacaacatattgtgtagtaccagtagacagtagtacctaatttgtaggaagtataaatccgaaagatattttgcaatgcatccgctagaaggacgatgttgtcgcgtatgttttggagggttatagattgtgatgggttggcggcacttttttttttttttgctgtcacaaacttatcaaaagtgtttgtttttcaataaaagcggtatctaaaaaatatattgcagagtgccttttaaaaaatttaccgctaaaatctcaccttatggagttggatgtagtaaattactacgatatacaatgcactacatgatgggtagctataatgtctaaaaaggtgaaatgactactttcagttcattatagaagaagagagttgacacagtttatgagagaaattagccatcaaaactttacaattgtatagttaattaaaggcaaccaacaaaaacctactgaaaagactaggacaactgtctaatgcaactcatcaccacacaccaatgacctacaactactaagatctatcacatatcattattgtcaagctcatcgcaacaagcagtcccgacttcccatgacgacatgtagcctggacaatcaacatcgttgataaaaagatgtttatggccactcaaattcagggaagtatctaacaacatcttaatagaggacacgacataaaaacattatcaatgtttgttgggaacactggaactaggttttcatctaaaggataatatgagaagaaccaaaatgatgcctttaaagagggaacggtgtccacatgcatcgatgtcaccagcatcacgcgtaaactaggcaagacttttgccgagctcccacatcctaccatcgcaacttccatgagcaaggtggtagctataatatcactatacgcataatatataggacatagtgtttacaataaaattctcagaacaaattctcaccatcttttttatatatgtagggttgtcataacgcgtgaatgagccatgttccactaagattaagaccctatttgaggagcaagaaatggtaagaagcaatggtagtagactagtagtagatttatttttgaattttgttgttagtgactttcttaacttggagagagaatataaactgtaaagaaactagagatttttgaagtagttgtaactactagaagcatagaagaagctttttaagtaagtacagcctagggtgagaggccgtgggtcacgcaagaatgaataaataccaaaaggcaggagagaggcgtctaaacttagcagctaaattatgcaaattagtagtagcagtttattccttccatagagaggctgtgtttagatataaacttccaacttttccatcacatcaacctgtcatacacacataatttttcagtcacatcgtaccaatttcaacccaaacttctaactttggaaataactaaacacaaccagatataactcaaggttagaaaagcacagtcatgacagaaacagaaaggggaaaatggaaaatgaagctccttttcgtcaacttctctgagaagcccccaagttaattactccctacgtacctaaaaaaaagataaaccctggatttccgtgtccaactttgactgtccgtcttatataaaatttttttataattcgtattttcattgttgttagatgataaaacatgattaatattttaagcgttacttgtctttttaattttttttataattttttaaaataagacggacggtcaaacgttgggtatggaaaccagagtttgtctttttttttttcggagggagtacagccttacaggaaagttacaccccacagattgtacggtgatcagtgttcctgtgtgcttgcttagagtagcataagcagtgttaccactagtactactgctgctgcacgacgtgaagggcatccacggtatactccaaaagtagtccataggcaacataatatttgatttagccacctagcaacattgtgaaactagtctttaggaaagaaataacaaaagctacccataagtatatggtctgcccatagagaataaaatatattatttatctttatctcttctcttctactatttgctatccatatacattgtaaagattatatatggatcccatctctattgactaatttttgttgttgcctttacacagagagagacagagaaaggcctctctgcttgtggaggaattttgcagtaatccgatcctgaggcgagatgcggtgtcagcagccatgaaagtattactcctactgtgtttagatacaaagtttatccaaacttcagtcttttttcatcacatcaacttatcagacataattttttagtcacatcattgtcaatttcaactaaaatctaaactttccgctggaataaacacagccttcagctgagagcaagttaaatagtatagccaactactggctctaaatcatctatagtcaatttaatagtcaatttatacaatagttacttataaacatatactacataattaatatctagtcacacctatcatacaaatatgcactttagagtccgtactatagttggctacaaatctatagcccgctgttcttctttcttctcttttatctcttgaaatgtgtctatagcttgcttataagctgctattgtacctgctctgaaatgacagtttccagaggtgatgttccctaggttggttcagagattacgctaccctatgccatcgtcatccacgcagatgcagcagtacagtgtgggagtatacaggtattgtgcagaccgaaggagctgctgctttggaggaggattaattggtccaagcttgagaggattaattggcccattggaggactcgaagctgttccagtcaaaattacaaatccccagatccacgtcttaaggcattgttagaaattttgtctcgttttttttttcaatttatggtgtattctgacatctgaccacgagagacatcggttgctgctgagagtttcagctcttcaggccgagtttagtccaaattttttctttaaacttccatttttttatcacattaaaacttttctacacataaactttcaacttttccgttacatcgtttcaatttcaaccaaacttttaattttgacgtaaggttgaaatttaaattttagtacttaaattaattttaatattttttactcatagtttattgtttaacattagtttttaactcgtttagaacatttgtataaaagtttgtatctacaaattattatattttttgtcgctaataagcgtaaaggtttacattcagttctagttaaaacgatcagcctgcagtttgtgttttcggtggacgcaactatagatcatttatgatcatattttgtataaagaagtttttagaattaattttaattagtcgttaacatgtacattagacaagctattattacagatatcataaatattaacattatgttaaacatgttagttaccatttaaattgtagatgataataacaaaagaagtgtctacgtcagtcacagcttgctaattaataatttcgatttttaaattatattaataaaaaatagcccaagctaggtaagatgtcatatttataaattaaaaattttcaattaaattagagaccgtgttgttttcatttgcatgatatatttaacatgtacgattcaccgaattaattgttaggtttttctagttaacgcgtgtgctccttaaaacatccattagtgcggtatgggtatgtaattgacttcttattaaatactacattattaaccattacgaaaccaatattgccacaaatacattaaaatatgtatatccgtataggttttaacaccaaatatacttgtaatttgactaattatttattaaaataaatgaagtttgacatttcgaaataaaaatatattccttaagaaaaatgtcatatgaaaagagtcatggctatataattacacctatcacggtacaggtcctcttacctacaaacagtaaacgtgcgtggtttttctttttccaaataagagtgtgtggctatgtttttaaatcagcctttagcaagcctagatttatcggtgatctctgtctctgtgatagtgcgttaaagatatctatttgcagggattttgtttgtagtgtattgatttttgaaaaattacacggaaatcatacactccaacactatttatacgtttgaatgaaagcattgataatgatatgcgaagagaatactcactgcttcctccgtttcacaacgtaagactttctagcattgtacatattcatatagatgttaataaatttaggtatatatatgtgtctaaatttagtagggcagtcccaaccctccacctaggatggtgtggtattaactacattgtcatgtaggacttttaggttatgtgacactatattaattaagagagagagtgaagagaggaagaaactgggtctcatgcaagacacagcttcaacaggagaacttatgtactagacactatcaaattttgcattgggagagaatagtgtcttcataatagatgaagaataaatatgattggtagagaagagagatgatgtatttattaatggcccactttaagaaaccatgggttgtaaaatgtagtttctattgtgatgtcttattgacatggtaccatagacactacttataaatattatgtgttgagactacccttaacatctagtatatgagtatgagtaatgctagaaagttttataatattaaacagagggagtattcaattaaacttgtacttttaaaagcgtacctgcagtatcaggctatcagcatccataaaagaagttactccactccagcagtaactactcgttaaaaccacttgatcaaaataagacactttctagtacaaatgacaaaatacggaggtcaggtcaccaccaaaaccccgtatcagatttccctgccaaccctgcctgtctgcggtacactgtttattacaccacgacaacccattcaactcctgtcccatcaaaaaggccaagaaacacatactccactacagtggactccaatgttcatctcccatatcgccttgctccttcaattcgtctgtcgatttccaggtcggattggatcatggattcctttggatccatttcatggataatttcaggcctcattgtttgtccctttcctccaaaaaaaatcaattatagttaaaatttaaataaaaaaatcaagttaattgtaagatatttataacgcagtttctttgtcagcattacgtgtgtttgagagaaaggaaaagaagaatattgataatatacgtaaaatgagatgagttattagtgtataattaattgagtattaaatattattttttttaaaaaataataatatgattcttaagcaacttttctatataacttttttttgcaaaaatacacagtttagcagtactttccttattattccctccgtcccagaatatagcaacctaggatcggatggaacatatcttagtacgacgaatctggatatgcccctgtcattcgtagtactagaatacgtcctattcggttccaattcggttccaggttgctatattttgggacgaagagagtactaataaaccattttggtttataatcagttctcgactaatcaatgaggctccttcagccgatcgatgaacagaaacacacagaaaaggttggctgtaaaacgcagcggatggcgcccaaaaggaagaacattacgatcacaaaaaggcagagaaacaacagtcgcgtgcgtaccgtatgccgggcgacacagtaccgcggttggtaccttgctagtagtgatcggcaacagagtttttgctgctacacagtgtccgaataatgaatattgtttgatgagggggatcgcttttgtcatttgatgagctacagggggagagctaaccgtatctgccagcaatggtgccagtgctatagactgtagttctggaaaaaaaattattttggccccggcatagttcggccaaaacagaggatggtatatattaaccatgcatggtgataagatcgagctttgtttggagggtaattttaccattcttcaaaaagtattaggaggtaccacactttcaagtataaaatttggtacctccagatatactaaataccttgagttacaaaaaatttagtgtaaagttgaggtacctcgagatactttttcaaggatcataaaatttcttttgtttggaacatgggaatttttatagaaatgggttcaattcgcgagtccgattatccttgccctacacaagattacactatatgctacgtagtgtagtacatggtcccatttgagatagctgaaattgatatattcatagataatcagattattttatagctatttgagggcataaataaagaaattaactactacaaagtattccataaaaaattatatagaaaattattacgcaaaacacactatttagaagtttgaaaaataaaagtttgaaaaataaagaaaatccagaattaaaaaaggaacatggccattgtgttgagtaattcatctaatactcttgtactacacacggtaagaatttactttacatcagctatatggtaggagcagtagaaatttacgatagaacaaactcggatgccgactcttcgatgaggagtcgcattcactgacatggtagggtatcatgccttttggatgggcttgtgttgtgtgggtgatgaacttgcgataggggccatgcactgttctagggtcaatgagcaaagatgcatgggtagtttggctatgggtttctaaatccaaattcagtagttggggtaatgatagtgatatataaggatgtgcacgtttttccttacaaatgcactgatttggatgtgttgtggtatagttctttttaaatattacgactttaaatcttattccaatgaatattacacaaatctagaagcgttgtcaataataatttagtaaggacatgattcatcttaactctatcttttttataaacttgccagcattgtccgttcaaaggtcatgtgagttggtatcggaatttcgctgcttttttttgaaaaacaatcctttttaatagaaaaaaaaaatcttaaaatcaagacaacatggaaaatatatttatcgtagtatcttcccatcagaacaatatcccagcaatttctctgaaacatgcataattccactaattgagaaccaaccagaccaaaagcaggagacgctaatttgtctctaaccaccatcattacccatcactaaacactcccccaaaacgtgtagagagaaccactgatgatgttgatgatgatgatgatgcatgagatgacttcgatttggtttggttaatttcttcatcagctggccggccggtagcacgagcggcctcggcgagagagagagaagataggggttgtgtttggacaacccaccgatccggtgctggatccaacggaaaccgggccattttttacaccgatcacgatgagatctggggggagtgcacgcacgcagatgagtgcatcataaatcaccgaaaaatctctctctgagatgggagtttggttgacctcgacattggcctgccttcctgtgagctggctcccgtgcaacatttggcctttttttttcttctttgttgcaattgatctagacttcggaccagcacacgggcatgtgttgtagattgtttcgccaacctacaggttgcacggattatgattatagatactataaatattaaaattttaatattatactatatgtttactaactttgaaatcatagcttcttatagtgaaagaagagctcatatcagttacaatttggtaaccgttaatcttaatttttagaactaagttaataaaaatcattaattgaaagtccgagatagatacgatttcgtatttattgattaaggattcgagagttatcaaattagagccatgtcattttcagttacgttatttgacactcaacacgatctacggccacgataatataatcatttagaacatatgaattttatatgattttttataaggttttagtgtctagtttctagctccgaagaaggtctaagatgtcttatcatccggactactccctccgttttaaaatgtttgacaccgttgactttttggtacatgtttagccattcgtcttattcaaaaaatttaagtaattatttattctttttatgtcatttgattcattgttaaatatactttcatgtacacatatagttttacatatttcacaattttttttaataagacaaacggtcaaacgtatgctaaaaagtcaacggtgtcaaacattttgaaacgaagggagtatatagtatgttgacattatttatcgctttgtgagactatatagaatgttgacattatctatcgctttatgatatagaggagtaagaatttagctctagcttctgacgaagaaagacaatgattttttttcttcattataaaataaatgtttgtctgaaaaacaattcaccaagaacaaccataacaccgcaaccaccaattcccgcaaaagcaaagatcagttttctgaatgaaccagaaagtcttgcggcagtaataaatccccacaactgtcacaaaattaaaggagaaaagcacacgcatagatcatcgtcaactacagtcgcgcgaaaccgggcgatgtgccccgtccaactccgacccgtccctgtccttgcaattagccctacgtggcttgcttaatttgcttcttgtcccaacagttgttgttggttggatccaaattcccggtaatctgtttctttcttgcgctagagatggcaccaaatgatactagtatttttgttttgttttgtttgtgagggcacaaaaatggtgattagtaggacattggtggtaaggggttttgatgaactttgggagacgattcggccggttttggtttcatcagatggtccagcttccatgagcaaaaatggactgttgcttgttgtttcggaggaggtttgatctgtaataattggagaaattcccttcttcagttgagagctgctgattccgatggcgtgttcttttttctgtcatggattactgtgggtatgttttctaagacgaactttaatactctctgttttaaattattataattttaattttattctaagtcaaatattttaccattaatttgcatacatatataatttaacctcttaagatttatggtttagatttacataccatatataattaacatgccgttaaaccgcataaatttatgcccaagaataaatacataaatttctaaaattattagtgaaagttagcaaaattttgatttagaacaaaccgtgaacgacaagtaattgagtaagtaacattccttttcagaatttctaggtttttaagtattttttaactttataatatatttaattatttcatttgtgccctagaataatcgacaaacactctatttcgtcccccaacgcatcattcataaaaactttataacattcttcatccgacacattaaaaaacaaatgcatactacaaattctaaaccatcctaggtttgtgggagtacctaactagaaacatcatttagattgcataagttcaaaacaaccacgcacgaaccaaatttcagtggagattatctagcagtctgttcgggtagcttctgtaaaaaaaaaaaaacaaaaagaaaatcaagcggacacaatataatgtgtttagttcatgcaaaaattgaaaatttgattgaaattgaaatgatgcgatgaaaatattgaaagtttgtgtgtagaaaagttttaatgtgataaaaaaattgaaagtttgaagaaagaaaaaagttaagaactaaaccaggcaatctgaattataaattcagaaacattctgtaaaaaaaaaaaaccacaaccaaaccactcggtctcatctcatcagtcgtcactgatccgcagactccgcgcccgtgcagcaccccgagcccgagccccaccgacaacagagtagaatccgacccacccactgacacgtggtccccacccaccccacctgtccccacccgtcatcatcactctcgccgcgctgtccgcttctcgcgccgccgcacccgatcccgacctgacgtgtgggcccgtctccactgcactaccagcagcagccgcagcagcgaagcgaagcgagcgacccctctctcctctaagccaagcaaaaacacaaggagaactcgccataattccaatccactgtgccctagctcgcccacctcttcctcccccgcgagagagagaggagagagaattcgatctcttctttctccctttttttctgttcggtttttgcggtgtgggagggggcgtggatttgatgtagattattagggactaccaccaccaccgtttctgttgcagttgcggaattggaggattgtgtgtttggtttcttgatctgaggaggaagaagacatgagaggtagtatcgtttgtgtttctttgtgatgatttcgattcagtttgcgttttgtgttttgtttttttgatttagttttggattggcaaggtttggtgggtgagcggtgatcgcatttgggggttggagatgaaggaggtgggggaggtggaggaggtgaggtgcttggacccgcagctatggcacgcgtgcgcgggcgggatggtgcagatgccggcgccgcgttcccgggtgtactacttcgcgcagggccacgccgagcacgccgacggcggaggcggggcggcggcggcggccgcggagctggggccgcgcgcgctcccgccgctcgtgctctgccgcgtcgaaggggtccagttcctggccgatcgggactccgacgaggtgtacgccaagatccgcctcgcgccggtcgcccccggggaggccgagttccgggagcccgacgagctctgcccgctcggcgccgccggcgacgcggcggagccgtcgccggagaagccgacctcgttcgccaagacgctcacgcagtccgacgccaacaacggcggcggcttctcggtgccccgctactgcgccgagaccatcttccccaagctggactacagggccgacccgccggtgcagacggtgctcgccaaggacgtccacggcgtggtctggaagttccgccacatctaccgcggcacgccgcgccggcatttgctcaccaccgggtggagcacgttcgtgaaccagaagaagctcgtcgcgggggactcgatcgtgttcctgcgcaccaggcacggggagctctgcgtcgggatacggcgggcgaagcggatggcgtgcggggggatggagtgcatgtcggggtggaacgcgccgggctatggcggcggcggcttctcggcgttcttaaaggaggaggagagtaagctgatgaagggccatggtggtggtgggtacatgaagggcaaggggaaggtgaggatggccgatgtcgtggaggccgctagcctcgcgtcgagcgggcagccgttcgaggtggcgtactacccgagggctagcaccccggattttgtcgtgaaggctgcgtcggtgcaggccgcaatgaggatccagtggtgctccgggatgaggttcaagatggcttttgagacagaggattcatcaaggattagctggtttatggggacaatatcttctgttcaggttgctgatcccaacagatggccgaattcgccgtggagacttcttcaggtttgcttgatccagtgttatttatagttgttacatttcacagaattggcgctggatgcatgccctgcattgtgttgactaatatctattgcttctcagtgttgctagaacttgctgttcatatattatcagttatgtttgaaattagctagagtggcaaactgctgttgaatgtcaatctcatcaattagtgatggtggaacctgagtgggttactagcctgatgttcacggttttcagtgaatgtgttcttgtcttcttggtcttaaactgaggtttctctactcaagttatcaacatattgattaggaatttgtacaatggtgggttcgggttccaggttcctactttatttaatgaaatcatgcaatgagtaaagccggtgggaatcccagggtattaggacttaggaggatgcaataggtaggaacagcagagtgttcttttctgataggtagtaacaaactcgttatgaaggaaaagggtttttggtccttgggagcttgcttggtgcttaaaagttggattgtctctttgctagttctacaagtggctgtattcttttttgacactcggcagttaacccttttaattccgagtgcagcatttaaattctcccatgcaactgccaaattgatatcagatgccacacctttgcatccgaccttcacctcagtccaaatgaagaattgaaaaggcatgatatattagctggacacaataaacaacagaaattgggctgttgggcccagttaaacgagcaacggtatgtttagttgcattaacctaggatgtattaaacaaatttctaagcatataatgaactgcatatttttagaaagtaattattttacctacatgaaactacactgtttgatagacccattctgaatcctgttcccttcaaattgatagtatacgctgcatcagtctcttccagtggtcaataattgagatcagggtcttcattgtcagaagtttcatttgcaatcaatcatgtatcacagggcccatatatcatctttcatgcttgacataatcatttaagagcatccattagccacacaattgaaatgtgctaaaaaatgtccttagctttgcatctttcaaaaatttcacgaggaaaaattttatcacccgacacatcgaaccactgaatgttgtatccgccatatgctcagcctacatcccaccttgtatccacgtcattgtgcccttttgctctcagccgtattgcgcccactaaacatattgtatctgctaggactgagagaggcagacccatgtaaatttgtgtatattggggggttgtagggggcaaagaaaaacctgccagaaattaattatttatggtgttttactatttttctgcccattcgcttttcattggcaaactttctcaccccagccctgcccaagagccacttgttctggcatcatggttatccgtcgccaacaccactcatctacctctgacacgaagttatagtttgaaagcgagattaaccttaaacaatatgtgtttcctgccaagtgccaaatactgcatacactttttaaaacaaatgcaataaattgggtggtaacatcatatttaatatgctattagaaggaaagctattagttgttaccggtactagtataattgtatgctagtagcagtagaacttcaagtgagggagtgagctatattgctgtccacatgtctcaataagtatctccttcactgccataaatttgtctttttcaccagtttcccctcatatgatagctggctgatattgttaatcagcacataccagacatcaacttttgaagaggagattaaaactaatggtgctggcctagctgaatatgctagttctattggcagatgtgccatatgattattagctccttcctttcctgtcaatatacattggatgtcagcttggcatgtacaataaggcaatgaagggatacatgggggatgctttgctagtattattattaagtgagatgttggaaattcatgctgcttacgcagtcatagcagatctagatagagttggcttgtgaaagtgaaacatcaacggtagttgccagttttgcctattttagttgtgctgacctcagtgtgcttttcttcattgctgcactatatccttttctaattctcatggttgcaatttgcaaaattcttacaggtgacatgggatgaaccggacctgttgcagaatgtgaaatgtgtcagcccatggcttgtggagcttgtgtcaagtattccaccaatccatttaggaccattttcgtcacctcgaaagaagttgcgggttcccccacatcctgacttcccatttgagggtcatcttctgaacccaattttccatgggaacccacttggtcctagcaacagcccactatgctgttacccggacaccgctcctgcaggcatacagggagccaggcatgctcaatttggtttaccactaacagaccaccagcttaacaagctgcaccttggtctgttacatagcggcagttttaacagacttgatgctattactccaccttcccggatatcaaagggctttgtggtcagtagtgcaccagcccatgacaatatctcttgtttgttgtcaatcagtacaccacaggtcgcagagaaatctgatgacagaaagacgacaccccatataatgctgtttggaaaggctatatttactgagcagcagataacttcaagcggatcaacagagacactctcccctggagttactggaaatagctcacctaatggcaatgcgcacaagacaggaaatgcatctgatggttctggttcatcaatttgcattggtttctcatctcaaggtcacgaggcttctgaccttggtttagaagctggtcactgcaaggtatttatggaatcggaggacgttggtcgcaccattgatttgtctgtctttgggtcatacgaagaactgtatggtcggctggctgacatgttcggaatcgagaaagaagaaatcataaaccatcttcatttccgtgacgcagctggtgtagtcaagcatccgggtgaggtaccattcaggtgaggacctcattatcatatcgttagtttttttttcccttacaatcctctaacaagtttattgcgattgcgatgagatatatctaatccattctatttacgttatagtgacttcatgaaagcggcacggaggcttacaataatagccggcgacagggagagaattgagagacctctcatcgaatgcttagttgagcaggcgtgatagttcaataaactcccgtttgaatttaattctgaaatatgaatcgtagcgtgaaaagacttcctttgttacatgtacttgcgttgggctgttaactaagcagacctgctttgtattgtcagtgttgtggattgctcaagttaaggtgtgtgtgtttttatcttgcctcggttagctgtcagtttctttgttgcaatcagtggtcatgttcttctgttcaagttcgtaaaccaaacacttggatgaatcttagtcaaaataaaagttccttgggaaatcctacaatttcacagctcactgttactacttgctagtgccaaatgcatcctgaatctgtcagaaaagcatcagggcctgacgcaatttttctacttgtccaattggtcttttatagtagttgcaatttgcaagtcgggaaaccacagcctagagttggaacttggaagtggttttgcttacgatttcgggcttcattttctgagatgagtgaatgagaacgagcccttgcgtgttgatctgggaagggagaaggcaaaaacaaactatccagtgtcttttggtcaaaagagagaacagaagtagcagtacgtagtagtaaatttgtggcataagcgtgtgaaaaaaaaaaagaaagatgcgatcactcgcacacgtgcgcaagttaccaagaacggtcggtatgtacgacgtgtagctatcatcaattaattaatcatcgtcatgtggttgtgcatttcgtcgaaagagaccggcagagtagtttagggtttgtttaggttgcgtttagatccaaagtttggatccaaacttcagtcctttttcatcacatcaacatgtcatacacacacaacttttcagtcacatcatctctaatttcaaccaaaatacaaactttgcgctaaactaaacacagccttagttggtgaaataaaaatttttaggtgtcacattggacgtttgactggatgtcggaagggattttcggatacgaatgaaaaaactaatttcataactcgcttggaaactgcgagacgaatgttttgagcctaattaatccattattaacatatgtgggttactatagcacttatagctaatcatggactaattaggcttaaaagattcatctcgtgatttacatgtaaactgtgcaattagttttttttatctatatttaatgctctatacatatgtataaatattcaatttgatgtttttgggaactaaacatgctcttactagataaagcaccatcgtgaaataatccaaacgacatatttgcaaacgaaaaataatttctgaacaaacattttaatgcgtgtttctagcgatataaagtaaaggctgaaaaataaacttgggtgaagaaaacactaaaatcagcttcaaatttaagattgaaaattcaagttttgactgataagtatgagtataagtgaaaagatgaagctgaggtgtacactgctgccaaaagttgtaggataacgtgtactcatatcaggtacaaaatgaagccggggtgtacactttgcacaataacatcttaaatagaacttcagttatagaaatacaatattacagcttcataagagaaaaaaaaagacaataggccaataatccaaatactaaaacataatttgaggtgatccggcaacgttagaaatattgacgacgtgactttataaaagaaaagagataatagatcagatctaaatgtcataattaagatgatatacacatataaagtttatgagagaagatggatagtttgcaccatagatacttcctctattttcttcatttgaaaatataaggcacacccaccattaatctaaagataattattatcacattctagtatgtatcatccaaaaaatataatacatactagtatggtagatgattattgctagttcactataagatctacaaaagttacaccgatactatgatacggatgcacgatacgccattgctggttaaaaataatataaagatgaagaaacaaaaggttaagattttaaatatagaggagacggcaattcaatttaatttaatcaataggacgatcacacaatccatccgtctaaaagtataaaaatataaagtgcattaatttttgcacaataatactttgatcattggtttgtttcattatatagcatcaacaactacagaattaatattacatcatatagcaaatatgaatttatcggtattacttggatcatgtaacactaaacaaatatattgatgccttagttattaatcaaaagttgcacatattttttttgggggaaaagttgtacatattaattaatataactgaatacacgcatgtcgttttatattttgaacatgggataactttgatttaggcttgatatccaaactagaagtgtcggcgaagtattaattaagagaagtatccagaattaatttattattttgaaaaactgaaaatcacctatatgtgaatagtacatatatagaaaggttgattagtcctgcagggataggtgtaatttataaaaatatagacataatgtccatactaaagtgtatgatgtagaaggatatcagttaaatattttattctatttccatattatgttagttggatagaagtataatagtttgataattgtgggcaatgagatggaatttgtattccataaattcttaaagtataagtcctgaacactatgaaatagaagaatgaaagtaaatagtttattaataatatattatctgacaagaagcataatagtttgatagttgttgctaggaggtagaacctgtccaaaagcaccacctaattatataatagattgaacataagatttgtgttcagtagattaaatgctttaagatttatttcaaaattatgctggtgattaaatgttttaagaagtctaagagcacatattgatggtcctaaagttttacataattatgtgttctgtgttgtagctgttatacttttactattccttatacaaatttataatacaattactataaaagatctataacttgtccataaaggaatttggcatgcatgtaaacgtgacacttaccttagtaaaagttagtaaaaggacagatgcatggtattcatgatttatactaaccaaaagtattagtgatagaaagtggcaccatttgaactgcagaggaaccatgaacatattatattcaaaccatcttattattttgagattataaaaggtttgacacattataatgttgttaagtttaaaaattaagaaggttattgtacctcagttgatagttctaggtttttttagccctccgatcagatagttggtagttctagttttttttttagccctccgattagatgtgagagttgtgtaaaccgaagagttttttttattgacaaagttgtgcaacatagaaatcatataataatttaatgataaaatgtaagtagatataatttggatcgtcttcttatttctacatgagagaatctcaatagttttttatcccctgcgttttttctgctaccttccggatggttctttttttaaaaaatatttgtttgactaagctaatttgactagcactgttaaccttttttcatctggaactatcctgatagctaattggtgtattatcctaatgatctaacggtccacctttcttcccactattatcctagggctattgttattcaggtgacgtggctcatccttgttggagagaggttgttgctttcacatatgtagatacataataaaattagagatcttgaggacaaatgatttaataataagttaattatatgcatgcacgttttatattatgaaacatctaaaaaaataattgtgttttatattacggaatgaagggagtaaatgatttaaatgttaaaaacaattgaggtgattggactttatgagagatgatcagagaattaatattgactacatttattgagaacaactttatgagtgtaggattatgcccgttaataagctttatctcacttatagcagctttaaataatatatgtaatatgctggtgtactagcatcggcaggtttaagagatcacgtatccggatcaaccatgagctttggatacactcgacatgtccgggagcgctagagagcaaggaaaatacatgtcaagacatatagattcaggcctctcgaaggattcttggacactgtcagcaaagtttatacaaggtttatagagctctcaagctagctaacaagcatgtagttcttactgattctaccatccaattctttctataaagcgtggctgccccctcctccgcccaggaacaaagggcactatacataatcataagcttgaattcctttttactccatgctggttttattgtgtagagcaaaacatcacatgggactctatctcattgcatcaatgcggtgagaccacataagtttaatagtgcagccaactactgactccaaatcatctatagctaatctaatagttcattcgtacaacagttaactataaaaatatactataccattaatacttgatcccacctcttaaacacacgtaacgtcttggagtccgtgttgcagctggctactccctccatctatttttgatagtcatatttcatcttggcacaatgaccaagtataagtaattctacttatcatccatttaaacatgttactagttattcctcgtaaacaagcgattcattaatatttacatttctcaatgtccatgtagtcaatcttgtgtggaagaatggagagtcacgcattaaatctgagaaagtcattaagaagatagatggttggattgaaatatgcctatcaaaagtaattttttttaaatttggaaatatacctatcaaaagtagatgtagggagtataaatttgtaccccgcttttttctctctcttctcttttcttctcaatatgtggttatagctggcttatagcctgctattgtacctactctaatggaatctggagttaatgtgatgtatagactctgcagccggctcatcagtccttagggtgatgcagaatccaagcagatacgcctccattacagcaagtttaatagtatagccaaatgttagctccaagtcatctatagctaatctaatagcccattcatacaacagttacctataaaaatatactacaccattaatacctggttccacctctcatacacacaaaatatcttagattttgtattgcaggtggttataaatctgtagcccgctttcttctttctcttcccttttcttctcgatgcatggttatagctagcttatagcctgctattatacttcctctcagtcctcgatacgtgagaacaccacctatcccttcttgagtcggtgaggggttctctcatgtgacattctgattgtgagatccgatccatcaccggctgtattcacacagcctcaagcaacacatacatataaacaacaaagaaactttatattcaagtacaagttcgcaccaaacttaattcatattaacacacaacaatatcgcatacttacagaaactatctagaagttataaaaataaagtaatttagaaaatccacaaaaactgtttgaaaccgactcacacttggagcttattagtctgaccgccgagctatccggttagaccacaccaacacctttgatctgaatgacagcatctgctcggtctcataagcctaacaaaaccgataacactattcaccacctgtgtaggatcgaatcacaagaactaagccaatcagaggggggtgaatggttggtatacccaaaaaccgaaaacttttagcggaaataaaagttaccctcgaaatcgacggaagtcggtctgaccgagattgatctgccggtctgaccgagtggatgccgccggtctgaccggtgttgaatctccggtctgatcgccgaagtcgcctgccgcacctgtcgccgccgccggtctgaccgcctcgctcccgccggtctgaccgccgcaatgccgccggtctgaccaccggtgagttgccggttagaccgctgaaacccggtgaaacacaaataaaagaattcttaaagtggatgtcgactttattacttctctctatgtttacaaagtgcaacaacagcactccttacaaaaatttcgactaaactctaaaccctaaaccaaaactcaactctattgctctctaaagcgatacagaagcctcacgctccctttctatttataccacaaaaacccctactcaaagtaggtgtagaactcctatacacaataggactccatccttcagtttccatacgttttacaatttccaaacgtgcagcaaacaaccggccgcaccagaaatccaaaacggattcgctcccaagctgacgtccacgcgtgaccgtctccgactcgctgccagctgggcccttgcttctcctgggccgacttggcatgccgccaacagccaccgaaacccaccgagccgctctcctgctgctcggccaaccagtcatgcacacatacatgcttcaccatgcatgtatcgatcacacatacatgtacagcaccgtacatgcatgcatacctgcacgctacagtacctcgtgtactgtagcaccatatactactccaactttacaattcccttcgcgaacaccggcacttgcacgcacacctcgtgaagcccgttgcaaagatctctcccacacgatttccatccaccgtatgccatcttgtatccaactttgttacccggtatccttgaccgtctggacctcaactcctccctgagtctagtcccgattcccaccgttgaccgaagttgacctccaagaatccagactctagtcaccttctcacatggtatcccgaccgcaatagacctctgcttctccctgagcatagtcccggtcctcaccattgatcaaggctgacctcaagtcacctgcacacaattagacaaaacaaccgtttctgagcacagatatcacaacctgacccacattagtcacacgcactcacaccaacattcacacaaactctcaaaccaattatttgattaaatcatttgtatagccaattgttcatcacaaatattaatcatgacaatgatttcacaacctggaaacaccttgatttcacatctggacccaaaacaacttgaatcatgtgtcgaagagctaaagatgcataaccattttctcaaaaaaaaaacaagaaaaacgtatagccataatcttttacggcaaaattttgcaattcttttcgttttgatccctagcggatcctttgaattaacaaaagtgtatgtatgcgccatggtacagattagtactggcgctgcacgtgttgcatgacgcgatcgagagaggaggcagccagcaagcctccctcagatcattattaatccatggactcctccatgaccaaaaattggcccgcactcgtacgtatcgttcttactgcggtacattcgtgacacaacccacggaggctagctgcagctggctgctggcatatcatagtaactctctccgtcccagaatataaacaattttagctataaatctagataattatgtgtccagatttatagctaagggcccctttgaatcaaaggatttatgtaggaatttcataggattcaaatcctataaaaaattttcctttttggccctttgattcaaaggattgaagctttctaaattctataaaatttctatggaatgacacattgcatatggattttggaggaaatttagcaagagctccaacctcttggaaaaattcctttgagtcattctctctcgttcgattcctgcggttttcctgcgctccaatgaaacgactttttctgtgtttttcatgtgttttgcaatcctctgttttaccctttaatttactgtcagaatcctgtgtttttcctattcctccgtttttggccctaaaatttgttacattttgggagggacgctagtacgcatctacagatatatccaccacgcgacaaccggccggcgcatgcatgcacaccccaccccaaccccaacccggttggcttcctgcctacctgcaggcgtacgtacagacacagaccagctggggtcaaggtagtacgatacatatgcacaagtacgcgtacagtcgcgcacacgcgctcgtgcacgcacacgtacgtgccgccacgatggtaccgtgcctgcctctgccggcggccgttttcgccgggcatcatcatgcgcatcttggaaaccccggccggctgcctctgccgatgacgcctctgcagtgaaggatgcaagcgtacgtacaagtctcatggcggagctagctagcgtcgtcgtcttcccgtttatgtttatacttatcaaccaaaatttaaattttcaacattatatttagagttgattttgaggttcttgtcatcaaaatttattttttaatatttttttaataaaaaatacatatataaaagttttatttataccgtacgaataaacgaaacaatggctcctgtcgccgtcaagacaatagcagtagctgcccgacctgctcgggacgtagctccgtcgctagctagccagctcgattatcaggccaataattaacgaggcaacgaacaggcccaatgaggaaggaggccagacaaggcgaggctagtacctttgaacggagttggatggaagggagaaattttggcgagtagtgaatttgccgtcatcctaccataaactaagagtctgtttgaaggagctttagattctgagaagcaactgtttggtaaccagcttctgaaaatctggaaaagctctgaaacccagcttctctagcttctgccttcttagttcatttttcagaatatgtaactacagattctcaaaagctgtggactgtttggggcagcttctagcagaagcagcttttgggaaaagttgcagctgggacaagcttccccaaacaggacctaagattgcttgctcctttgcatgtgaagatgggaagcaagaaaacaaagagaaattcttggtcgggcatagccttcgatacgagttaaagggaagaggatttttgtaaatatgaaacaaatattgcgcggattaggaatgcaagtgggtaaacccaaatccgcttatagacaaaattaatagataacccacgggttacctactaatttgatctataaataggtttatgaatcgatccacttgcatctctaggtgcagcaaaccagaccacgatgcggaaacccgtgggttaccacttatttgacagataagtaggttcgcgggtcgatccacttgcatccctagtgtggactaaagggtccacctgttgtctgaatatacccatttctaaattccattgcaacacccaggcaattttaccagtaggagtaaaaacaagaagtttttaaaaaaattcaatgtgttccatgagaatccacaggccaggcattgcgcggaggggggggggcatccaatttttttctcaaggtcaaatgatgcacaacaacacgcgctacctgccgatccacacggaccagcggagccccgcattgtacgaatctttctgctgcgaaatgcgaatcactgccagtataggcctccggcccaaccgaatgatgccctctttgaatatacatggtaccctacaccttctctcagtctctggcccttctgagacacggcccaactacagcaatgtaatggatgaattcgtcgtcttctcttttgtttcggtttttttatatatattttagtatattgatcttggtacccaaaggaggcagaattattgtgaattcagttccatttctgaattgcatgatggcaattgtagtacaagaatcttgtgtgtgccagcctctgtgctgtgggagagatccatgaattgtcatttcaaatctatcaccatgagaagtatagtcatttcaaatctactatcaccatgagaccatgagagaatagatgtatggaagtacagtatactatttcctccgttttaaaatgtagttatttctagcacaatgtcttgtcctaaaaatgaaactattcctcatctcaaccaatctcacaaccattcttcttcacttactttctcttttcaaccaatcatacacttcctctaatcattctcatctacttttttaatacccgtgccaatcttaaaaatgtctatattttgggatgaaggaagtattgagaattacgagtactctcgattgtcaaatagttaaaaggcgtcggtctatacagctaatggagatacaagttggtttttttttgggacacagggtgtatggattattcgtgcctcggttataaaataccatttcttcaaaaaaaaaatctgtgacagcattttatttatctgtattaggaatttatctgtccacaatctattcaatcgtgcagttaagatggacctaagctagacaagttttgtacgtatagtctactgcagtttcggattggagtgaccattgagagacagcaatcgacctaaccttcagaactgaaacctctcaccagacaagacctctgcagggagctgagttagccaactgcagtatacagcacctggctggagagacacctgaactgcttacgagttgaacactcttttgtttgattgattaattgtggtctaacgacgagtagccaatgacactgacatgatcatcgacattttggattgagattggcaggtaagcttcatctcaacgtacgatcatgacctgctgaccataccttttatttgggatagctttaaattttgagaaacggttgatgagaatatggtcgagctaagaaaaccagtttttaacttttagttcattttatagattctataacaaacttttcttaaaatctagtagatgaaaaactaaacaatttagtctctagtttccctgtgcaagtacatgattggtcatttcataagattcaaaaagaaaaagaatacagttctcagttttcccaagattcagaaagaaattaaatgtccaagttttcttcgtggctgaaatctgatagtcactgcaattaaaatggattactgcagtggactagtggtaacttggagtgctgtacgttagtcactgaagaaatcagatagagctagccagacagcagtagtgcaagaatggctgacgaaaggggcagtacatgtttcatcggtttgttggggggaatttttaccggcgagagaaatgccaagtgactgacggacgcaaacgccatgatggcgccttggccttaagctcacagttcgttacgcgtcgtcttcaccgatttttcagcgacatgtttcctccctgcatcgctggaacaacgcagacacatttgctaccccccctgtttacaatgtccactgctacataccccttccgtcccaaaaaagtttagctatgaatctggacacacatgtgttcaggttcgtagctaaaaggagatgaaatgaaatggaattgaagcacttctcgagctcgtaaacggtgttatttttgcaaagactccacatatgaatttctcataatattgttctaaatgcaccttttaactttatactaatagttaatttattcttgtttgtaccctcgaataattatcacaaattactcatctattcagcattctgtttcattcaaaagactatattttgccaaaaaaaatataaaatatatgtatggacaaacattagaaatatcatcactagattttaaaatattggaatttaatatggtaaggcgatactaatatagacctatcatataaaaaacacttctgtaaaactatacttttgataacacataaatatatagctagaaagagtagtgaaaaaatctagctatacatcaaacagtgtccatgtctaaaacggagacattaatattttcttcttatacaactgaaagacatgcatgcgtagtctcttttgccggctacctcgtaagtgaaattctctactcttatctcctctaagttgtcggcgtattattaatttatgtatccctgcctgctttgtactagctacaactatctgtaggagcattacaaatttacactagcgatctctttctagtcttgattagtatactaaaactacacaaattaaggaagtcatcgtcaggtagacctgcttaattaccatatctttgaagtacggacatgtactaataaacagtttgtgtagttggacagtacatgttgcaccgtacaatgctaataatatactcccttcatactcataaaggaagtcgtttagtacagcgacacggtctccaaaacacaactttgacttcttgtttctataaaaatatttattgaaaagtgatatatgtatacttttataaaagtattttttaagacaaatctatttatataatttttacatttttaaacttaacaacctgagagttattcatgatttatattcccaaggtttgacctaaacattgttctaaacgactttctttacgagtacggagggagtactaaagaactgtagatcaagtgtagtgtactgtatgtatgtctttcgcatgcttgcagggaaggagatagagtaattagattgatagatatatggccggccatacaaaagtggtccatatgttaagcatgcgagctagcaatttgtcgaccattcttgccttcaaagtctcttccacatgcacacacaaacttgattttagctagctagccaatgttccatgtggatgatcaagattggacatggatggatgggacttggcaatgttttgacatggagctagggattagttgtgcctagccaattgagcaaagtgtctcaattatctataagcatcataaaacatcatctagtactatgtgagaatggagctagggattagtagtagatggagaagacaaaaactcaaagtgaggatgtgaggagaggacagagcagcagctagcttagccaaatagccagccagtcagggtgccctttgcaatcaaagacaaaaggaaggaggcccctctagctagctgatcatctgtgtaaccaaaagggagattgagatgtgtgctacacctagcagatgatgcaataagttttaatcagattcatgcatgaaatgcatctttcacacacactcatggcttagctagagacaacatgcatgaatgaatggaatggtcacaccctatggtggggtatatatgtaaatttggtgatgtttcaggagtacacacatggcagaccgacaaaatcaaacctaatctcctcgaaacaaattaatcaaaattaattagaaaaaatcagcgcacacttttcctaattaattaaagaagagacaacaatgtgtaatttacaaaactaattaaattgcatgctgccactgtagaataaataaaatatcatgtggcctgtccagctcggatggttagggtttttttttctttacgtgtaacctactcatgtggtttaaatcctaaactatacaacgtattcgtcggcaataagatataaaggtatatatgtcgattggtctcctctatcaaagatattcatagggtaggatgtacacgtatatatatttttatagatgagtatgcgtgtgtatacgtaagagcgtactccctccgtctaaaaaaacaagtttaattttaactacgaatctggacacatatatatccagatttatagctataattggacttttttttatgacagagggagtacatgtttgtaccctgttttaaaaaataataaaatataatgtgaggatatgaaaaatgaaaaaaaacgattggatggattcatggaatgcgtcacagtcgtaggcagggacagcgtgcatatgcattggccacaaccgtagcggtccaaaataccaattggcacacacacatgaattgaatggcccatgcctgccttaattaaagggtatggatggcgaaggtgatcaatgtgtccaaacatatatgcatacatactcctgcacgccccctatacccgccaagatctcggtatgtccgataaatttgtcggattttgcatacattgtattgtaccacacccccatccatcttttttttgtccccttgccctaattgatcgctgcacggcagcgtttgtattgcagaccccaaatgtatccaaacgtacgcccatctatcctacgtattcgcttcgtcctaaaataaacttttatatacacgaatctatgtatatatatctgcctttaattcacatgttatatttgtaagtggacagtgtacgtttacgttagatgcagagatcgtccacaggcaaggcgctatagggtggccctaatatatgagcagtagtatgtgtgtatatcacacgcaacgcgaaaacgcatgggcgtccctacgctgaggtacggagagattggaacagcccaacgtacaagctagctaggggaggaggaagaagatgaagagaaacaaatgcttggtcgaccaagctagtgataggtgaaaaggaccagcgttgtgcaggcttggcaaagagagaggatcgaggaccacttgatcgatcgatcgatcgtgccggtgccataatttgtgaacctagctagccaaaaaataagcggcgaaaaggcctatcattgtgtttagtaaaattaatagattcgaaactgttgaattaatgtgttctaaggttcacatatatgaagattaatattttttgaataatcgcaaaaatccacctcatgaacatgcatgcatgtgaatctttagtaccaccttgcatgttcttaaaaaaaaagtaagatctccttaaataggagagtgcttttatagttacttaagatatgtgtggtgaagagtactagaggaactcgcgcactcacttgctttgcttggctcgggttgggaagcgcacgtacgcgacatgctcgtgaatagtccaccaaaaatgggctcctcatgcttgcgtagacgcgacttccttttgtagttttgtttaatgcataattcggcgtggagtccaaataagtaagtgcacgcgacttattcggtggccgcctcctcgcaacacacacgaaatcaatttagggtttatctcttcctttgtactgcgtcgccgctcatagtctactccatcttgctcaccggcgtgcacctgcgaacggtagagcaagtcttcgggaccttcgccttcgacgtactgcatcaggagaagatgataataaagtttttggaaagcgtgttgcgtgactacttgctattcctctaccacggctcatctttcccttctttcaagtgttgtgcgccgtcgtcaacgcccggtaacgcgagttcttactgctatgcagttaaacgtccagaaccctcgatacatattcaccatatttcacatattcgatctgatcatgttttactgtctagtttacatgtgtagatcttatgatacgattatgctagttttaagctagtttacatgtgtaatgatatgatttatttattaaatatattaaattaatatgtgtttatatattcaacaggaaaagtatatttgaaaccttatagacggttaattctcataccaaattgtgtctattggtcaagaaaaaaaaacagttatgggttggtcagcaggcggctttaccaaacgagattatcataacccaccgaaatcgtaagcaacagtgctctgtacagaagtctgtcctcttctctttttttttgggaagaaaattaaggctaacacaaattaacatcacaattaattggtgtgaagaaaataggttttggaggccttaattaatagatgcggcgattaccttgttttacaaaaagcttagctggtactgtacccagcttgcacatcacatcttttttgaaggacagtacgtgattacaatgtgatatatggccacatccatgcttaattaggagcctgaaactgaaagcaaacaccactggcaaccattgattactgttcatgcatgtcattcatgggcctaccaactgagtaacaaaaggaggtttattatatttttttttcttattgttgatggaaaagacacaaagaagctgcctttgaaaatatgctgagatttgagaggcaacagggtccctgtagaggattgataattcaaagatggatgagcaaaacctaaattattttccaaaggtgacatgaagggccctacaatgttgtatgatttgcaccccctttctttcagttccaatctcctttatttgcttctactaccatgcattcttttcctttttcttttctttcaagaactttgagttggacaggctagctttggtcgagctggtcgaaacattgtatcaaatgcttgagacagacatatatattgacaggtttgctgatctgaccacctgacataaaaagatataataggggtatatcacactctgcaggataaccatcccctgttttttttttctttccacaaaccaaagaaagcatctcctgttaattagcaccataattttgttcatgtcaacatctgtatataatcatagtatcataccatacttttaaactgacaattataaagtcggaacactactgaagaatttcagatatgctgtcaccatcaaggagtccttaaattaatatttgctccaaagcttggcggctgactcgattagtactatgcatgaatgtaatctaatccatgttacattttttttcccttttggaaaagctaacccttgtcccatcccccttgttgatacattccaattgcatctcaaagcagagggagatcatcgagaaaaaagaagaacactactactgctggtgaaaaactaaagggaaaaggagttcgaaattaaagctaaacccagcagcaggaagaacacatgcatgatcctattgggatcaacaacgacgaccataccgaattttttacatcagcctcggaagacaagaccataccgaggcaaattgcctgagaataccattttggggctaataatgctttgcctcggaatactacctctagtatgcaaatacttggtactgtgtggaactattcatttatgtgcattgagcctttgaccactcatctttttaaagaaaacaatacaaatacttaaaaaaacaatatgattaaagtttgttgcatgcagagtataaccatgaaacctttgcgaagggagcgtgactcgactaattaagtttcctgtggtagaacaagtccatctagatttaagtcgtagacttgacataggtgctcgtgttttcggctaattatttttatgataggtgatgtacccgtcgacaataaagtacttgtggtcacttcattaatttaaagatatgtcggtccaacctttcgaaggtactcgtaagagtagggtgtgcatgtgtgtattcatagcgtgagtgtactcgtgttgtgagcgcgtgtgtttgtaccgtgtttctaaaaacataaccatcgaaccttcatccactattactaaccattttaaaattactttgtggtcaaagttagaactgtgaaattcaaaattgccaagtaaacacaaactgaaggagcttatgaatcttgaggctagtccttagatcaagaagctgcctcggacaggctgcctagctgaaggtcagtggtggtgcagttgatggcgcgaaagcgagataacatggagagggaaaggggaatgttttcttctgcttgctgcatggtccaagcttaattaggcactgtttggttctgacgcacatggaacgtttgaacatctgtataaagtgttaactatatgctaaaaaataactaattacatagattataactaatttgctagatgaatcttttaaacctaaatactccatgatttgacaatatggtgctacattaaacatttgctaatgaatgattagtgaggtttaataatttcatctcgctatttactgatggattctgtaattaattttttattactgtctgaacaccttatatgatactctatataatatccgatgtgacacgctaaaactttacaccctgcatctaaaacaccccctagctaagggtggaagaagatggagatgagactgtgatcaagctagctagagagtggcctctcctacacctagcattcatccaaaatgcaatgcaactgggacgaccgaccgacgatcgatcgagctagctgctaaccacccggtcgctttcggcttaattttgccggccggtcagccgcggccccggcctgcgcatatatcgatcagtcgatctactcgatggatgcgtgtgtcctttctgcatctgtgtgcgcccagctgggttcatatatgctcctttcttttatttaaatattatctctgtgcgccgttgagtttttataaatatttgaccattcatgatatttaaatttccttttgtaaatataaaaatattaaaatcaagtttaaagaatatttaatgataatcaagtcacaataaaataaattataaatgaacatttttttaaaaataagatgaatggttaaatgtatctaaaaacgttaacggtgtcatatattaaaaaccgggcgtggagcatatgttattttataaaaataaagtaataaatataagtggaaggaaaaagtaattattagaaagttatcaattaaannattttntnaagcnccnnnnnggggggggggggggggttgccgtcggtgtcgtgaaacgcatgtggtgcggtgtatttggatatctgctctcaatggtgacggaacctatggtcggtagctaggtcctcaactcgtccatgactagaggtgtgtactatatgactggccactcataattatctgagagtacatttgtcatttgtctcaagctaagagtgtacatgtctgactctcgtagggactgttcatattatagtcaaaataaatcttaccaatactaaaattttagcaatttagcgatattgccaagtttttacatgattcttatatatttattaaaatttggtaaaaaaaaacctaaatggatgcatattttttataactttatcaaaaattggtaaagtttaaaatggcaccaatctgaacaaccccataatttttactagtgtatggtaaaaatggaaagaacccttcattaaggaccattaaacctgaaaaaatagtttgtaaaacctactatcgcgcttagaatagagagggaaactattgcgctgcggattgtctacaaatacattatatatatttaaaaataaactcaataaatgattagaatatatggtttaagcaatatagcaaaaggaaaaaaatacgtgtattaaagaatactcctttcgtccttaaaaaaacatagccaataagtcgatatttttttaagtatggtaggtgtagtttaggatgaataattaatcggttatatactgctcactctatctcagaataattcattttcatccattttacacatagcaatacaaaactaaaaaacgatgatatcttcactttaccaagtctcaatgtgattattcctactttatttactcttgatacatttatagcctgctttttacaaatttcgatgtaatgattatttagaaataaatttatatttgaacaaataagagtggctaaaaataaaacttattatgaaagtagtatatcgtactcctccgtccaaaaaaaatccaatcctagctacgaacctgaacatactcccttagtactcgtaaaggaagtcgtttttgacagtgacatggtatccaaaacacaactttgacttctagtttctataaaaaatatttattgaaaagttatatatgtatacttttatgaaagtattttttcaagacaaatctatttatataatttttacatttttaaactcaacaacttgagagttattcatgatttatatttccaaggtttgacttaaacattgccctaaacaacttgttttacaagtacggagggagtatgtgtgtccagatttcgtagttaggatttgtttttttacgtagtggtttgttataaagagagattaattaaagcgtacgtaaacgaagaaagaaaggtggcgtccgtacggggggcggctggtgagattaacaaagtggatcggccccacgctcgtgcggaaaaccgttagttaacttgccacttaatcaatcctgcaccatgtttaaaaagactgacagtagcgggcagctgcagacgcccttagctaagctttgccgtctctccttttctcgcgtgcctacatgcaggcataagatactgctgctgtctgtgtaccctctcctcccccaagctaccttgtctttcgcccatcaccaccccacagcccagccacccaattaacctgcaggactgtactctgtgcatcatatatgttttggagtagcttcctctccctgcatgcagccattgcaactttgcaagccatgccaattcttggatcatatcatactccttccaaaaaaaataacgaatccggagggagtattatctaagctatatcctggtgcttggacaatatggctcggtttagagcatgtttatcggggctctaacccttaaatctaactttaagagtagagtctgaagtatggtcgaagctagagcagtccgaactctactacttcaccgttcattttttctagatcacatcaatccactcaattttttacttggaactatctagttgagctgcagcctcataagggatggagctgaagcctcgtccaataagcctttagaaatttgttttttagctgcttccaaattacttagcggcatagctaataatttatagcttaattttctaaatgatagatgtttgctaacaattcgttagctcctaaaaaaatatgtccatagatacgtgccaatctctgaataatagattgatattgatgtggtctgtaattaactataactaatatatccacacattcaacttagctttcggacgttgcccactgtttgtcaagtgattggccctgcatacacatggccttgtttagctaggtatgagtaacgagaaatggaggccacacccagcagcatgcaccgacatgcatgcagagagaaaagggaagatccattgatcagcaagcaaaggatgcaattgcagctagctggggcatgcagccatggggtacgtgcaaagcgagaaacaggaagcccttatactagcttagcttagggcacattctaagcagcttatggtcgaatggatatctctctctagcttaaaaaaaaaaccttttacatgagcatttacttaaattacatgactggatctgcagtggcaaggggtgcgtggattaacctgaggtcccatgtttaatatctaatacgctcacaatttcttcttaaaatatatttggagggacgtctctcactccaaatcttgtttttttacatgttttaaactatttattacctccctcttctctagtacatgacaatgttaactacgttcgtcttaccttaatttcaaattatttttaaatgattatggatgttagtaacttagtatggttatattagtttacggtacttcgcagttcgataatataaacatatatgtatatttgagtatttgtaatttttttaaaaaataaacgagcaataatcacaatttaaacttaatagtcaattattcgagagaacattgtgcgctgcaaaaacaggccctgattaaagctgaggtgctgcaaaaaattacggcctctacagtttaatttaactagtcgtccactccatctccgtcacggagctgatcatctcagcttatcatttttcttcgccttttctttctctggcctccttcacgagaagcacagtcttcgtctccggcaggcctgagcttttcttctgctttactcctccaagtggcagggcctgggtttgccgggcccacatcccagccccgcacaagcaactagctaggggatcgcattacgcttatatgtattttttatttttcgttcatacaggagtgtatagtattaacgtgtattaatttcagcctttagtttattattatgtactatatccatcacaaaataaatcaatctcgtattaggatgtgacacattctgttacaacgaatctacacatactatatatccagattcactgtactatgatgtatcaaattctagtatgaggttgtattattttgtgacggagggagtagcgttataagcggattagatcattcgtggattaattgtagaagaattaagtattatattgctctctccaacgcaaagcataaagaatttgtaattatatttatagtactacttatcttatcaatcagctctcttttacttttttttttcatcttactcacctatcttcccacttccccttattaatttattaaagagcgctaaaatctattcttcttaatattgctaaataaacaacttaaaaatgaaggacaatatagtatgactcttataataaagccttaaaacttatatttctagaaatgttgagtactctctccgtcttataatgtagagtactagctccctccatcccataatatagtaatatgtctcatcacattctagattgctatattataagacggatggagtaaataatccacgttaataattcaattggttggataagccggaaaagaaacgttaccttttgcaatattgctactgtagcaacgtagctctggaccatggtacatgagtgtacaagatcagacacgagatgatcttaattaatttctcctagcgtgcgtggctacagtgcgtaagaataattgaaatttgatcggccgacacatgcaatgcatacgtacgtacattacgtgccaagagaaatatatggatggatggatgcgaagatagccgaattggcgcgaataatccgagacgacacgacgacagtgtcacagtgcaagtgtgcactaccgacgactacagtatgcatatgccccccaatcgatcgatcgagttgacgaagtgcatgcatccgtggatgcaaaattagagcacatagaagtatatgacagcttaatttcttgttaattcgtgcatgtaagcatgtttgccggtgtactacatctagagaggtgcgagtatactcattcaatttcagaataagaacattttgtactcttcgtgtttatctcaaaataaggtttttttaatcggattttatgaaagtaggagataaatgtaatgggagtagattaagaaaaagtaataattacactgggatttgatagtggaggtatcctagttttttttattttgtattggtaaatgccagatagatgaaaagtaaatttaagagagggagtactctgtattaatttatgtgtgattacctacatatatacggaggatccataaatacgataaggtatgttcacaatgcctatgttcacatggttactgtagtttaccaaacggccatatatatacctatgtttttttaacacaaacaactttattaagcaagaatagatattaggggataaaccctagtacacgatgaaggatagtagctgaaagcaaaagagccatcacttaaaaaaagagggttaactgaactacagaaacagccttcctgatgtaaccgaacaacagaaaaaggagcaagccgacagggagctgcggcgaagctgtgacgactgctaccttgggcctcattagaagtgcactccgcttgacaaaccgttaatcctcatcggctgcctccacgggaatggcacaagactgaggttggttgatgtgccgtagattttggtgtgtgcgtcaccggactcaacaaagaatccccacgggattcgtcattgaatctagggaactctaacatcaaccctgtcaaccaaaattgcgcagggggtccgagctcaactcgaatgacaaactatgcgcggtttctgctgctaggaaacaaaagagagagccaaattatagaccaaccaaccttcaacattgggggcattgagatgacttctgtcttgctgtgaggacgaagatggctaagaagaaggtgacttgcaacttggaaccacaggattctggccaaagcaaacacccaatcacaaatatcccaaagacttcggcctagaggagattgtcgtcgtcgagctagccaggactgcttccaacaagaccccaaccaacagaggcagatgctgcaccaggagcagcgcaagccagggcgcagcaaacagcgggagcacgatgaagggcgacgacaaccgcagcaacgccgagcacagcgcacacgccgccaccacagccagcatgagcccgctcgcatgcaaggcaccaccgacgaccgccgccgaaaccgcctctaccaccaccaaggcaactcagatctggaatcttcaccacccttcgggaccattgcgggaggatgtttccaccaccagagctgcgattcgccatcctagaagcacaaagccactagctccaaccaccaccgtcatcaagggcccctacaccggccgtcgccatgggaggcaacaccggcaaaccctaggacatgagactagctagaaacaggataaatctgactaaatactactaggggaagatggccatcggcaaaccactggaatcgaaggggaagaggggccagagggaagggattttgggaaggttactgtagagagaggaggggaatgagagaggggagagagatgactgccacaatatctatgttaacatggttaccgtacgtttgtttgcagttgttaacttgcagtgataagtgtaactacacctaatccaaattcgcgttgttacggaggagacagtaaggccctgttttcccaaacagaaacttttcaccctgtcacatcgaaagtttggacatatgcatggagtattaaatgtagaaaaaaaacaattacacagattgcgtgtaaattacgagatgaatcttttaagcctaattacatcatgatttgacaatgtggtgctacagtaaacatttgttaataacatattaattaggtttaataaattcgtctcgccgtttacagatagaatctataatttgttttgttattagacaacgtttaatacttcaaatgtgtatctgtatatccgatgtgataactaaactcagaaatttcctccatctaaacattgttagtgagttgcatattacggaggagacagtaaaaaaaaaaacaaagtgggtgtactccagtgaaaagcacctgtttgtgcggatgtgacataacttggtcgcggcaggacagcacggtaaaaaaaaaaaaacgtgaaagcagctgccgcagtggcgctgccactgcacgcgttgcactgatgctgctcccacttcccttgcctctcctctcacttcaccttcacggcgttcacttcacgcgcgacgcgcctctgttaaactcctcgcctacgcgacggtccaccaccagctacacaattactgctccaccggccgggcctctcacgctgactggtggggtccacttctcctcgctcgccgagaggatccagagtcttctagaacatccctgcagcaacagacactccgtcgtcgtctgaatacatgtccagtagtattttctttttaaaaaaatcaagtgagctgtggtatacccgtactcccttcgtcccataaaaaatcaacttctaactatgtatcttgaatataaagtatattatactacctccatattttaatgtatgacgctgttgacttttttttttaacgtttgaccactcatcttattaaaaaaatcatgtaattttcatttattttattatggcttgattcgctatcaaatgttctttaagcatgacataaatattttcatatttgcactaaaattttaaataaaacgaatggtcaaacgttgatcgaaaagtcaatggtgtcataccttaaaatacggagggagttatatatagtagtacaatattttttaggaacagagagagcactactatttgaaaacacagatttatgcctgttcagattgtggagaaaataaaccttgccaaaattttggcaagatggcaatattgctaaaattttggcatgatttcttatgtatcaaatttgacaataaattaaacgtatatttttttaactttatcaaaaatatggtatggttgaaaatgacatcaatctgaacaacccctatgtaaacggtgttgcggcacaataaacggagcaatgtgagtaaacacttcggcacatggtactttcttcgtttttaaatacatgggcccggtttagatcccacttcaaaattttttaccccgtcacatcgatcgaacgtttgaacacctgcataaattattaaatataggctaaaaaataattaattgcacagattacaactaatttgtgagacgaatcttttaaccctactccatgatttgacaatgtggtgctacagtaaacatttgttaatgatggattaattaggcttaataaattcatctcgtggtttactgatgaattatgtaattagtttttttaagtgctcgaacacctcatgcgacaccctaaataatacttgatgtgacacaccaaaactttacatccttggatctaaacacccccatgacaatggccttgtttggatcctcggggctattaaatagccctccgaaatctattaaacgtagattactaacaaactcattccataacaaaccctaaatagctcagaggttatggattgggttttattagtaatctacgtttaatactcctaaatagcaagattttggagggctatttaatagcccagaggatccaaacagggccaatgttaagttcggaacgtacatttactattcatctcagtagaaaaatatataaatattttaaacataatttatatttttacatatttatgttaaattttaatgaaatggatggttaaacattcgtatgcaagttcacacatatttaaaataaagatggtacagttaagtacaagagtctgaaaactaatatatctgatttcaatgaggttatatagaaagacttggtactttcattacgaaccttgccacgagtgtcatgcacgtccctagtgtctcttaagtccaaaaaatgtaccagctcactaattattaaactggaccattcgatcactgtgtgaaataagtccagatagtctatttaacctacctgtaaacacataatttattgttcttttttttatcaaagtggattaatttgttacgcacagaaaataaaaacgtgcttcggaaaaatgctatttcacgcacacatgctagcaaacataagcgcgcaatcatgcaccttatattctctatccgtcaagtgtatcatttcctacttttcgatcgctcctcttgatttcttccaactcgagcgttcgattccccacatacatcctcccaaccttggcacaccctagcaagacacggtaaacctgtcgctcctctcctagcaagataccgatgaactcacgatcctcttttccttccttccacgatcctcttctccctcctctctggtggcgggggtgtgatgctccctgtagccgtcttcctcctctatggcaagacgtcggcgagctatgatccccttcttccttcggtgtgccgctcctcctatccgttgtcctcttccatggcaagatgttgatgggcttgggatccccttctttttccttcgactatatctatttttaattgaaaactttgaaataaaaataattataacttaacagtttcaggggttttgggtatgatgttttgagatattagttaaaagtttcatatattgaatcgagaatcttaagattttagttgaaagtttctaatttcaaatccagagtttaacaagttgagatacgcaaccaacaaaacccaactcaatactatttaatattcaagctatatatatatttatgtgcaagtacaattcggatactccatttaagacatggtacatctcgttttcactttttttttaaaaatgaattgtttcacgtgtagcactccgtatttatttacaacgaaaataaattgaattgttgagatttctgtcaagtgggtaaaggagccgcaggtccgcagcaaaccagtagcaatcccccagctaaccccccgccgtcaggaaaataatttcgctcctgctgcacgatagtgacgacgctgtacgtacggcgaccactgcctcgtggccccccccaacacgcaagcacacggtgtacatccatgtgggccccagggtccatagaccgagcccacgtagaccacccaccctagttttaccgcacattttttcccagctcattcatcagattattttctttattttttaaaaatatatttaaaaaccctttctatattatagtattctcacatttgaaataaacaaatagaactggatgtgacatacttcacccgtttcataatgtaagactttctagcattgcccacattcatatatatgttaatgaatttagtcacacatatatataaatgtgggcaatgctagaaaatcttataacctgaaacagtggtagtatattagtataagtagtagtttttatttattttaagatggtaatccatccgtactacgatataagaaattttacttagatggaattatgatgctacgaatatccttagtattagaatgtgtccaattaaaccaaaacttcttatatcttgtggaacggaaggagcactagattaattgttttaaattgtttattaattttatttcttaaaaaatcaagtgatttttatagttattgagataatctgcgatgataataatcttatcaaacgttaggcagcgctcgctagctttcgccaactcctcctcctcatcacgtcgctacacaggctagtgtagctcgcagcgtgtacgagctgagctgagctagccccctgccactctctctctctcgctgacgctccctggcctttaaagctgtcgccttttgcctccccctgctactgctgctcctcctcctcctcctctctctctctctctctctctcccgtgctgtgattgctgcctcggggtgggcggtgcgagctacatacagcacaccggcggcggcggcggcggcggcgaggctccgggagaggtccagctaggcgtggtgggtggtggtttcttgatttcttgtgtttgggctgtgtcggcggcgggtgatggcggcggcggctccgtgcgccggagcgcggggcggctaggggcggctgtttctctgaggcgtctctcccccggcggcggcggtggaggtatgttgtgagcttctcttctgctgctgttcgtcgcttttggggttttccggggatggttctccgctgttcatatcctccttgccattacggtttttctaacaattttttttcatgattttttgagcctttggttcatccaaagcttcaaaccccgattcttggtagattattaattttactcgatttaaaaaccgtgctcttcgcctccaatttcgcgactcccgcggcggcggcgtctcatcgccggcatttcgcgtgctttgctctgcagaatcggcgcgtcctttgcgtgcttttccacgccttgttgttcaagggagaggagaggagaggaagaggcaagcttgcgcaatcgcacaaccgcctgtcgatttctctctttcttttctctctttctttctctttctttttttcatttccccctttcacatgtcaggttatttttttttctcctcgtctcctgacgatttcgcttttgctcgaaatctcccaggtttgttgttgttgtgttgaaggcggagaagaggggaggctttggtggtggtggaggaggaggatggcggcggcggtggcgatgcggagcggcagcggcagcgacggcggcggcggcgggtacgacaaggccgggatggactccggcaagtacgtgcggtacacgccggagcaggtggaggcgctggagagggtgtacgccgagtgccccaagcccagctcctcccgccgccagcagctgctccgcgactgtcccatcctcgccaacatcgagcccaagcagatcaaggtctggttccagaacagaaggtgagcctaatcatgcacacatatactatcatactagtttgccctttttttttgtgtgtctggatgtgaaatgttatgatcttatggataaattggttgagaatggagcaatagcaatggtagtgttcaattgtttgcctttgttggtattgtgaggatacaggaagaaagttacttgttgtggggttcttgaatgtgtttgctttgcaggtgccgagataagcagcggaaggaggcatcaaggcttcaggccgtgaaccgaaaattgacggcgatgaataagcttctcatggaggagaatgagcgtcttcagaagcaggtctcccagctggtccatgagaacgcgtacatgaagcagcaacttcagaatgtatgtcttcgtgttgttgagctcacatcgtgcttcgggtggtaaaggcgctgccctttctttgttttctcgcctgctcatatcatctctgttcattgtttgcagccgtcattgggcaatgatacaagctgtgaatcaaatgtgaccactcctcagaaccctctgagagatgcaagtaacccgtctgggttagtgaaatttcctttgaatgttttggttttgggcaattggaagcggctgccctctagggattggtttgccattttcttgataaactagttatatgatttttgtccagactccttacaattgcggaggagaccctgacagagttcctctccaaggctacagggactgctgttgattgggtgccaatgcctgggatgaaggttgattgccaacttctcagattcactctgcctgcatcaaatgacgtgtgcattcgaatgttctaatttgtgttcccttttctttgataagcctggtccggattcgtttggtattgtggccgtttcacatggttgccgtggtgttgctgcccgtgcctgtggtttggtgaatctagaaccaacaaaggtaatagcattcatcagtacttcatttatttatttatttttaattcttaattctacaacaatgcctgctgtttgcttccaagaaaaagaattcctaaaccagcttcatctgcaagtaactatgctgttttcatgctgacatactttcgatcaaagaaaagtcctttaaagtacccgtcacaagcacaactagctgtgctgtgcatacatgaactcttttttacttgaggggcagactcctttactagaatgaagagttgccaagttttcggtctcacgccatccacaaaaagagaagttctcgctctctctggcttaacagctaaggtgttccacatccaaagattcattgcaaaatcttctcttcatgcattttgttccatgttggacataattcttcatacgtatttggttgatgtgaatattttctagaaagctgaaagactttattgttttcagaaaattgttgggagattcttatagtgtgctatgcagatcgtggagatcttaaaagaccgcccatcttggttccgtgattgtcgaagtcttgaagtcttcacaatgtttccagctggaaatggtggcacgatcgaacttgtttacatgcaggtgagcgttacatcctaacttttttcttgaattaagtatcccatcattaatttttgccacatgcattccctttttatttatcattcttggctttttcgctcagatgtatgctcctactactttggttcctgcacgagatttttggacacttagatacacaactacaatggaggatggcagccttgtggtgcgttgagcttgagcatcttcattttattttagtttgcctacattgtaaattagcacaggtgtcctaagtccatgtatcttgcaggtctgtgagagatcattgagtggttctggaggtggtccaagtacagcctccgcacagcaatttgtaagagctgagatgcttcctagcggctatctagtgcgcccatgcgagggtggtggctccatcgtgcatattgtggaccatctggatcttgaggtgtgatcttcaagttctgcattctttctagttagatgtgctctgcatttgagtcattatttcttttattaatttacttagattctattttacaggcttggagtgttccagaagtgcttcggccactctacgagtcatctagggtagttgctcagaaaatgactactgcagtaagttcctataacatttcctgatctgcttttatcttgacaattcaatgatattctctcttgttacatacatatatatgaagaaatgcccactgtttccttatgattggtcatttcctcaagacctacaattgcatggtgcaatcccaatgttaagtacccactgtttgtagttagattagacggttcatacattgttcagtccccatagtaagtattacaacgcctacacctgagaagtgttgacatatcactaaattctttgtttcctgaaagtctaatagttttggagagttaaggttggggtagtgcttgagcctgtaatgtcaatttcatcatttttttttctagaggctacttagccttattcaaataagtatactgaagtgctttaagttttctttcatatatattctaatcatagcccatctttgcatctttggactactgaaatgatattaattttcttcgtcatataatgattactcttactataaaggcactacggcacatcagacaaattgctcaagagacaagcggggaggttgtatacgctttggggaggcaacctgctgttttgcggacatttagtcagaggttgagtaggtatgtccaggatataaacttctttcgcttctactgtttatattggatgttttttattctaacacattactatgcccatttagaggcttcaatgatgctataagtggtttcaatgatgatggttggtctgtcatgggtggggatggcattgaagatgtgatcattgcttgcaatgcaaagaaggttaggaatactagcacttcggccaatgcttttgtaactccaggaggtgttatatgtgctaaggcatccatgctactgcaggtgagtgttaaatataaatttgtttctatcgatgcaggctgcttagttttcagtgcctaagatgtgaattcacttacgttttgttttttattcttaactgtaacatttcaagagcttacttttttttttaatttgcatcctagagtgtcccacctgcagttttggttcgatttttgagggaacatcgttctgaatgggcggattataacttcgatgcatattcagcttcatctctgaagacaagctcatgttcacttcctgggttgcggcctatgagattttctgggagccagatcattatgccacttgctcacacggtggagaatgaggaggtatgctgacagatctttaacatttcataacttgctaggtgctgttccgtgactattttcattattaggttttttttatttatatatagtatctttgaatatgttcttatttatctagtttattgtcatttttccaattgatgatagaggatttctatgtagccttccattgttattattatgtccctttagtagttggtctttgtgctactttccttgtctagtagtgtgggggatccatttgtctgttgttcacaaagtgagctttataaaagtctatatcatttggacaaaaacaactgacaatttgcatttatacaagataagatttatcacttttcatgctactttgttgatgagttttatcaacatacagattttagaagttgtccgtcttgaaggacaagcacttacacatgatgatggtcttatgtctagagatattcacctgcttcaggtaataattctcttctttcggcgctatctggttttcaaaagagcactattaccaatcgcagtaaaaaagagcaaattattctaataattaagtcccgttgcaaggaattcctaatgtacctcccatcttgcctgatctttcagctttgcactggaatagatgagaaatcaatgggatcctgcttccagcttgtctctgcaccaatcgatgagcttttccctgatgatgctccgttaatatcttcaggctttcgtgttataccgctggacatgaaaacagtgagtttttctcatgttagcctttctttttaagtgcattagttctgtgttgtatggataattcttgaaatttttctgttctttttaactcccatgtagtgcataccatttttggtagcttatgggttaaaagccttctaacttctgtaggatggagatccattagacctgaacatcttgtttctaccttgttacttctatctggtttgattttcagcagctaggattttaaccatcaatgtcttccacaggatggtacacctgctggtagaacattagatttggcatctagccttgaagttggttcaactgcacagcccacaggggatgcatctatggatgactgtaatctacgatcagtgctgacaattgcctttcagttcccttatgaaatgcatctccaagacagcgttgcaactatggcccggcaatatgtccgcagtattgtttcctctgttcagagagtatcaatggctatttctccttctcggtctggcttgaatgctgggcagaagataatttcaggcttccctgaagccccaacgctagctcgttggatttgccaaagctaccagtaagtacatgtttatttcctatatatcttatgaatgccttttggtattaatagataggagctgcattattgctctatacggctataccactacctgtccaaaattaaaaatataggactattaccaaatattaacttgtattcaagctgataaggatttgtggtgtttgcaggttccatttgggggtggagttacttaggcaggcagatgatgctggggaagcactattgaaaatgctatgggattacgaagacgctattttgtgctgttctttcaaggtactataatttttcccttgttcttttcataatttccaacttgtacattttatgtcgttacatttaagtgagaataagctttgcctttgtatggctcatatatttggcactatatattctttcaggaaaagcctgtgtttacttttgccaacgagatgggactaaacatgctagaaacatctctcgtcgctctccaagatctctcactggacaagatatttgatgaagccggtaggaaggccctatacaacgagatcccgaaattgatggaacaggtagagagccacttgcaaaatccccattttcttttccccatgtaataacagcaatgtcctaaccgctaaacacaaaccaagtagagatgcaagaactcaccgtagccacagagtaatctttcgatttcgattcaatctgttcttgttcagggttacgtgtacctgcctggtggagtgtgcttgtccgggatggggcgccatgtttctttcgagcaagctgtagcatggaaggtgctcggagaagacaacaatgtgcactgcctcgccttctgcttcgtcaactggtccttcgtgtgacccaaaatccaatccaccatgctcgcagtcatcgtcgttgtcgtcagatctccattttttgcaatctctgtagaagagaggacaccaaaccaaccacaaacctgtcagctgttagctaatgattctactagcttttctagatctttgaaggcaaaatgctgccggtgcctgtaaagagtgtgtgcgtgcgtgtgtaaatttgggcgcgttttgcactaatttgatctggggtaaggaggcgctggctgctgctgtgctgtagtttggtaaaagttgagtacactaaccttggatggtctcgaactgtatgatgaaattcctagcagtaaaatttcaacttggatccgtgaagatgagcatgtttcttctcccgatggctctcgtatctcgttgccgcaatgggggaggtgatgtttgggttggatgtttcgtcgcggggaaggattggatcaccggcgagtcgccgtcggcggccggtggtggtggtggtagactggttgccctgccctaggcgagagcggctcggatccgcctctcgcagcggcggaggcgggcgccggtccgcggctctgtggctgagcagagcagcgccgtggcggcgcggccagcttttggcggcggcggcggcggcgcaaccgccgccatggatggtgtggggtggagagagaggcagcgaaggcccacacgcttttcggcccacggatcggtagccgtgggcccgcaaccgatgtgctcagcccaagtagctgctaggagtaacaaaacctttcaagcacaggaatccatctcccaacaacaatttcatgaggccaggaaaagacgccttagcaggatttacaaattacaatttgagataatccaagaaataccattgacaagtactcaattcaaagaaatgtcatcgacgagtatgagttccatgaaataccatcgtacaagcgacattgtcctaaaaatataatcgccgttagggttcttgaaaacaggttggtttttgaaaaaaaatagaagtggctatacaacattagatagttcttttatagaaaactttcaaatataattgcattgttcttcttgttctttatactagtaacccgcctacccagttaaacctaatccatctacctagccagaccctaatttggagggtgatcacgaacgcatttcgtgaaattcaaatctaaagcagtaaattcgattgaaagtcgatcgaaactggtccaaaattccccagttttcgacatctcgctgaacccggagcctcaggctacgtctacgagaaacgtgttcgtagagaccctttacaacatttaatttcctgttgactgttaatcttaaagctccttcaaacctgagaattttctctagctaagatcctgtttagatttcaacttttttcttcaaacttttaacttttttgtcacatcgaacttacctacacacaaactttcaaattttccatcacatagtttcaatttcttcaaacttctaattttgacgtggaactaaacacaatctaaattccaaagaatccctatgttacaaaagaaagtttgtgatgcacatacatgcctatctcctcctcggatcaggcatctctaccttcaaactacgtgtgcctttgtcactgaaatatgggaccaataaaccatggtcgcacatgtcagtgataaaggtacgatgttttgaaggcagaggatctcaatcccactgtcggtgatatgggcccgggggtatcaggtttagagggaggaggctgccccccgatgccacgtggccctcccccgaggggagtcaggcccgaggtggggtggcggcaactccttccctaaagaatagtcagaagaggttgcccccaatgccacgtggccctcccctgaggggagtcaggcccgaggtagggcggaggccactccttcccaaagactggatggaggaggctgccctccaatgccacgtggccctcctccgaggggggtcgggcccgaggtagggcggcggccactccctggccgagactagagggagaaggccgccccaggcgccacgtggctccccctgaggggggatcgggcccgaggtcgtgcggcggccgccccctcccgtgactaggggtcgggctcccccgaccccttctctaggtcaccacgtacggtgggttaggtatccgcctccaggtgcccacctacccgcacttatggcgtcccgagcggtcgcgccacgccgcatttaatgcggtgtgcagtgcactcaaccggtctatgaccagtcgaatgactgatgggacccaagatgtcaggcgcaccatcgcgtgtgtcacgcgacgtgcagcccgacatatcccatcaaataatgatgatgaaaggttctcatcctcttatcccagccggagtcggtcctcccgctctggtcaaagtaaggctcccgtttcccggtgtaataggagcccagaagtcttcacccattaaatggtgactgacaggggcaccccccgtgtcaggcggcaagatttgataggccccatcatcaagacgacgtgtgcttggcttcccaagtcaagagacaagacatgcatttaatgcaaagattataatacttctccaccggagctaggttaggttgttgggcccatgtggtaaccccttgaggtataaaaggagattcaggcctagtggtggaggggggggggacttccgagcaaactggcgcttgggtctcgcaaccccaagcactggtgttctacattcaatcaatcatgcacaggagtagggtattacgcttcatcgcggcctgaacctgtataaatctcttttgtctcatcgtcttggaggggcctaacaccctcaagatcacacagctccgctcatcaagccatcgaatctcacccgctgcccccggccgaactcacaaaggggggcctcacggttccctggtggaggagttcattctccgacatctgacgcgccaggtagggggcgcgttcgtgatctttgaggttctttcgagcgccggcgtagtgagtgtcgcgccgccgctacgggggaaagcgtagcatcctcaggagtgttgcgccaccccaggcagggggcaaggcccctcacatccccaccaggtaagcttggctaccaggtctttgtggcgagtcttcggaatgtccgagggcccccaaagctctagccctacctcaccgagaagtacgacgatggcgccgacccctccgagtccctccagatctgcatggcgatcatagaggcggcggggggtggcgaccgggtcatggtgaacgtcttccccatggccctcaggggccaagcgtggggttggcccatgaacctgctgccgcctcggttcactcctgggagtactcttgcagttttgagctccgggtgccgttgaagcccgggaccccctattctggcttttccgtagcggctagctttggtcccgccggctggctacggtgcccggcccggctcaactaatcgtcctctcatgttttcagtattttcaaattttcaactcatcaacctagtacagcttgaaatcttatatttatttccccccattctattctcatggccctacgacgcccgcgtgttgcgcatttgtttgctccctcggtggtaagagcccaacccctctcccatctacatgaacgattcttcgctaagtgtggggggctaagttttctagccttatcctagccttaagttgagccccgggtgccgtcgacgcccgggaccccctgtactggcttttccatagcggctggctttggtcccgctggctggctacggtacccggcctggctcaactgtggacggggattgctggctctagagttttcagctctcacactcatgcgaaagtaatcgtccatgtagaaggaaaagagattggaaggaggccatcgaaaggaaagagcaaacataatgtgtagcgtggggacacaagctcgtgggaacctgacctcgtttgctaagtggtcacaggcttcccaagatggttcggaacccatggtggggggccctctgcaagcaaggtttgtgtttgcttcattcatacaaacaattctttgctataagtgtgggggctacgattcctagctctgtcctagccctgcgtcgagctctgggtaccgtcgacgcccggggccccctgtgctagctcttccgtagcggctggctttggccccgtcggctggttacgacgctcagcttcgcttgatcgcaggcgaagattgttggctatagaaagttcagtcctcacactcgcgcgaagataatcgtttgcatagaattattattgcttatatttatctctcgcctatctcttcctcgcggtcctgcggtacctatgtgtcgcgcgccggcttgtctcccttggtaacaaaaagtttgtattcgcttcatccattcaaacgattctttgcttaaagtgcgggagctacgattcctagctcattcctagccctgtgtcgagctctgggtaccgtcgacgcccggggccccctgtgctagctcttccgtagcggctggctttggccccgccggctggctacggcgcccagcttagcttgattgcgggtgaagattgctggctatggaaagttcagtcctcacactcgcgaaaataatcgtttgaatagatgaagtagaacatgaacagaggttaacaaatggcaggggcaagcgaggtacgcggcgtaaggtcacgggcccgagagaatctaacaacgtttgctgaatatatatagaaaataagttcacagcctaaggtacgggttagcgagtcgccctcaggctggggcgaaaaaggcgcatgggtcctagtgccagcaaagaaagaataagagatcgggcccacatgtcatttgactaacagagtggcgttaaccctgaccacctaggaaaagttttggtcagggctaacgccgggggctactgtcggtgatatgggtccgggggtatcaggtttagagggaggaggctgccccccgatgccacgtggccctcccccgaggggagtcaggcccgaggtggggtggcggctactccttccccaaagactagtcggaggaggctgccccccaatgccacgtggccctcccccgaggggagtcaggcccgaggtaaggcggcggccactccttcccagagactggatggaggaggctgccctccaatgccacgtggccatcccccgagagaggtcgggcccgaggtagggcggcggccacaccctggccgagactagagggagaaggccgccccaggtgtcacgtggctccccccgaggggggatcgggcccgaggtcgtgcggcggccgccccctcccgtgactacgggtcgggctcccccgaccccttctctaggtcaccacgtacggtgggttaggtatccgcctccagggcccacctacccgcatttatggcgtcccgagcggtcgcgccacgccgcatttaatgcggtgtgcagtgcactcaaccggtctatgaccagtcgaatgactgatgggacccaagatgtcaggcgcaccatcgcgtgtgtcacgcgacgtgcagcccgacatatcccatcaaataatgatgatgaaaggttctcatcctcttatcccagccggagtcggtcctcccgctctggtcaaagtaaggctcccgtttcccggtgtaataggagcccagaagtcttcacccattaaatggtgactgacaggggcaccccccgtgtcaggcggcaagatttgataggccccatcatcaagacgacgtgtgcttggcttcccaagtcaagagacaagacatgcatttaatgcaaagattataatacttctccaccggagctaggttaggttgttgggcccatgtggtaaccccttgaggtataaaaggagatctaggcctagtggtggaggggggggggacttccgagcaaactggcgcttgggtctcgcaaccccaagcactggtgttctacattcaatcaatcatgcacaggagtagggtattacacttcatagcggcctgaacctgtataaatctcttttgtctcatcatcttggaggggcctaaccccttaagatcacacagctccgctcaccaagccctcgaatctcacccgctgcccccggccgaactcacaaaggggggcctcacggttccctggtggaggagttcattctccgacacccacctcctctcgcaggatctcgagccgctgcagcctgcactgcattgcctctggctcatcagcttagctccaacggatcaacgcagcgacatgatattgcagtcgtagagctcagcctagcacagatagcagcagcagcacactgtatgagcactatgcgtgtgcagagagagagagagagacatatggccgcaagtcgcaataaattgtggttttgaaggaggagggtgggagccagcagcagcagcagcagctagcagccattaaattgggcgccctccggttagctggccgtccatgctgccgcatcaattctcctccatcgcattgcacatcgcattgcatgcactcgctagtgtagtagtagtagctgctatagcttcaccccaattattagctccggttggcacggcacagcgagctggaaaacgatgtctcctctcctcctcctccatggcgaattcattgctggttaaatggagcaatggccattggccacctctacatatagtagcaccaggactagtctgttagcatgttactccaatgttaccatctctgttagcacccaaggctgaacacatactatgaacctgaatgaaaaggtccgtccatattcgtagcaccaaggctgcgttcggcaaaaggagttggaaacccactccccaccttttccacacgtacgcttttcaaaacagttaaacggtgcatttttttaaaaaaaattctatacgaaagttgcttaaaaaaataatattgatatattttttaaaaaataactaatacttaattaatcacgtgctaatgaaccgctccgttttcggtgcgggaaagattagtttccatcccttgctaccgaacacagcctaatatatgtctcatctgaatgttgctatattttaaaacagaggtagcagacgtgttcaaagttatactgctgctgctcctgccaatctcgttgcaaaaccctaaccgaggtagcgaccaatcgaggcactttaatagaaaaaagttaatgcgtgcatagagggggaggaagggggtggagtgattgacatgtagggcatccagccatgttaaaatcatttatttacggaaaaaatatgaattaccctcctaaactatcgtggtcggccgaattaccctctaaacccgaaaaccagacatcgtttaccctgaactttcaacaccggataaattatccccctcgacccaatccagagcagttttgttctacatggcgtacacgtggcaatccagtcagccttttctttttttttggtgggtccacctgtcatatatactctatcacatgtctctctcttgccccctctctctctcgggccgtcgggagtaggtcaagctgtggcgggtggtcggcgcgcacacgccacgcggggagcgggtggtgagcggcgagggcggcgggacgtggagcaaggcggcgacacgccggcactgcggtgtccgcccccctccc

SEQ ID NO: 9689 - DNA, 10630 bp, Oryza sativa
tcaaaaccgccgagagagttaaattgcaccggttttaagagtttgggggtcgagatacctggtttcgtggtttagaatcatgaattagatttcgattacttttaagggtcacaaagcgaacttattccaattctggttgatccaacaaagctacagctttgacataagctgatgtcatgcatacaatgattacaatagacaatatctgagagtttagataatcatacctatttaggctagaattatatttcctgttacatacgaaagatgacaactgacaagggaacaagctcatacggccctgtttagttttaaagtttttttttccaaactttcaactttccatcgcatcaaatttttcatacacacaacttttcagtcacatcgttccaatttcaaccaaacttctaaacttcagtgtgaactaaacacaaccgtagtagattcagcaatcagcatatgctatctgctctagaacattgtttttttctcattagcgctttttttgggagtataggtgtttctttattcttcctattaaactttaccagcataaaggagttcctaaatttggaagctgggaggatgaagaccgtggtgaacacctctacacacagtatttcgaaaatgcccgcaagggtaaatctcaaggaggtctgttaatccaaacaatcatggagatgcggaaacacgctctaaggcctctccagcagtgagaaaacccaaggatgacagacgctcaaaccgagaagacgatcttcgtcagcacgaaaccactgttcgaaaaccatatgctgagtcacctaatcatagatatagggatcataccaactacgacaatgccgtgagaaaaaccggcatagagaagtcacccgttcataagttcattggaaggaaaccgtggatctgctcccactacacctggaaggtccaagttcagatcaactggccgtggtgatgagacggtaaagctctaacttacgatgcatggaacttcctccgtttctaaatatttaacgccgttaaaatttttttaatgtgtttaaccgttcatcttatttaaaaaatttaagtaactattaattattttcctattatttgattcattgttaaatatacttatatgtattagaactactgttgggagcgctgtgcgctcttatattccaagcgccaaacgtgtatcagccaggcccacctcaccccacgttccatcatctcgctcccaccgttatcggagtaagcgatttacttcgataaaaacttatctggttacaatcccaccccacgccctgtcatcccactcataccattatctgagtaaacgatttacttcgataataaaaacaactttcctttcgatcccaccccatgtcccgcatcgtgctcccaccattatcggagtaaataatttactccgataaaaacaacttctctacttctagtatatattttatttttcccgtacccaaccaaccactctcgcccccacttcatttttttttccggatctcaatcgatccaccatcccagcccacagataggcgacgcaccatggaggaggacgacgacaccgtggcagttgatggcggtggccggcgagtggtgggcggcggcgcttgaggcgaaggcactgcttcaggcctcgctgccgcagcatctacttcagatcgatgctgaagagacgtctggcccatggcgaacaaggtggatgtcgtggggatggtgagttctctcagcaattcctaatgagattcttgatttcttgcgagaattgtatacaatctatgattaattaaattctttatccttcttgattctatgcagtctgacttcgattgggttgagcactcatcttggcgtgcttctctattctcccttacatggcggagatcctgtttgtgatggtcaatcgatttggtaacatcggtaagaaactgtgatttgtttcatcacctctatcgttgcccagtttatgacagtgaggcgatgacaatagcaacgacgacctccatctttggctccgtcgacggatccggctcctaccgaggtcgcagcggccaaacttggttctacctcggctccagcctgcatctccgccgcattgtcttcttgctctctctagtaggacagaaactccattcagccgtcacgaggaactggcgatggcgtgtattgttgtgtttgtgtgtaaaatttttattcttatgcttttactatgatgtgcatgtaaaatctttattttttgtcccgtgttttaggatggagtgattcattgtataaataaaaaatttattcacgtattatttggggtaaactaattaggccccagtaactccctctttatttatttttcctttttttcttgatgcacttactataagaaatcgttaaccaagactagcaataatgcaattactacaagttaatgcaccatcaattttcatttacatcgacagtatcaaccaatgttgttcataatccaactactacaagcacatgcaccatcaattttcatttatgtcgacagtaactcgattactacaagatttcaccaagtatggttgtcgttaatccaattactacaggcacatgcaccatcaattttcatttacatcgacagtaattcgattactacaagatttggtctcagtttgtattgcacaccatatcgtaactacctcgattggaaacaaagataaaccaattacagcgattattttcaaccaaccaccgattttacggatctgtaattgatttaccccgaattcaaatataactaatctacacagatcgaacgtgggcaaccgaacaccagtttttacggactctaggcacgatgtgcggcgctcggaacaatattccgcgctctagcgctcggaatagcgctaccgtatatgtatacatatagttttacatatttcacaaaaatttttgaataagacgaacggtcaaacatgtgataaaaagtcaatgatgtcaaatatttagaaacggatggagtattaagtaagagttttttttaccgtccagcagtgaagcccggtaccaaatgtggaccgttggataggtatgatcggatggctgacatcaattggtaccttcaggtaccatttacttcctacgtggtactccctccattccaaatatatctacatatttgtgctcattcattaagtctattcgttatttgtgcattggagtaaatggacattgatgcatgcatccatgcacacacaagtatttataacccacatgcaatatcttgagaaacactcaggggtcttccggctagctccacaaggtggtggctagacgaccttggtttgaagcctcaccctttctaattatttgatattaggtcattccctaatattcgcggtttttacatgcaatatcttgatttgctattggctagaaaatagtggggatggtgcgtgcatcgagtttgttgctagagtaaatatagaatgagagagttattagtttttttttgtcttggtgtacttgtgaaatatgtaggtgaatttggaatagaggaatagagggagtacctgtcaaaggggaacaaggtggaggggtaaaattgtatttgcacattggaaaggagcttcgtcgatttgatccgtgttttggataaggctttgcagaggaaaatctgcggcagtggcggcgagccgacgacgcttcaggaattgcggtgcgctccaccagtcttctgcggccacaacggtgctccaggagttgttgtcagcggcgacgacggcggcattccaggagttatcggcagcgatggcggcgctccaggaatcatctgcagctgcggcggcagcgctccaataattgtcttcggcgacgacggcagcactccacgagtcattgctagtgacgacgatggttgatttggctgaacgacttttgagcatgaaagatacatacaagaataaattgagaagcaggaagttccccgcaaagaaaaaaaaaaaagagaagcatgaagttgatttgcctaaatggcttcaggttgatttgtcagacatacacaaaatcgatactcatacgaaaagctccaacacaacctccgttgcagaacatgtatgtttagatggggctaaaatttttttaagcccatgtcatatcggatgtttggacgctaatttagagtattaaacatagactaataaaaaaactaatttcataaatgagagctaatttgcgagacgaattttttaagcctaattaatctataattatcaaaagtttactgtagcatcacattattataattatggcgtaattagactcaaaacatttatctcgcgaattagtccaatgttatgaaatgggttttgtaattagtgtatgtttaatactctaaattagtgtcgaaacattcgacgtgacagggactttgaataagtccatggaaaccaaacaactacgcttgcggcgacaaagtccggtgcgtcagatacatgttgcagcagcgtcggccatcgggcgcactgtcgttgccgccagagcaaggacacgctggggctgggggaggacaggcggcagcgacggaggttgaattaggaaaagaaaaaaggcaaaatttgaattttcaagcttaattttgagatatttttaacgtaattctttttcaacattggcttttaagtcaccaagaacacatttaaaaaagttttacctacaaattcagttttatttcctaataagcctgacggagcgtgtgggctcctcaccgggagaccgcgcaggcccccctttgccggttcggccgggggcgctgagtgagattcttcaccctcgatctgtggaatgttcgcgagagaggtaatgcacaagacacgggcgatgtagacaggttcgggccgctgagaagcgtaataccctactcctgtgttctggtggatctgtgagtgaaggagttacaaagagctggagaggaagagagttcaagctctagaaaccctcttcctttgtctctcctctacaagctcagatgttctctcagttctaagctcagatgttctctcagttctcccctccttcccctctgtttctggatcctccctttgctcttctcccctgttttttttttcatcctcctcttaggtgggcaaggtcctccttttatatttcaaggggataccacatgtaccacttctacctactcttcttttgggtggggacccaccctatcttgaccaaatcttgactcgcgcctccgcctggaagctaaatcaccgcttgtccttgagtgatgcccagcgccgtcactcgtcggacacaggggatcaccctgtcatttcttcattaatgggcggagatttgcaatggccgccgtccgaatgaccctccgatgggatgggtcatacctacctccactccaccggaagcagatgcaacgtgggagcacggttgtctgccgatgacgtgaccggcgtcagtccagtcactgaccggtcattcttctccaccacgcgtcagtttagcatgccgcacatctgctcttcttcatacagtgacttccttgcaatggttgcgatgaagcctggcatgaatcgagccgggactgacgtgctaactccaggagttaccacgccggctccagctagggacgagtgccaagaggctctcatcattccgacgggacggggcgaggcgtgagacaggccgcctgctgccacctaacccgcgatctgaccggtctgcgaccggtcacacactgcgaccggccacggaccggatatgcgtgcgccgcgccgcattaaatgcggcgtggcgcgcttgtccatcccgcaataaatgcggttagatgagcgccgctgtgcccacctaacccacatacgtggcgccaataccacagggggtcggggcgccccagccctcggggccgaaacaggagcggcccgacccctcggggagacagagggaggggtggccacgtcaccctcgggcccgacccccccgagggggtcaggccacgtgggtgaccgcggctgcccaagcctctagtcatgatacccccgatcccatgtcaccgacaaagccgttttggcttattaggaaataagccaaacgaatgggacctgcgacggcagcggccactcagatatgcctgtgaagatgaggagatttagtcgtcgcacgctaactggctgctttatggattcagattgagtgacatagagtagccatgtcacaagatgacatagcgtagatctaaattttaacttgtgatgacgtggacgaatcccagccgttggatttgttttggagagctgagatctatgctatgtcaccttgtgacgatggtcccggcgatccagccgcaacagtggagagaaaggagtgaagggaggcagcgcaagggatgtgaggtaccgccgatccggccgggttcgcgcgacgacgacaacctggagcggtggttgcgcggtggaggagtgacgggggaggggggatggggcaccggcggcctgggtcgcgatggatgccggaggtggcgcgggcgcttgtacgacgggggcgagggggcgacaaatccggaggttggggcggcgtcgatggatggaggcgtcgagggcggtgacagcgggatagggctgctgttcgaggcggcggttggacgaacacggtggtggcagggcaagtggggagcggtggcggcggtgaaggaagggggtgcgggaggaatgatgcgtgagggccagggggaggagcgcgatattgcgggcgcgggcggaggggggcgtcgcgagtttggatgccgaggaagggggcgcagcgatgggggcggatcggaggagtcgcgcgatggttgttttgggttgcgagggcgccggttttttatccatagcatatccgattttctgatctacggtcacgtgtctacgtttttatgttggatcgcgtgtctacgttggcttcatcatcaccactacaatttttttaagcagtagagattacattaaactcttttgatttaacgaaattttcattaagctaattagacgaacaaaccaaatgtgaattttcgtaaacagacgaaaagaacggaaagccaaaaaagatcacgacgtgacagtacatcatgaaatggaagtgctagcagcgtttctcttagtttatcttagatgcatttgtaaatttgccaccgatttttttaattttacaaggatgccacttgaatgatagtttcagtggtattttttgtaattttctagtagcagtcttacaataacgattcaaagcagtgataaatttgcaattgcccctttctcttatggtggagcacaaacgaaatcaaacacattacacatcacagttcacaagaaaagaaaaaggatggaaaaaaacagagctggggcccctatttgctgttcttctggatgcagtctgggactagctttctggttaaagtcaaggccttgggtcggcttcatccttgtagcagctcacaccaccagacgatcgactttactggactttatcttgagaaagggtagctgggtaggtaatacattctacgacgagacacgataaccatcacttgtagttatggtcacgatcctacaatcaaggaagtcatagagagtcagcataaggatagtagctagcatttcatcatttgaaattaatcatcaaagaaagcttactctacaaaccatgatgacaactctcatctggttctgaatctgctacttcaagcacagcagcctaccaattgcatattgatgcgcctttgattctggcaaacaaaaagattagaaaattatagtattggataatatatagtagtagtaggctatagcagtcaagatttacgaaggcataataacaagacaattgaaggaaactacatatactcaactatattcaatggggctgtgaatttccagaaaaatgtcaaggcaagtattgtgttagttctgcaaatttaagctgttgtccatatcagacgcttaaagggaaagaatcatgagtattggttcgaaggaccatggaaaaaaccaccaagggacttcaatcacgactatttttttttcacgagacttcaaccacgactaatacaacaactaaaggatataggttaattgcatgatccaaactagcataatcacagtaatagatcatctaaattcccttgcaggtaccaaaatagcatatctatattttctatatagttgatatgtatccactaactcctaaagttcaacatacaaacgtgtaacattatcacctattaacaattattatctagttatattaaatctcatgcaaacatgacatgttatttataattttgttgcgtttttataactcaatatgcaagcaatgtaaaaaaaacgtgaatattagcccaccacctcgtgtagctagccggaagacccctgggcgtttctcaacatgcaagcaacgtcaaatcatcatctccacaacattttcacattatttaaatatatacatctatcatttctataatacataacatttattcatccacatctcccatagcaaagcgcggaggagacgtaactaaattcctttgtatgcgtttcaaaagtttaaagggaggtgacagctgcacgagtgagttatcaatgtgcattgtactctatgtacatataatcatatggttgccacactcgtaaactttttaccagtgaatcgtactacatttgccttttagggtacaccaaattaagcttctggttattctatagtattaaaagaaacgaagaaactggagattaccttcatagcgggcatctagttttttctcctcgaggtaatccagacgttgctgcaggctcagtggaagcaactctataccagaacaagaatcaattgtaagaaatctaagagatgagtatgcttgaggcccctcgggcaaggatactaggctcttgcaatcaaaaagatcgagttgttccagcgacgggagctctcctaagcaagattctagtgatttcaagctctcgcatgatctgattattaatgctcgaacggcatccagttttcctgaaagggactgaagattttcacatttcaaaatttccaatttcttgatggacggaggaagatggagaacctccaaacgatcacagcgctttattgctagagattctaggcatggaaggatgtgatcgttggtcccactgctggaccctgctattaatgatgacctatccggccgtgtaacactttctgcactcaccaacctcctatcatgctgctgactgaatatgatggacttcaggccaaagcagttcataatttctaatagcttgagagacgcagataagttgggcatctctacaaaagatatgcagtagcttatctctagggactccaaacatggcaagagttcacttcgtactggtgtagattgctcataagcttgtgtgtgtcctgtcagattcctgcattcacgaatctgtaacttcctcaaggaaaccaggccctggaataccttttctggccagtagtcaagtacatcgacacaccaaattgtcagatctaggagctgtacaaaacatgcccacagagccagtgcacttggatgagagaataaaaggttgcacccgtccaagtccataagttccaggggagaattatcattccatttctccttctcatacactaattcactcgaattttgtttggccaccaatgctgtttctgtgtcatcaattgagagatccagattgagactggacattgaagtaatatatctgctagctgccactagggataattgttggctgcctttatatatgtttaagtcacttagctttggtgcttcaggtagagtagtcaactctgggcagcacctgattgttaatttgtcaagctgaggaaatgttacctcctcccttggagtttcattgactgcctcccatctctgaaagacactcaaatcacataatttcatttccttcaatgctggaaatgcagaacgacacacagtgctaactcttccagaagatttcgaaatcgcatttgacgctttgggtaacgcagttagcctatggcaatattcgatgaacaacttctcaacctcaggaaaaaccagttcttctccttgtacctcgtttatgtcccaccatgtcataaaatttctcatatcagacaaggtaagctccttcagtttacaaaatgtaaagggagtgtgttcgtcactgttgaacaaacaatttaaaccatccagtccttcaaggaaaagaacttctagagctggtaactgccacagtggaggaagcatctcgagatttttgcaaccaattaactgaagctccaccatgtaccacagtttattcatccatgttggacatgtactgctcccacagcaatgtatcctcagaaccttgagcccctcgttaggcgtgaggccttccagcacctctttatgattattctgtgcctccttggaatgatttggtgaccaatctaagctcaatttggtcagttttttcttcttcctgagatttgctgctttcgcatctgcttttgtcacattctctagttgtgatagctctagttgaccaccaaggtccaactgccgcagctctcccaaatcactgcagccatagcaagtaccagcgacaaaacatgtaag

SEQ ID NO: 9690 - DNA, 9366 bp, Oryza sativa
gctccttcagtttacaaaatgtaaagggagtgtgttcgtcactgttgaacaaacaatttaaaccatccagtccttcaaggaaaagaacttctagagctggtaactgccacagtggaggaagcatctcgagatttttgcaaccaattaactgaagctccaccatgtaccacagtttattcatccatgttggacatgtactgctcccacagcaatgtatcctcagaaccttgagcccctcgttaggcgtgaggccttccagcacctctttatgattattctgtgcctccttggaatgatttggtgaccaatctaagctcaatttggtcagttttttcttcttcctgagatttgctgctttcgcatctgcttttgtcacattctctagttgtgatagctctagttgaccaccaaggtccaactgccgcagctctcccaaatcactgcagccatagcaagtaccagcgacaaaacatgtaagtgtctgtaggcaaatgaggcgtccgaggtcaggaggcatgctttctaagctcgaacatccgtgaaggtacaggtgacggagggtggtcaagtacctcattccctttggaagtccacgaagacagtaacagcggcaaaggttcaatgtttgcagatgatatagtatgcttatgtcttcaggaagtgctttaattttactttctgagagatcaagatacctcaggtgatgaagatattttggtttcagaaatgaacgtccccagatctttaatgctcgcactgacctgtattttgataaattctgcaaatcttcatttacagatctatcacatataaatgtttcttctttttgcgaggaacatatcaatgtttggatacctggatgtcctttctctagggaagtattcagaatagcttctgctctataacctgacaaaaacagatggcgagcggaagaaggaaaatcctcacttttactaagttttgtagctatagcagcacattcttttcccatggaagattgtgccacatcatgcataaggtcatggatcttacatgtaatcttagagtcctttatatgatggaactcaaatgggatccccttcacatcctcaaaaaatgaccttgacaccaactcactgaaaattcttttaccaatgatttcagggcattctccttgttgctctgggataaaaccattggccatccataactggattagcatttccacgtcaatctcataatccttgggaaaaattgcacagaaagcaaagcactgccgcatatatgatggcaaacaattgtaactgagcttgagtattggtaaaattccattttcctcatcgcaaatcatgcttctacttaatacagactcccattctttctcggtggtcttcgtgcgcagtgtagagcccaatgctgttgcggctaaaggagaaccagaacatctcttggcaatgtcaccaaccattttgagtagctcaggaggcctttcttgttctgaactgaaagcacttgtcttgataatttcctctatgaagctttcattcagtctcttgagatcataagctttttgagctggagccatcacttgagcaactgcttgatcacgagttgttgtcaacactgagctaccgctgccaccatgctgaaggtaggacttcagcaattcccacttactggcctcacggttccagacgtcatccaatacgaggaggtacctctgcccgctcagaacttctttgagtgcatcctgcggtgagtttttagccattacattctcattcttctctttgcgagctgcttcaactatgcctttagccagcaaatccacatcaaacttgtcagagacgcacacccagagcagcaactgaaaatgcttctggatttcagggtcattgtaaatgagctgcactaaggtggtcttgcccatcccacccatacctacaatgggaagaacggtgagatccctattgctgacttgagcaagcaatgtattgataatcttctgtttgtcttcagatcttgatctgatggcaatgttcatcgaaagattggagatcttacaatccgtctttctccatttcatggaggatattggtggctctggtcggaattcaaacctaaaggcattcatctctgcaattaagacttccatttcattcacaatcttgatgagcttgtcgcccatcctgcgacggaacgcaaaacggttgtgagtaggaatgagctttattacatccatgctgccgagcttcttgtagtggcccttggctttgcggcggagggcctcgtacttgaactcgtcgaagacatcattggcctgataggccaccttccggagcgcctcaagccatgctttcaccccttccctgtgttttgccgcctgctcctcggcatcggcgatgacgtcgaggatggccggcagcttgcgtttgagaatctcatgctgctcctccatgccctccatgaccttgtactgctccaggaggtagctggaggccttgtccttcaccatggacagcagtggcccgaccaccatggtggccatcagctctgccatcggaaggatctcctagagctaagaacacacgaacataacacggggaagcacaataagcaaggagtgtgagcagcagctgctttttgtgggaaatggaaactgaaggaatgtgttcgactgaatgcaactagctagtattaacagttgctgcctggaatgattgtgtttgattggaatgaaggagtaagcaagtacagtacagtgcagtaagcttccaagaactgggcggcgatagagatagaaaactgcagtgcgcgggagagaagccggtcggtcggcgcaagcgcaaccacgaagtactgacgatagctgagtctgagaagaagcacatgcactgcgacgacttccgcaagaaaggagctaggatgctcaccgatgtggtgctccgtcgaccggaactcaacggcgaattgggcttggccggttcgtggagagcaaggttggagcagctcggacccgtcgcaaattaaggcggagctcgacggacgagctcagcagcctgcagccccgcgcgccgccgtagccagcttgcacttgatcagctcaagtcacgaaaggagagagcctcgcacagttgcacctgtctgtagagaaaagaagcaaacaacgttggtttgtcgctgtggccttgtcaaggaagaaggggatacagtcaatcatggagaagagagaagggatgtatccactgcaaatggcacaaatgggtgaagcaatcaataacgtcgatcgggtgtcggcttcaatcgttcagacttcagacctcaggtcgttttaagccagatggcaaaaatatctccaaattatattgttctctttgtttcataaaaaactaaaatttgagaataaatatagacatagtatatatttatattcatctctataattttattttttttattaaatagagggaatacgcacgaaactttccattatacatttccttctactcgggacttggggggagtccactaaatcccttattcaaattgaggcggcttcggaccttaggtcactttaagcttcgctgacttgtacgctaaacattaaaggcttgtttaggagtgttcttttctcatgtgtaaaaggaaaactactgtaaatctccatgaccaaagggaaggccaaaaatagcagtgaaagattaacctcatagtaacgggagtggattctaatccttcgaggggatgtcccctcgtatactcaagggaaggacaaaaatagcagtgaaagaagcaaacaacattggtttgtcacagcggccttgtcgaggaagaaggggatactgtcatggagaagagagatgggatgtatccactgcaaatggcacaagtgggagaagcaatcaacaacgtggatcgggtgccagcttcagtcgttcagacctcagttcgctttaagctattattagcagatggcaaaaatgtcttcaaattacattgtactatgtcccataaaaaagtaaattttgaggataaaatataggcatagtgtatatctatattcatctctataattttattttttttttaccaatttttctttctttcttgtttggcggagcgctcagcaaccgcagttttctgttttttttaaaaaaaaaatttaaagtgcaaccgctaacaggtgatgcgcgcgagcgtgagaggtggaaaggaggatgactcctaaaatactgaacacctagctcgatgatttgcacaaagttaattactgaactatgaacttattttttttagaaagagatgcattcttctcctgtttctgttagagaaacgcagcattacaattgttcagctaagcgaaaacaaaatacgggctacagggtcgccattcggagcgccaccaccagatgccatccctcagccaatcagttcagaacaagctaggatctagttaagcaaaaatagaatttaggcatcaccaggaacagcatctgggtttacaacttcagccatacaaagactttcacttttggtggtattttgattctccacattttcttataggggaattgcatgttgtgcattttcaaagccctgtaaaaagacttaactgtgaacacactattctttgttaatctccaactcagcttgtcattttcttttgttagggacagcctatcaatctcattgcaaattcttctccactttaccttcttttctccatacaggcatcttctgaatctaacttcttctcagcctttttgttttacttttgcaattgttacacgtctttttagagttattacattatacagctcaggaaagctttctgctataaacttgccccctacccagcagtcttcccaaacgtgtattttctccattttccacttttttttctcacaaaaatttagaaacagttcttttttatctccatcagacctgatcagaagtacagtatgaatcactcactctgtgtatttctgtaagagtgttttgttattttttaaaatatttgtttctcaacacctcttgccataagccatctgtggttcccaacttcaaatgaactatgagcaataacatccatcccgaaataaaatgtttgacaaccaataacaaatgcagatcgaatcaccatgaaatttgacaagagaacattcaaatagcacaatagaagaacaacaaacccattattctccttccccatcctgatatccccaaaccaccaaccaacacaatgacaaaccagagcgaggaagagagcagcagcagccgacgaaggccacgcatcctcgcctgaagctccccccgtcggcgacggcattattcgcggtctccagtctccaccgcctataggccgtcccttccgacgtcgccacgccatgggtcgtctccgtcgcccgggcgctcctctgcatgagggcctccactctccgcgccgcggctgctggtactgaggctttgagggagaagggagaaggcgacggtggcggtgggggaagggagaaggcagcggcggccggcggggattgggcatgcggcggcggagttagaggctggactggaccgaaccttcgttggattgggccagaaatgggtgtatgttacacggcccatccaagcgtgcgttggaatcattggcctgtagtttacaccagttttgggccaaatactgggcttctaaatgggccctaagtctgcttactgggaaaaaaaaggaaaaagtacaccgaaggtccctcaacttgtcattgagttacaaaatcgtcccctaaccacaaaaccatataccgggcgtccctcaactaacaaaaacgttctctttagatctttcggtggttttgaccccggttttgtccgacgtggcggctgagtcagcgtgggacccacgtgggccccacatgtcagcttggccacctcggcctcctccctctttttccctctcctttcttttcctcatctctctcttctcagcgaaatcagcagcgcgaggcggcgacgctgccgggggcggcggggggaggagccgcgctgcagctgctagcgaggaggatgaagcgctgcgctgcagctcaatgaagcgctgcagctgctggcggaggagtggcgcacgacggctatcctgcctcctccctcatcgcgtgcgctcggtggcgtcgccggaactcctcccccgcctcgcctccggcttctcctccgccgtcggttcgagtccatgggacactatcacactagagagaggagcacgagccccatagccccgccgtggatggtgctcgcggaggcggcgctgcggctgtggctggcggcggaaccacgggagctaagggtggagctgggactgctctactcccgcgccatcgcgcgcagagtggagttcgacgccacggtgctcgatgatgccgtgccggggatcttcctggccagggtcgactgtatggccgtcgccgaggtcgagcttgtcgcctcgccctggtccgcccccgggctcgacgccgtcgtgcgtggcgtgacccatcggccggcctgcccaagtcccagagaggagcagagaggagaagagtgatagagaggaggaaaggagagaagaggggagagagaggggaggctgacgtggatagtctgacatatggggcccacgtgggtcccacactaactcagctgtcacgttggacaaaactggggtcaaatccaccgaaggacctaaagcgaatggttttgttagttgagggacgtccggtatctgattttgcgattgggggatgattttgtatctcgatgataagttgagggaccttgggtgtactttttccaaaaaaaaaattatggccagatgtgtggagcatcaattttgtttaacatattgcttgagatatagtaattgaatatttgaatgagaaaattgttattgtgccagttgctaattgatctctggcatgctcatttttagggataacggccggaaacgccatgcatagattatacagtaatttaatttgtgtgaactcgactgcacagtatctttgcatgatttggttatatcatcatattctaaattaatccactttatagccattgcaaaacatatttgtattttcattcagcgtatttcattccatccttgcaggactgcccatgcttcggttacatcttgtggaatcattttcttgttgcctccttctggggctattttccttggattttttttatttccaagaaaatgtgccaatctgaaaccgaaattgttgccgtgtccttttctgctcaattatgtgcagttatccaatttgccaagatccagggcctatgtagattatagccaaaataaacattaccaaattttggcataatttcttatgtatttatcaaaatttagcaaaaaaaaactaaacatagccacatttttagtaactatgctaaaaaatggtatggttgaaaattacatcaatctaaacatgcccccactcttattgtttggtactgcggcaaaaagttgagatattgtttggtagcgagacatgacatgtatttacacgaatttgaagcttcttgttgagcattttgtgcttttttttttgtataatgagggattcgtttatcttggaaggcatgtgtttggatagaggatccaaatccatacgacaaaggctaaattttaaccaaatcatgaaaatccaggccactttcaaaaaccaagtaaaaaaatgtatgaatttcctttttcttctttggaaatgtaagttgctgaatctgaacaatcacgacacctgacatgaaaaaatcaggttcgtctattagaaatttcagagtaattgcctgaactaacattagtttgcagcgcatacagtatgggctgagatgggccatgatgggctgggccacgtaatgttacattgtgttgcattgcactaaattttgttgcagtaggccatctgaggtgttgggagatctttcggcactatagttttctgaactttagttcagcaatagcatttacagagctgaggaatttttttttaccttgcaagtcccaacgattctgtcgagaacaattcatttttttgacgtaagaaggtagagctggctctaccttatagccatctcattaatagaaatgaggtggtacaaagttttagaaagaggaaaagccaaatatgggaaagaaaaagaataagaggagcatagaaagaagaaagagccccggggggaggatttaaataatgttaaatatgtgatccgaattttgggcccacaatatattcggattatatagtttcctagtaggacttcatgtctatcctattaggtgtccttctattatctcctatatatactcttgtaaaccatatggaaaggggtgacgttcccattgtgattcccctacgtttgtaatcaactcctctatagtgattattgccggttgacgcccgtggttttttttcgcaagagttttccacgtaaaagttcgtttctctgttgtgcatctattttcatatcaagtggtatcagagtattggagatcgatccactgcagtcccggccacgggcgatttttcctaatcgaagaaatcgatctaatcgacggaacgcgtcgtcgtgttcatcgttcggtcgaatcaatctgtttggccccctacctgtcgactccgagtcggccttgtcccacgcctgcgcgagaagaaaaggcagcaccgcagcagcagccacgtcaaacggcgcacgcgacaggaggaaaaggaggagcagcagcgtccaatccatccatccagcagcacacgtcccgaggagaaagaaaattagggcagccagctcttctcctgttcacgtgatttttattcacgttgaattgctacggccacctaagcttgtgtaccaggagattccctgatctacgcttcgtgcacacggaaagtgcaccagaggttcacgtttttgctagatttagcctaattctttctagcaaattcaggattaattcccatggcgagtttaaagtatgatctaccgctcctggaccgagacacaagattctcactttggcaagtgaagatgcgagccgttcttgcacagcaagacctcgatgatgcgctttctagatttaacaagaggactcaggattggtacaacgatgagaagaaaatggatcgtaaggctatatcatatattcatcttcatctatctaacaatattttgcaggaggtgcttaaggaggagacagccgctgggctgtggttgaagctggaacagatatgcatgactaaggatctgaccagtaagatgcacctgaagcaaaagttatttttgcacaaattgcaagatgatgggtctgtgatggaccatctctccgctttcaaggaaattgttgctgaccttgagtctatg

SEQ ID NO: 9691 - DNA, 4937 bp, Oryza sativa
  unsure (1)..(4937): unsure at all n locations
aggtgctcgttacatgatgactatcgttgataattattcacgaaaagtttggccttatttcttgaagcacaaatatcaagcttttgatgtgtttaaagagtggaaaactatggttgaaagacaaactgaaaggaaggtgaaaatccattcgtactgacaatgggatggagttctgttctaagatatttaaatcatattgcaagtctgaaagcattgtgcgtcactacaccgttcctcacacacctcaacaaaacggcgtagctgagcgtatgaacaggacaattatatcaaaggcccattgtatgttgtttaatgcaggtttgcctaaacagttttgggcggaagccgtttccactgcttgttatcttatcaatcgatcacccagttatgccattgataagaagactccaattgaggtatggtctagttccccagcaaattattcagacttaagagtatttggttgtactacttatgctcatgttgataatggtaaattggagcctagagctattaagtgcatttttcttggttatccgtctggtgtgaaaggctataagttatggtgtcctgaaaccaaaaaggttgtgattagtagaaatgttgtcttccatgaatcagttatgttacataacaaaccttctactaatgttcctgttgagagtcaggagaaagcaagtgtgcaggtggagcacttgatcagttcagggcatgcaccagaaaaagaagatgttgctattaaccaagatgcacctgttattgaagattcatattcttctactattcagcagtctccaaaacgttctattgcaaaagaacagcccaaaagaaatattaaacctcctcgaagatatattgaagaagcgaacatagttgcttatgctttgagtgtggcagaagaaattgaaggtaatgcagaaccttctacatattttgaggctattgtttctgatgattgcaatagatggataactgctatgcatgatgaaatggagtcacttgaaaagaatcatacttggaaatagggaagntggccaaacgaaaaacactcctatccgctcaagtggatcttcaaaagacaggaaggtatatctacaagtgatgaggcaagatacaaagcaaggttagttgctaaaggttatagccagattccaggtattgatttcaatgatgtcttttcccctgttgtgaagcacagttcaattcgcactatactcagtattgttgcaatgcatgattatgaactagagcaaatggatgttaagactgcatttttatatggggagttagaagaggacatttatatggagcaactgaaggttttgatgttcctggaaaagagaacctagtctgtaggttgaagaaatctctttatgggctaaagcagtcacctagatagtggtataagagatttgactctttcatgctttctcagaagtttagaagatccaattatgatagctgtgtttatctcaaaattgttgatggttcagctatatatttgcttctttatgtcgatgatatgttgattgctgcaaaagacaaatcagagatagcaaagttgaaggcacaattgagtagtgaatttgatatgaaggatttaggtgcagcgaagaaaattctcggtatggaaattactagagaaagacattctggcaagttatatcttagtcagaaaggttatattgaaaaagttcttcgtcgtttcaatatgcatgatgcaaaaccagtgagtactcctttagctgcacatttcagattatcttcagatttatatccacagtcagattatgatattgagtacatgtctagagttccttattcaagtgcagttggttcacttatgtatgccatggtatgttctcgtcctgacttatcacatgcattgagtgttgtcagtagatacatggctaatcctggcaaagagcattggaaagctgttcaatgaattttcagatacctacgtggtacatctagtgcttgtttgtagtttgggagatctagagatggacttgttggttatgtggattcagattttgctggagatttggataggagaagatcgctcacaggttatgttttcactattggaggatgtgctgttagttggaaggcaagtttgcaagcaactgttgccttatctactactgaagcagagtatatggctatttctgaagcttgtaaaaaagctatttggcttagaggtttgtacactgagctttgtggagttacgtcttgcattaatatattttgtgatagtcaaagtgcaatatgccttacaaagtatcagatgttccatgagagaacaaagcatattgatgtgagaaatcactttattcgaggtgtgattgctgaaggtgatgtcaaggtatgcaagataagtactcatgataacccagctgatatgatgacaaagccagttcctactactaagtttgagctttgctcaagtttggttggtgttacagtatagtcttagagactatttggcgcgcggtgattttacctacatgaggtatctttggtgattgatgtttttatgctacaagaggaaattcgtctcaaggtggagattgttaaatatgtgatccgaattttgggcccacaatatattcggattagtttcctagtaggacttcatgtctatcctattatgtgtccttctattatcccctatatatactcttgtaagccatacgggaaggggtgacgttcccattgtgattcccctacgtttgtaatcaactcctcaatagtgatcattgccggtcggcgcccgtggttttttcccgcaagggttttccacgtaaaaattcgtgtctccgttgtgcatctattttcataacacacaattatatttacagatttaaggttctaactgcagcagctgacagataattacacacatgtttcaacttgagtagcgacagtttatttttcagcagcttgtaccagtctttccattttttccacaatgggaaattcattccaataagtaggaacatcaattgatcaattccattgatcaacaatgggagagataacgttgctgcaaaatgttgttgatcaatcacaagtatcctctgcagtcatgtcatgtaggaaaaacatcattgaaatggaagtgctagctgtgattctcttatgatggagcatgaacgagatcaaagacatcgcagttcacacgaaaataaaaaggattttaaaaaagtgaagcagtttaagctccagcatgttattctttagcttacaacctgggactagctttctgcttaaagtcaaggccttggatcatcggcttcatccttcttgtagcagctcacaccaaccggacgatcgactttactggagtttatcttgagaaagggtaggtaggtaatacattctaccatgagacacaaatcacacaattaataacccatcagttgcagatttggtaacgatcctgcaaggaagtcacaccacagagagagtcagcataaggatagtggttagcatttcattcgaaatcaatcatgtataatgatgttacaaaccatgatgactcatctggtcctgaatctgttactttaagcacagcagcctagcgactgcagattgatgggcctttggttctagcaaacaaaagataatagtaataaaaaatgttatgtattggttggataatatgtagaccacagcattccatagtcaagtttggcataagatgattagaaggaactacgtatactcaaactacatgcaatggagctatgagtttccagagaaatgttaatacaattcaagtaccgcgacagttagttctacaaatttaagctgctgtccatatcagacgcattaatatatatttttttatttattttagataatattataatttattatttattcgtagtaaagcacgtgcattcagcttgcataatagtaatggctacagtagatataactaaattcttttgtacccccaaatgcaattcaaaaatttgaagtgtttaggtcacaccactgcacaagtgagttatcgatgtgcattgtactctgtacatataatcgtattaatggttgactagagattctatacaccacactgcaaacttttagcaataaatcgcggtacatgcttaagccgagagttgccttttagggcacccaccaaattaaattgagctcctggctatctattatattatcaaaacagctatgaaaggaggcaccacgtttgctgtggatgctcgaaattcccatattaatcggagaaaaagaaaagaagagtcaatctaaaaataactgaaattcggaattaaaaatatgcaatattgatagatgagtccatataggaacccaatacgtgattaattaaaatttggaataataataaaataaattccaaaattagaaaaacaaaaaaagaagagttcgagtacgtaggtgacggagcgtggggctcctcaccgggagaccgcgcaggcccccctttgccggttcggccggggactcagggtgaaattctaagctctctgtatgtggaaggttcgcgaccgtcgaaagagcataagacacgggcgatgtatacaggttcgggccgctgagaagcgtaataccctactcctgtgttttgggggatctgtgtatgaaggagctacaaagtatgagccagcccctcccttgttctgggttccgaatctggaaaagtccagtcctcctctaagtgggcaaggtcctccttttatatcttaaggggataccacatgcaccatctccctctcttctgtggggacttactctaccttttcataaatggacggagatttgtatagttgccgtccgaatgaccttctgataggacggcccatacctacctccacttccgccggaagcaggtgcgacgtgggattatggctgtctgctgacgacatgaccagtgtcagactggtcac

SEQ ID NO: 9692 - DNA, 5166 bp, Oryza sativa
aggccgatcttatactgtccggggggccgcctgcaaatgggcggcgagggggggcagggaattttgcaggcggcccccttgccgccctccgctagggcgattttgcactgtgcggggggccgcctgcaaatgggcggcgagggggcatggaattttgcaggcggccccctggccgccctgggggagggcgattttgtactgtgctctatattttttttttatataaatatcaatagttatcaaatctttttatattgaaaactatacaagattaaaatctccaagactggtaaaatacaattttattattttttagggcatatttggaatgttaccgtacaaatattttgttaatgccaaaatataagcaagttttggcactaccaaatatttggtaaggtaaaattgcatttgatcatatttggtttgctgccaaaatgtaaaattgtagtgaagaatgttgtacataatctcaattctagattacgtattaccaattaataggcttccattttcatgtgtgctgttgtggactgtgcgcgctactggatatggcactaccgtgaagcgccgaaagtgtgttgttgtgagcataagttgttcaagcaccatacgaatgaaaagaactacgtagacgagacaaacacaagtagtactgcagtagtaatagcaaaagtagtactgctttacaagtttgtaagccaaaagaaacggtcacataaggactgaagaggtagaacactactgacgaggcctcttacccctgtccctcctaccctgcgccctaatgtgcccctgggagtacgtgagtcggtccgggggtacggcacggccaacccgtcctgcctgtacaggtgtgacctctggctgctcctgagtgtgcgcctctggagctcctccaagctgagaggagcctagtacgtcctggtggtctgcaccgtgcaagtcgtcgtcgtagaactggctagtaggaccagtcctaccggcgtgagacgaagaggccccagtaccgaagatcccggctgcaaatcctgctggacaaggaccatcagtttcgtacaggtatttaacagtattaataaaaagtaaagtaccgtgtgggtgagggatcgacgctccgtgagaggaagagctggcgaacgcgcccgaagaggtggcgaacgcccctgcggagctcgcggaagcgccggtcgtgcctgcgaacgcgctcgaaggcatacgaggtcctgcgatgaggaaacgtgcagttaaaacatggtgacacattcgtgcaaaagctgaaacaaaaatgaactaatatctgggctgaactgtaccgtgcgaaaccggtgctgtacgtcgcactgctccgaagctaggggcgctcgaagacaaacgaggtcctgctccgacggtaggaccgcgaggccgtgggtgtaccggaccagctggaggtacgacgtccacggcgctgcgacaggagaagacgcgcatgaccgcacgcatcttctcctgcatccggtcgaaggtcgacctctgctcaacgtcagtcaagtgcaaacctctgctcaacctcacctggactgcggtgatatcggcactgatatcccgtgccgcatcagcctatgcaagatggaaataaaaaattcagtagttgtcctatattatgcaagataaatgacataattgttggaagtaatacaaattggacgtaccgccacgaagtagtctcggtcacggtgcgtgggatacgcgtccgtgacagcggcaacgtgcggctctggggcgtctggagtgaaggtcacacgcgcacgagtgcgaggaaggtaccagcgaaggtagtcacggtagttctcctccgtgtgtgggaagagctcgttgatcacctcctctgtagctaacacccagtcgtcaacgtactgctgtacacgtggagcccaaagtgcgcctgctagctgtccagatggactagcatcagcgccgcttggaacttctgcattcttcgggcatttcttgtaagtatggccgcgcagatcacacttgctgcagcgtaaagtcctcccacctgcttctgactcatccatatcatttctgatgcgtctagtttggcgtcgaccctttttcacccttaacttagatggatctggaatataaaaaacttgggcactcagcgttgtgtaagatcctgagatcccgaagccatatatctcctcactccatgtatgaaagattgcttctttcctgaaataatttgagacgtacacattgggagatatgccacaatcaccggcagcagcaagaacgtgtgagcaaggaaggtgatgaagcttcggcttcatacaactgcaggtacatccaccatccgccttcaagacacattcctgcacggcttgcttgcgatagataccacacctgctcctatcaacacacattatttcataccgatgcacttgtgtgccttgagcaacaactctatgtctcgtgcctttttgattttatcttccatgtacttgtcactacgttgccaaacactatgttgttatcggccatggacggaccaattttcttgtatcgatccctaaagtaggcttgcgtgccgtgaaggatgaattcaacaatagcaaccaatggaagtacccgaactcctcgcattacccagttgtacacctctgccaaattggttgtcattatgccataccgagatccatcggtgtcgaacaatagagcccacttctccttaggctcattctcaatccactgagagaaatttctgatggccgaccctgacctccttctcattgttggtgggtcatcatgtaatgcaccaagaggtatgggaggctcgtcaccttcaacttgtggtctgcgagattgctcatctgtttgcttcgttgtcaactcatccaacttgtcccacaactcattaaatttcttctcttggttctgtgcacagagcctcttaaagagatccataagatgtttgttcttgaattgcttgtagaaatttgcacccatgtgacgcatgcaccaccgactccgaacatcaggccacttagctggaagtcccttctcatcccaaccgttctgcaagtagtcaatagcccgcaacatacccgcatgacgatcatgtataaggcaaacgttgggcctcatacgcaccactgcaatgtgcactctctctaggaaccagtaccagctttcagtgttctcactctctacaaatgcgaaagccataggtagaacctggttgttcccatcacacccaattgctgtcaatatctgacctcggtatttacctgtcataaaagttccatctatgcatagaacaggtcgacaatgcacaaaagcattgatgcaagcacccaatgagaaaaaggctctttgcagcacactctttgttcgatcttcaaccgatgtaaatgtatgtaggtcatagtaagtattattattcctctgggcaatggtggctaacaaacgaggcaaattatcataagaagcttcaaatgtgccatacctcatctcaatgatcttttgtttggctctccaggcctttgcatagcttatggtgtacttgaatttgttctcgatgtgcctaataattgattttggttcaaagccaatgttaccaacaacactgctgtacatctcacttgccacaaaagctgaagtgatgtttcggtgatacttctccaccccttgtaagtagcacttgtgctcggtcacaatgctaactttccaataatcattccatttacccttatatgcatggacacgccacggacattcttccttcatgcacctcacttcatacacataatttgttgacttgatcaccctaaactctctctgcaatgaaactgcccaatgcttcaccgcctccttcatctcatccttatgagcataccttgcaccctcaattacctcgttctccttatactcccagggtacatgatcaccctctgatataacaagaccagagaagtcctcatttgcccaatcagtggccattacatcaccttcctcatcggatgatgcgtcgtcctccgcttgctcattatccgaatcttccctctccatttcatcaacaattataccgactctctccccctcatccgccatgcccatggcctgctcctcccttggttgattttcctcattttgcatcgatggtccaacaacatcccctgcattgctaggaccctccacatcttcggtttgcattgaaacatttgtatctttctcttgtaccgacacaaatataacgaggggccatgaccgttcaaaagccatttccacataccgtctccaagcagcagtgctgtccatcggcattagttcccaaaaataaccttctattgcacgactcactacaacagatactgacattgtgtagacttcttggtctattctaaatcctctcaacaaccaactataaattgactcaaatgttctctccgcaggcctatcgatgcccttagatgtcattacaaaatctgacagatcaacaccatctggaccaaatctaatatttccttcaccgtgaactatctgaaatatgaccttacttgacattgtgcctgatgaaaacaataactgcgttaacctcgcatttctgtactacgccctaagttacattctctacaatattgttctctaaatttctaaaagtaggttacattctccagatcaaactaaactacatcttacaattaacactactgtctatgtctcaattcatactattatattctatgctctggatctacacatatgtgcagtgtgctacagatctgctaaaatatatggaactaaaactaaaacgcaacatatgtactcaaacgtaatatattagtacaaatgcaaaagatgtatgggagcatacctgtgatgaagtgagcgaaccagcagggcttcgccgctccccttctgctgccctcccctctctctctctttcgtttttttggatttttagtgaatataatgaaatttgacaggggaggggctgggctttataggggggaggcaaaaatcgccctcccccagggcggcaagggggccgcctgcaaaattccatgccccctcgccgcccatttgcaggcggccccccgcacagtacaaaatcgccctcgcggagggcggcaagggggccgcctggaaaattccatgccccccctcggctcccatttg

SEQ ID NO: 9693 - DNA, 23781 bp, Oryza sativa
gcagtattagctagcaaaagaaaagcattattactgctgcatcatgaatccatgcatgcatgcaactgatgaatgattaacaacatgcaggcatggggtagtgctcttgatttgatttgcatattgattagtagtttccatgtggctgtgttgaacatcatttcaattctctgaatgaattggtactacatgcatgcatgcatggctgtgtttccctcttcttctttttttttttttggtttggccttcaattcatttggttgggcatcaacgtgttcagtagtgtgtacatagttacatgggcatgtgaacctgtacaaattgtcatcaacgatattgacagtgcttgctatctgtaataatctctacatgtgagcttcataatcttcttcttttgttctctctccccttttcttctagctctctgctgctttctgttagcatgtgatcctagggattaactgttcttgtgtaattgtcttgtcagtagctagctcctgatggtaataaatttgctgctagaaacaccacattaatcatgcattcaagtctctggtggctcagcaacgccggtgtgcgaccaagcgtacacgcatctactggagaatgtactgttgctgcactgcatccagctaattaattactagctaattaccagttgattccaattatgagcgcaatttggttaagtaattaaggctggtacacgtagtaccacagctagctagcttacacaagtgacagctactgtacttttttttttcggttgctcatcacacgtcgagaaaatgacaaggcagattggcaatacaccacactgctttgtcggtagctttagaattgccaacgaggaaaagtaccagacacgtattgccaccaaattttgtaattcctgtaaaaaaaactgaactgtttcctatgcaattcgggcgaaattctgtaatgatatgggtagcaggaagtagaaaagaagcatgtcattttcgaattgtgatcatggctcctgttagatgattaattaatctcaccaaccatgaattaataataggcactgttgctacgtgactcaattgctagtagcttctgtttatgaatttagttgcacttctttttcggacaaactaggagataacaaaggttattaatcagttgatgcgaacaagcatatctttgatgtgatgtttcgtttttatcagttaagttaaatgacgatattagtagtaccatgctaccaaaatgtacgacaattagtggaatgtcagcgacagtctaattgattaagaagcatgattaattagtcagactactaaaacaactatttcgtttttcatgtggcaaataattatgttttttttagaaaatgaaggtatcttaaattcatcactctacgttaacacgatttatcttatgcctacgctagaaagacagccccatgtgtcatcctctgaggatatgttacttttaatggaaatatgaagagtacagatgctgcatgattgtttatcacagtaagtttggattacatgagatcaatcagtccaaaaaatagtttttctgtgattacatgattgagagcaaaacaaacagtacagtgggggcacagagttagctctcaagtccttcttgtttatggtgagctcacttctggcaaaaagccaacccgtgacaaacctaactgcatcatcaccacattacttcttggttggtgattgcaatttataagtggattaagcactaaattaattctagcaactaaatctgctactttagtatcatgccctcaacccctgagcaccaggtttgagtggtctttaatttgcaagtattgctttgtatttagctgttctagacttctagtactagaaatgaatatataaatggtcactgcaatgatgtgctataagctgattctttcggtacacgctgtagaacactcgtgaattcttgagttgatgttgaaacttacaagagcagctagattccttgatcgatcaacctctcaacatgcttctggagaaccatgcaggtgtgcaaacttgtacctgatgctatgttcagattgaggcttccgcttccgttctggagaggaaagctaaaaaggtaaagagacgtacagcaattgttacttaccggctaatttatttgttttcttgaagagacatagagaaaaagaaggatatcattacattccaaggcacttcagacgaaaggttgccgcttctgtggttcgtgctccatacttcatactcacatagatgatagatcacatgccatagaccatattcatattttggttccatgttgcagcttgacaactaatattttccttctcagaacacgaaatgtgatgcgatcatttggccaagtgaccagtcccatcttttacatgattgttgttcatatctgtggttctgagagatatcttgaaacaatagcagagtcatcagttcacacgttgcataccataatggacttgagctcaccatcagctgctccactgattgctatgccgttgtccctgacatccatcaagtatgacagtgaatcctgcgttactatctcacctgggatcagcaccgggatacctggtggataagggcagataagctcaccacaaatctcaccaaggctatcctcgatggacactctcctcttctttaaaaagaaggcctcccttggtgtcaacttgatggagaacttgtccagtgggctactagcaggattctcttttctggaactggacccattttcagagaagtatttttctgacagatgctttacagaatgtacaagcctctgaacatcatgccttctggtccctaagttgactgcaaatgtcacggcctgtgtaccgaccagctcagatacaatttgatgctcctcagctaaaaaatcatctgcttcatatccagataattgcagatctgaagcacttaatgtgatacgcaagggatcaatagcaggaaaatcagaaagaaagcttgataagtccaaaacagatattcctgggataatcctcagctgatgttttgtttctaaagccatagatactggttcatcaaaagattctgcattctcactcagctgagcccttgcggcatccaaagaagagagtagaaggtaacttgggcttgagctctggagcaattggaggcattggcttactttatctgcatccacaagatctccagccatgtgaagcattgaggactgtgtaagcgagcacagaaccttgtgtgtggattgcacaaccaagtcggcaccttgctcagttgcgctgcttggaaaatttctgtgaaacctgaaatgggcaccatgcgcctcgtcaactataacaggaatgccttgcaggtggcaaacattgacaattccttgtatattgctgcatatgccatgataggttggtgatgtaacaagaacagcacctaccttctttctgtcctcctccagttccttaaccactttatccacctgcgatggggtaatacccccagcaatgtcccacccggaattgtactcaggtactatatatttgggcacagcaccagacaaaaccagtgcagagatcactgaaatatgacaatttcgaggtatgatgaggtagtcaccaggggaacaggtagccatcactgaggcctggattccacatgtacttccattgaccaggaaccatgttttaaatgatccaaatagttcagctgctcgcttctgagcatctaaaatcacacctttaggggagaagagatcatcaagctcaggtagctcaggtaagtcatgcaaaaatgtccttgagccaataagttctgacaatgaaggaggagaagctttccctctattatgtccaggaaagtgaaagcaagaaacatcttgatttgcagttgatttcagtgcctgaatcagaggggcagtaccagctttgacaactgctgaaggttcagcatgtgaaccattagtagtagacgttcttggagtgtcccatgaagtggcacattgtactacaacatgccgcatgattgattcctacgggataacagatgcgcgtcattgcatataatagaaggaccaagaatgccatgcacttcattaatcagtgatcaaaagctgcaaagtagatagtttaacttactaaccatggcctgtgttggtaaagcagacgaaaaaaaaacaaaggcagcagccttcagacaagttaaagcttatataaaacaatgtgtatggtacaaaggagcttggctgcattgtgtgagaaattcatggaaggaagacaacaaaatcttcacatgttgcacagctaagtaatgcacatgagcatatatacattaagtgtgcttggaagggagtggtaatagactcatagcttcagcagagaacctgattttattggaatgcttggggccattttataaagcacaggttactgccgactggatcctttctaattcataaatagccattctagcaataacgaaataaataataatagatctatgggttcatcgttattagagctccgagctcatgagcaattctacaaacagcttgtgagcactccactccactacgttacccaaatacggggatacgaatacggatacacgatatgaggatacaacacgttcttaaaaacaccgatatggggatacgtctatttatatttaaaataataaaaagatatagagcgaatacatgaattttaattattaattatgtacttaataactacaagactgtgaatagagatagatagtcatatggcatgatatcaattgatcaatacaccagtagtcaaaaaatgatcaatacaccaaaatcttttagtactatctcagatcagcctataatctgtctgctatctcaggagatgaggctaaccatgaagctcctatggatattgtgctcccatgcctggtcactagtgaatctacagactgcagccacatagccgcaagcagtatccagtagtatgtatgtgctagagatgcactgccacttaagcattcaatttcagaactaactcatcgcccatcggatctaggagaagagataacacttgtactaagatgagaagggaaaacccacaagaaaatcaatcaagacttaaatggggaagaaccagatatggcgtactaatggcgttgggcctcgcggccggtgattcctgaagacgttgcgcccggtggaggagatgaaacaaccggcgactggcggagtccctatgctcagcggcagcgacgctgcgacccttggttggcgatggtggcgccgccggcggctagcggaggccctgcgcctcggggagggatgcgacggtgggtaggatgctcgaactgcgtcgggatgggaacaatagcaggcggcgctccctctcccgtgcgtgggtttggattcgattgcagggaggagtaagaggattgagctgaccttgtgtgtgctggaggcggcgccgttgcccttgttcttgggcacgccagccacggtggagcaaggggagtaggcggccaagctcaccatcccggcaccacctcctcctctccggcgaccgccgccgccgccgccgagctgaacgggctgcaggctgcagaggaggagacgcgggagataagaagatgacaaggagattagatgggaggcgactaatcggcaattatgtttgggcctcaatagctaatgaagcccagcccaacaagctggcccgactaatggtccttctgcaactattttacatgccaaacctgtgtttgtcaggtatacattttattcagaaataacgtgttttcttctttgcggattttgcatgtccaggttcagcgaaattcaggtacatcttgttcaggcttaatctatttccacacacagattttgcagtaaaacctgcatccaatttgagacaccaccagacagtaaacttcagattctgctataaatctgagaatgaagaacaagcacagtcctattttgcaaggctttcttccatcttgtaataattccaaaatttctacaactaaattacaaagtacaatttaagcttcattcattcttcagatgtcttacaagaacacgtatacaacagcagagatgccggtcgctgcatggaatttacctgacaaatctgagtacaactagctagcaaagcactataaaatgtgcccgcgtaatttggctcttcttctgatagaaattaatcaatagtaagctattctatttctactggatttgatcaggcacttgtcaggctcccgaacaatgtaaatctcatccccgacactaccgtacagatcctggttcctgtgccatctccacaacgcatgcgtctcgttcttcacctgcaaaatccaaagatttttcatctcatctcatcaatggtgacatttctacttcatgaagcatctgaagagttttttttttttacctcaagaatgccatggccgaagctgctctcccggtaggcgctgtagtcgggctgccggtcccagcagaagctgccggcggcggggccggaggtgaagttgaagccgcagaagccgccgcccatgaaggggtccggcgtggacagcgggtcagggcagcgccccggctcgtcggcgtagctggtggccatcttctcgcggttgccgccgtcgccgacggagatgtgcacggggccgcacgggtccagcgtgtagttgaacacccggttcgaacgctcgtaagcatgcacctgagtgacacccacagttcatcagagaattcagagaagaagcaaaatgttcagaatatgttcggatgagtcgcttacatggccggtgaagacgacgtcgacggcgtaggagtagaggagctcctccatggccactcgcatgcactctgcttccctgtagtgagctttgaaggtgctgtaccatggcgcatgccagccggctatcacccagggggtcaccgacctgtccacctttgccaagtctttctccagccatttgtactgcttccctgaattcgttatgcaggtgaaggttttaaatccattcaagattcagcttcattttctgacattattatgtttctttactgaatgtttatactcagtaggtgtgtgtttctttcctgaatgtttactctgatgtcctaactgaattcaactgaatcatgtcactgaagcatataaaatcactattgtgcaattcaatcttcaaaaagatgttttcattgcatgaggtgatatctctttgttactgcaacatggtgggatgttcagatgctgaattgaatgtatacctgatttactgtaatcagcataagccgcgagcatgatgaaatggatgcctccagcatcgaaagagtagtagaatggagagaatgatccactctccgtcgatgggaacgagaatctggagctgtaagaagcgaacgtcttgttatcgatctgctcctcaatctcatggttcccttccaccaccatcatcggaatcctcgacgtcactggctccatgtaccttcagttagacatcacaaatcaatttatgaacaatcgctaaatgttaagagtttcagaaaaaaaaggttcagtgctaaatgttaagagtttcagaacaaagatccagtgctaaatgttcagagtttcaggaaaaaaaaagattcagtgctaaatgtgcagagtttcagaaaaaaaagattcagtgcaaaatgtgcagagtttcagaaaaagattcagtggtaagtgttcagagttttaggaaaaagattcaatgctaaatgtaaaaaaaaaaagattcagtttttgggttagtgactgatcactaccttccccagtaatcccagcgcggctgatacgtctcatggatgggcgtggagttggcgaaggagcaggagtagcagtctgtgccggtgccattggtgaggtacaggttggcgtagctgacgtcgccgaggaggaggaccaggtcgggctggttgctcaccatgtgctcgacggtggaggtggtgttgtacgtcagtccaaggtccccgacgatggcgatcttccccgggtagctcctcggcccgacggccggcatcgtgcggaacgcgtggatgtcgctcatcgccgccgggatcgccgggtcgccgcactggtagaagtactctgtccctggctcaagccctgcagatcgcacacttgtttgagcaaagaaatccaaagctgcaacgaaagctgaagtgaagtggatcttaccttggaggcggacatggtggatgatggcggaggtgtagttgaggaggccgtcgaaggggtagagctggctgtacacgagggcgtcgccggtggcgcggcggacgagcgagtcggcggcgaggccgtagcggacgacgctggcgaccgccgtggggtcgagcggctcgacggcggcgcccatctggaagtcccccgtgacccaggagacccaggcggaggagggcgcggcggagagcgcgacggcgatctgctccggcgcccaccccttgacccgccgctgcacccgcgggtccgtgtccggcaggtccaccgcgtggcccctgtcccgcggcggcaccgtcaccggccgcgtcggcccggccaacgtcgacgacggcgcagcctccgccgcggccgccaccgccgcggcggcgagcagcagcagtgagaccctcatccgcattgtgagatggcgcgagatcgatgggcgggtagcgtgaggaatcagtgcgaatttggagggaaatttataggagccgaattgggacaagatgggcggcggccggcgtgtccgctctgctcaccatcgcctgtttggaacgagaaagttgatgcagatatgtaaagggaaagtgattatcctctaacttcgtacaatcgtacctgcatctaaatagtcataaaaaattttaaaaaatttgacaagttaaattaatataaaatatatatcacttcacacacatacaaattaaaatttaacttctataaattataacaaaaataacaaatatagatgtgaacgtacgataactattttcaatttaatttgttctttttgttacaatttatagaagtcgaatttgatattacatgtttattatggatgatatatttcatattaatttatattgttgttttttaaaataaaattttgataactatttagatgatatacaaataatgggaggatatcccatcgaggaatgaatctatatcattttttgaattcttttcccaggtggatgaattcatctcgatttatgcgaaattcactaaatatcctcctgttttcagaaataaaagaatggattcagcagagatcacatacggtgtactccctccgacaaaccctgatttccgtgtccaacgtttgaccgtccgtcttatttaaaaaaaatttaaatgataagtcacgcataaaatattaatcatgttttatcatctaacaataatgaaaatactaattataaaaaaatttcatataagacggacagtcaaacgttgacacgggaagccacagtttgccttttttttttttgacggggacggagggagtagaagacagttgcaatttctttcatatctgaaatggataatgtcgccggtgccgttacggaagttgtgagcgcacgtcgccggacttgcgcttttggatggttgcgaggaatattccgtcgtcagcagagtagatgcctgagccgcgcggcgacggcggcgcgattggccggtcggccggtccaagtgcttgggccgtttcgggaatctcgtcatgccgacccatgggaaagcttttcttacttcgctgggcatgcgtatgcatatgcatgtgtcgctgccgccgcctaccgggatgctctagacggttgaagaatttcaacaaggatatgcagtcgtgatctctctctctgcttctttttctgcttgcgtttgcgtttgcatggctaaaaaattcagcaatggaggcgcagcgccacgttgattgtttcatcacgttgctctcctttacttcttgactagggagactgagaaatttgcagctagaatgggcagatttgaaaacttatctgaaaatttcataaaattccgtccaaaattgctcccgtcggccgatccacgagacccatgggctggatcacaagccacgttgggccgggccgtatttttatctaccaagaaaagcaccaagttgcgggcaattttttttaacgactctgaaaaatttttggatctcgtggtcgtaacaagaaaaaaaattataccaccacacacataccgacagctctaaaatacaaacacagaagaatactaccatcagactagacgctgctaagagtgacccgaccgccactagacaatgttgacggcattcctcttcctccgccgccattgttctctgctctctgcttctgcttctctctgacaatgttgacggcagttgcgggaaaaaattgttcagtccctagaaaagaaaaaggccaatttagctttcttatatatacttgctccattttgttaatatattgacaccgttaacttttcaacgcatgtttaaggggtggatcaggaacaaaaagaaaattagggagggctcaattacgtagtttcttcaacctccagccatttaggaacttttagtctatcattcatgataaaaaaatcgaaggaggtattctaagggtatccatgcgtcttgtgagtgtagggataactcaattctccctgcatccacgttggatccgcccctgcatgtttactcatttgtcttatttaaaaattttatgcaaaaaatatatgatacatgaatcatgtttaaagtattttaaatgatgaaataactcacgacaaaataaattataattacacaatttttttcaataaaacgaatgaacaagtaaaaaaattaacgatatcatcgtatattaaaatacaaaggtagtagctcgaatacgagtcatattcctcaaccgcaaaaaaagatactactccctccgtttcaaaatgtttgacgccgttgactttttagtatatgtttgactgttcgtcttattaaaaaaattatgaaatatgtaaaaatatatgtgtacatgaaagtatatttaacaatgaatcaaatgatataaaaagaataaataattatttaatttttttaaataagataaatgatcaaacacgtactaaaaagtcaatggtgtcaaacatttcgaaacggagggagtatatcactgttttgagagtggtttgcactgatatttccccggttatctgagcccttgtgttttagatgaagggcccagattaggcctaacgcaccactctgcactggtaatacttccgtggatccgcatcgtcctccttccttgtcgagccgagcagcgcatcatctccatcccgcctcaactccgccgctcgatcgcctccacccgccgccgttccgtctacctctccgacccccggcgggcgccgccgccgccgccgcgcctaccatggtaacctcctgcccccaccttatcccgttccctttctctacttacgcctctctccggatctggcctctgggccggcgccgcatttcccctttccgcccaccgcgacgaggcctcctggacccgccagatctcgcctcgaaacctgaacccttcctctggtctactccacggtatattgatggatcgacggagcccttccgataaccgatcacggattctagaaggatgggatgagattgtttgtcgctttggttcgagattgcattttttttttaaaatcagattatttgtggcgtttgctttggaagtatgggtgagtgctcatgtgtttgtgctattgtaggctaatacgctgcgattgtatctcacttgcataaggaacactctggaggctgccatgtgcctgcaggtcaaggatcaccattcctttgcattctgatcaccatgttctccatgctgaaatttgccttcatagatcattttctgtcttctgtcctccatgagtgtaatttaatttgcgtgtgtgtttgctttacctccagaatttcccttgccaagaggtcgagaggcacaacaaaccggaggtggagctaaagtaagtcgtgcttcaaactgaattttgtttattcaatgctttagttatgaccatgaccaagagaaaatgttgcactgatgttttagtttgagaaactggactttcagcatgtagtcgaaaatcaacatataattcactattgtaatgcaatataatgtattgtaaagagaacgatcttcttctcctttttttttcctgtgcatttgttgggttctgttttccaaggtgtttcctcatgaacccattctctaaacagtcataaatttttccaagttaatttcataagatgtatacaaaagaccaccaattctatcattggctccttttatcctttatatatttgtgggaaccctgtatttctatgttaccacacttagtgagaatagacactgaacttgtaattatacacgccaatgctgactaatatatttggtctaaaacatatcttgctatacaaatatttttttcctgtagggtttcatgatttccttttgtttttatacccttccttgaagttcgtatacctctattcttccctcacaatttattcttattgctttttacttcgttttgcaggactagccctgaacttctgctgaacccagtaaggaatctctcagcatcatctccaattcagtctatgattcacctgattatttaacacactagtgtagaattttgatttaatgactcattaattacactcaattcacttctaagttaaaatattttctctactggattatctagggtacgccagaaatcacatatgctagaagcaaatgctactccattaattaagtgaaaaactgacaacacatgatgacggagttctgattttatctttctaacaacacatgccattgtaccatgatggaactaatgtattttgacatttgtttcaaaaattgttgtcaatgtttgcgccacgcttatgactatgatactttatgatttaaatacatgcgtataaggaatttaggatcgaaggtgaacagtgcactttgacatagagtacatggcataaggcaggagcagtttctggtgacatgtctgatatccctcatattatgtgacccttatgaactctactaaattttttgttgaaggtgactgatttagaatgatctgctgccgtttggctgtttactggcagatatagcctacgccattctccaaattctgcttgtttggagagacattttctctagatgcctctagtctcttaagaattatgactcatagaactataatattttgcttcaaaacaggtgctcatttgccgtaatgaagcagaaaagtgtttgatagagacttcaatcaactctattcgtattagcatgaaggtaatcatgaaattatgattggatattactatgcttattgggataatatcagtcaatcatttgtcatctggtataccatcatatgtttttctctttattgtttgacaggtcaaacaggcagatgagctagaaaatattcttgcaaagaagtttcttaggtttttatcaatgagagcagaagcattccaagtgctgaggagaaaaccagttcaggtggttttccttcttgatgatctgtttcaatgctctttagccaattttatacgttttctgttatctgctgaaagtattaggagtagactgcattttgtcaagtcagagcattgcatgacatcactggtctaacttggttttgttcattttcagggttatgatatcagtttcctgataacaaactaccactgtgaggacatgcacaagcataagctcatagatttcattgttcagtttatggaggtaaggaaaaatgttttccttggctttcccatttgctacagtttgtgactttatactcatatcacatattctgatttgtgctgtaggacatcgacaaggagatcagtgagctaaagctttcggtaaatacacgtggtcggttagtggcaactgaattcctgaagcagttcatatgacacattcttggcgatctttggaaaacataaaaccctagcattgttagctatgctgtcttggcctttggcgagcaaatctggaaggatctttccaccactttgttttccttttgtaaatgcgttgacaaggatatgtgaattcttgatccaactagacctcattggcagctaaaatctgcccaggcaagagagatgaggggaaacaaagtcatggtcagtaggttgagatagattttttggccttttggttcaagaatcctgtactgtgccggccaagttttattggaatgtggaatgtcaaaattggggctgattctgattctgatatgtcaaaattggaatgtgaaaatcagagacgcttgttgtctctgattctgatttcagttccatggcaggctgccttagctgcgtaaatatatttcactgttcaatctattagcctcaacagttgccgtgaattcctggtgaagcaatctatttgtgcatacatacatgaatttgaccaagctaactgtcaacatctatgcatgaatgaacatctcgacgatgtgtcgatgtccacgaacgtcgttaacctggagaacaagatgtccatgcagagacagaggaaaaaaaggtcaaaccaccccttggccagcttatctccagctccggcttcaaaaaaaggtgtccgcttcacacgcaacggatcgaatgtgcttaacttttatgtgtgattcattagcagaaaatctgaaattttcagtgaaggaaccaggggaagaaagggctaaggttttccctatacgaagatttgtttagctgctgatgaattgatttcttcaccatatggccacattagcttcactgtgcatacatacacgcatgataaggagaagagagccattgttgttgactgagaaggagatacgcatgcattcatgtgggtggaaaaattgaggttaaatgggggtcggagttttgttctccgaccccttttgcaccttttgaaaatggcgttactccttcaagctcgctgtcgccgctgcggttcgtcaagagtgcgagctaacaatggcggcaattcaggcttgcaacatctgaaaagaaggcttgcacaataaaccagaatacatactgagtttattcagacaaattaaacaatccatcgaatcccgatttcagcaagctagcagagcattaattcatttcagtaggaaaacttatcttccgtttcagatcaacagctctgcatggtggtatgcagcatctgaaaagaaagcttttgcatagtaaaccactgaatagcaacatctgaaaagaaagcttttgcacagtaaaccagaatatattctaagttattcacacaaataaaacgatccatcctagcccggttttagcaaagctaacagagcattcatttcagtaggaaactttcctccttttcagattttcagatcaaggcctgaatagaggcatggccgcagcccacaagttcaattcagttttcagatcaacaaccctgcatggcgacatgaactgataccagattcataaccatttcaccatatatcatccctggcttttatactcctcaaaactacaaatgcacacactagtacatcaacccaacaccacaagttagagcaaggattccaagcatcacattcaccaataccttcgctctgcactgacatttggtaagtctacgagtcttggtaacgagcactttgagttgcatgccccaggttaactgtttcagcctttgtagtgaagctgagattgtagaatctggttgtcttccagcaacctgtcgtactccaggagaagctcctccgactgcttctgtagggcgttcacatgggcctccgcttccaacaccttcctctcgtgatcttcagactccgatttcagcttcttcatactctcgtttagcttagcaatctcctggtggagcttcttgatttcactggaagatttctcctccttttcacggaataaccggttctccatttgaagtttctcgacctcctctcttgatgtgttggctgctttcctcagtgtaatcagttttcggaggtagtggtgcaaccggtcaatgacaaatgcaaggaatagagtaaatcctgcagtgagagaccagctgttagaatctatcatgcctgccatatttaacaatgaacacatatcctgaattcctgattacacctagagataagtgctatacttttggttgaagataataatactaaacttgcataaagctttctgtaagagtatcccatcagttgcaaatgtactgattaaattgttcagaaaaacaacctggcataacataatgcatggaggccaacttttatcagttcaggtctgaaactcctaaccttctacaaggaaagagaccagattggacagacagcttcaaaggtcagacaacatgctatgtattttatttcagccaaactgccttaattactttatttgtgactagatgatttattggttaatagcacttagggtaggaactctagttgtgagtacagtgtgtgtacatgagtccttgtatgaacaggctgacaaagtgacagtccacctttattagttgcctgggtatagtactctgtagatccaacaaatcctccaatgcataaatccatatcaattccaaatgggtacatcatactgaccctaaggcataaacatgaaacgtgtaataggtttgtcatctcttattattctacattgacagtttgcatattagtatcatgattcctaacttgtactagtaaataaaattactaacctaagaatgatactatgtaccaaaatgaccaaataaaagcaaaaggtactacagttactgaaaatgtgattttctttcttaagctgttgcttgatataacctccatgtgacttctgaaatatgcttgcagtacaatactcactcaacttactagttcgtacaatgtgatcacatactgacatagtgacacttgccattctagttcttgaatacttccttcgcgtttgccacaatgtggtttatcagattaatagagcaaaaaagcatggaaacagaagtgatgagactgatattctaaatggccaccaaacagtagactatagttaaagaacaaatgatttctcactccatgctaccataatttttttatcacctagatggagcatgaaagcagcaaaaacctgatgcaagcctaaagcaataggagtccttattgtatccaacccagtccactacagtaacatggtactactgtttctttaccagttgaccacacaagggacctggcataaatgcaaagtgcaatttgctcattaagaattgaacatacacaacattcttcaatgataggatcataacttcctgcttctagtttaaaatgtataatgtaaactctctagcttctgtaaaccttagaagttaaaacaatatttggtttgcacaattatcgacctcctccatcattaagagcacttgctacacttcatccaagtagtagtaactagtaagttgagtagtaaagaatcaagaatgatgaaatggcgagctcaccgatgagggaggcctcgaggaggtgagtccgccatagcacctggtccatggggctgacggtgccgagcttgaggcccctgttctggatcttgaggatgctggcgacgctggacatgaggatcaccgagagcgtgcaggccagcgtcttcaccgtcgccgggcccttccccgtcttcgcctgctccacgccgcgcatcgccacctcccgcagcggccccaccttcaccatcagcagcagcgccaccgccgcctccgccaacaccaccaagaacagcagctgaatcatcctcccaaaaccaacccttcctctcctctcctctcctccaatctttttcttctactgttccgccctgagaaagctgggggttttaccaaaacgaagaccagctttgctcaatttcttcagcatcaaatcgaggaaccggtgcaggaatcgaggttgctttgcaataactccacaccccaaatgctgaagcactcctggtaaaacctcggttctgacggggaggagtggggaagaaatcgcaaatttaatgggaaaatttggagattgacaagaacctgccacctttcttggcctgcaaaagggtagctcatcagcaatcaagagaccaaacccaaaagggggaagcaaatggaaaatttcgagaggagtgaagaaacgaagaaagaaacccaccttgccttctcttgccaagaaccaacccaatagctcaatctcaaaccaatcaagagtctgtagccgtgtgggcagattatggtacgatgctaaagaagaactaattaactagtaaaggcgccgaggcattagagtagagtagagagagatggcggcggcgaaaggcgacgagcaggaaggcggcgtgcaagcagctcactcagctggaagagagagagagagagagagagagagagaggagtgtgaaagttcatggcccctgctgcctgctccgtgctctttttgtgattgataatggcgcttaacgctgctaatcctaaagttgcagggacatgcttaactttcaagagattttaaaaagctgctacgagcaatgcattagcaaactttactgaaaacaacctttctttcttccatttagataagtatatgtgtttgtgttaaagtaggtggttttttaacaacagctcacacctttgtagaatgtaaatttcatgctaggttcctctggcaaaacggcggtgggatacgaaactatgaacccataaaaacacttcgaaaatcgaaagaaatttgtgtatacaaagaaattcgtgcaagtctttctgcactagtagaagtagaactgtacaagtactgccctggctattcttttttattctttcatctgctgtatttttggacgattctgtaacgtgccagtacggggacttgcaccgtgctctgccaatttgaccaagtgtgattcctgcattgtcggcagatttctggtttacaccctgcatttctctcctctctgtaaaacgacggcttatctcatcgtcgtcatttgtgaaagaccaagaacagctatagagggggggtgaatatagcaattcaaatcttgcccccgaaaatactcatcaagccggatttctcaaaatccttactagaatcgcggctattagaagccggatctagaaaagaagagagaaaaagaagagagaaggaattcccgaaactagaggaggaagagaaaaggaattcccgaaactagaagagaggtgagaaagagagagcaaaactcatcatcgcaaagttcaaattgcaagcggaatttaaattgcggaatttaaatggacaaggcaaaaatgaaatccttcaaatcatttcatttataggtgatgcaaaataaccgctcaactaggagcaaacatacaccttcagaggaacattaacacaaacttaaaatctctcggacaaacacactccaaactaatcctaatacaaaagcctctcgggcaaacacactccaaactcacacggaaactctctcaccgagcatctcaaaatgattaccaaaaggagcaacctccacccttgcatccatctctctatttatagcctaagacccctaagacattgtctcaaatacccctagggcgaaaccctaacttagaacagatctggtccatccattgttccttctactcaaaggaaaagctccagatgattgccacctcatcgacccgaaccctcacatggtcttcttgctgatgaatccgcgtgctctccgtcttgacgaatccaaacttgccacgttgcccagccgcgtcgtgcgcgttccgtctccttttcctcagcgcgcgctcgccagcgcccaaccagcccgaagccgccacgcgtcccgctgagccgctcccgcgcgcgcttgcaaaatcgcgtgtgggtcccgcgctcctgcacccgcctccgatcgagtcacgcgaaacggaggttgccgcgtacggttttcccgcgcgcgtccttgcgcatgcaagctgcctgcacctcctgagcccatgcgccatgggccgccgtcttgggccgtcgctgcttggacgatgcaggcctgccgagccgagccattcaccatcttgggccacgtggaacggctggattggcttggcctccctgccaaccaatcacagcgcacatgcacagctagctagcttgacttttccaccgagccatgctagtagcaaccagtacagtgcaagctcctccttgcacaagtacagtacgtgtacatgcatgtatgctacctacagcaagtactgtagcagcaatgcacttgcacagtcccttctgatttcttcgcgaatccgatgcttgcacacttgaccttgtgaagcctgttgcaaagacctcctcacacggtgttcgtccaccgtgtgcaaccttgtgtccaatcttgtcacccggcatccttgatcgctttggacctcaactcctccttgagtctagtcccgatccgccgttgaccaagatcgaccccgatcacctgcacacacatgaaccaaacaaccgttgtcttggcacagatgtcgcaacctgaccaacgttagtccacacacacacttcttgcacatccggtacttgtcaatttcccatcacaaaagaactataaccacacatggtttcacaatctcccccttgatgggaacattgacaatctcaagcaaaattttgaaaatttgatttttgattcacaaagcaaaccattttgcaaaagcgaactttggtcattttgaaatcgcgaaaaatcaagaccaagtgacaagaagaaaaagggatgcaaatgcaaatgcaagaatgctccccctatgtgccaaactccccctttcaccaagatttaaagcaagttttaattttcaataagtgcaaatttctctccccctttgtcaatgatgccatcaagatcaaaagagacaaaaatgcaagataaaaatgagatgaaacttgcaaattttaggttttgagagctttgagagttatctaaaggcatcaaaaggtagacatggatcacacagatacaagcatgtgctcaagcctagctaagcatgtgcataagaagtatgaaacaagtcatgaatatcaagttagtatcgccagcaagcaaaaagctttcaagtgaattagtgatttagtgtgcaaagctatttctagaagaagcttaaaagaaagcaaaccagctcataatcatgcaagatttacataatcaaagcaatgaacccatgctaatgtgctaatgcccagttcataaagagtatcaacatgataacaaagcatagaacatgagcttttaatcttttctcatgacttttatttttatgatttttttttaatttctttaaagacaatagcacaatcacgacggtccacctgatcttatcagtcagcaagtgatggttgtgccaaacactgccgtctgacctcaatcaagttttccagctagagttcccattacaggctgtctcagtgctatcttcggcactactcatgcgtaaacgcactcagtagcccggacaaaaacagagataaaacttgtaaagcatgattgatacaaagtatagacgcataagcatgagcattcataagcatgtactgacagttattgcgaaaagaatgtaaacatggcatgagtatgagatggatacttcaatttaaacaaacttctagagcaagcattgcacattgattgagttcaaatgaatagttaatttaagcaggtttcaacacgcttgaacagcataacatgatcacacaagctacttaagcaaatgaaagctagacaagagatcaaactagcataagagtgatacatccatagcatagtgatgaccaagagataacaagcaaagctcaattgaagagtgtataatacaatgcataaagtaaacatgatgcaatatgttacaaatgcatgcaaaagaaaaacaactccccctcaaatcaagccataggggtggatcacccctaactcactccgcaagaactcaaaacgagagcgatcaagtggttttgtaaaaatgtctgccaattgtttttcagattcaacaaattctagcacaatggtacctttctcaacattgtctcggagaaagtggtaccgtatctcaatgtgcttggtcctggagtgttgaactggattttttgcaatattgattgcacttgtattatcacaaagcagaggaacaccagagaaagacagaccataatctttcagagttgaaatcatccaaagaacttgactacatgcactagcagcagctacgtactcagcctcagctgttgattgagcaacagaagactgcttacgagaggaccaagagaccaaagaagtgccaagaaaatgacaagtgccagaagtacttttgcgatcaatcttacacccagcaaaatcagcatctgaaaaagctcgaactgaaagggcagaagagcaggagtaccaaataccgtactcaagtgtagacttgatgtagcggaagatgcgcttgactgcttggcgatgtgatgttcttggagaagcctgaaacctcgcgcacaggcacacggagaagtggatgtccggccttgacgcagtcaggtagaggagggagccgatcatgcttctgtactcgcgctggtcaacttcttcaccgtcctcatcaggaccaagcgatgaagtagttgccatgggagtggcgattggcttgcagtcggccatgtcgaacttcttcaggagctctttggagtacttggtctgatgtacaaagattccttccttggtttgcttgatttgaagtccaaggaagaaagtcagctctcccatcatgctcatttcaaattccctgctcatcacatcagaaaactgggcaacaagtgcatgagaggagccaccaaatatgatgtcatcaacatatatctggacaagaagaaaatcaataccactatgaagagtaaaaagagttttatcaacagcccccatttcaaaaccattttgaagcaaaaaggttttcaatctttcataccaggctctgggagcttgttttaaaccataaagagctttttcaagtttgaacacatgatttggaaattttggattttcaaaaccaggaggttgtttgacatagacctcttcctcaataactccattcagaaaagcacttttcacatccatttgaaaaagcttgaaaccttttgaagcagcaaaagccaaaagaattcgaatagcttctaatctagcaactggtgcaaaagtttcttcaaagtccaagccctcaacttgggtgaaaccctgtgcaaccagtctggctttgtttcgaacaattgaaccatcttcacctagtttgtttttgaaaacccattttgttccaatcacattaaaacccaagggaggttctaccaaagaccaaactttgtttctttcaaaattttctaactcttcatgcatggcattaacccaattctcatcagataaagcatgacaaacatttttgggctcaaaagaggcaacaaaagctgaattgacaagttcataagaccgatttctagttaccctttcacccaggcctccgatcatcgagtcaggcggatgtcggttctggatgtgtcggggagctgtcggtcctgatgtgccaccatcaatctcctcagctgctgaagatgatgtagttggtgcatctcctgaaggtgatgtagtcgaaggagaaccggtttcttgcactggtggtgtactgtctagaggtggaggaatagaatca

SEQ ID NO: 9694 - DNA, 3482 bp, Oryza sativa
ctgaggcaatgagacaacgagaaggaccaggagcagaagagtcgaagttagcaaagaaaactcgaccaactcgagaaatgtcaaaaacaggagattcagaagcatcaagaactcgagacctgtcctttttgaaacgaacttccagattttcatcacagagttgtgaaacagagagcaaattgtacttaagcttacttactagtgccacatctttcagcatgaatttgtcattgaccttgattgttcctttagccatcacgcgtccactgctcgcatccccaaaagtgatggtctcatcaccggatgcacgagtgagagaagtaaaccacttggcttcaccggtcatgtggcgtgagcaaccggagtccacaagccaagaattacttctccctactccaaaatcctacaagaaagacacagcagatctcgatgattcagtactggggttagtgaaaaatgacttaggaatccagtactgaaccatgcgagaagtacaagcatctttagtgttatgagcagaattatatgcaagatgaccatgtctgttttgccccaaccctgctaggtcacgtcgagggtgcacatctcggcgaggaaagcgagatacaccacttgaacgacaatgacacgcacactcgaacctctcaggactctagtagctcttctagtcctaagacgttcttgtcgctcttttctagcctttctaaagcagaaacctaccaaatgaccagctttcccacaataggtgcactcatacttggttttctctacaggcttggtttgtctctggtttgcttgtgctcaacttgttttggatttttgggtctaggtaactctacaggcttagacttgctagtcataggtaccatctttggttctgaggttttgggtgtactagaactagtgtttccaatgaaacctgcagacttgaaggttataggtttttgagctagttctatcatcccatctgtgacacctaaaatctcatgggtacctatcctcaaagactcagcaaaatcatagcctataccttgattgtttatggacactttggattggtctaggatcatgttcaactttttctttccttgagcaaacctctctaaagattgttgtaggtatgaattctctttcttagcagactcaagatcaactttcagagaaatgcatgaagaacaagaatcaatagatttgatagaatcaatgacagttttagcatcttttagttcagtttccaggatagcacaattagcacatgaagaatgaataggttccttagtagcaaaagattctaacaaatcattcttggtcttaagcatggcaacttgttgtcttaattcatcattgtcactagtgagaatgggacaattttcacacctaccaatcctatcatgaacaaatttttcttttagttctttcaattccatctcaagcaaacccatatcaactttcatttcatagcaagtagagcaagcagcactagcactagaaggattcccagctcctaaagcacatgatttcaacttatccttgaggagattaatttcagaaagatatgaagcacaagtagaacaggtatcctcctcaggaatcatggatcgaagcctagcaatttctagcgccattccatcattttcagattttagtttctcaattttatacttagaagacctatacttatcactaatttcaatcatcaagtgtgccattctttctttgcttagttcatcatcaacagagtcattatctgagcaagaatcatcacaaagagaaccatccaaggaagggatatcatcaagacatacctcaggatgctccgatgagtcatccttatcctcaagcgccatgagacacaggttgatgaagtcctcgttgttggcgagacagcacatcccggagaagtccttgtcccccttttcttgatcatcgtcgtcggagtcgatgtcgctaagctgcacctcctcaagagccgccaagaccttgtggatcgccttcttcatcaaatccttcttcccctttcgcccttgtccctcgggcttcttggtcgtcttgtcactcttcttcttcaacttgggacaattcactcttttgtggttaggctctccacactcaaaacacacaaatggttcattggtttttcctctttttctatctctcacatttttgtaagctcttgagaattttctagcaaaaagagcaagatcatcttcagggatcttctctaattgctcctcagtgactgagtgtaaagcggcaagagagaagccaccatacacaaaagctgagtcattagaagaagtactaccagagggatcagctaccaaagccatcgagtgtttgaggcctttccgatggaaaacatccatctcatgggtttttagctttgagtaaagcttgtccatggtaaggtcactcagaggtgcactctctgtgatggaagtaactttcatttcccaaacaccataatcaagacaattcaaaagatggcgagcattatcattatcagaaaattcttttccaacagatctcaacttcgaaataatttctccaaaacgtttgaaataagaatcaatggactctcctgggtgcatctcaaatctttgatattctttatgaaattgattctgacgaaccaattgaatatcattgtttccctcatggaaattgcacagagcagtccacatgtcatgagcggacttgtggtgttgaacacgattaaattcaccagaagaaattccaccaatgattgcatttcttgcacgataattaaaatcaacctgagccatatttgcaggcgtgatgtcagcatcatcgggcacagtgtaaggagatttaaccttattccacacattatgcccttgcgactggaggtaggcctccattcgtgccttccaaatgacaaaattgtgtccatcgaaaacaaatggtttcgcagagtatttttcctccatagctgcgttcgttgccacggttaggttacaacgaacttaaccgggctctgataccaattgaaagaccaagaacagctatagagggggggtgaatatagcaattcaaatcttgcccccgaaaatactcatcaagccggatttctcaaaatccttactagaatcgcggctattagaagccggatctagaaaagaagagagaaaaagaagagagaaggaattcccgaaactagaggaggaagagaaaaggaattcccgaaactagaagagaggtgagaaagagagagcaaaactcatcatcgcaaagttcaaattgcaagcggaatttaaattgcggaatttaaatggacaaggcaaaaatgaaatccttcaaatcatttcatttataggtgatgcaaaataaccgctcaactaggagcaaacatacaccttcagaggaacattaacacaaacttaaaatctctcggacaaacacactccaaactaatcctaatacaaaagcctctcgggcaaacacactccaaactcacacgg

SEQ ID NO: 9695 - DNA, 7418 bp, Oryza sativa
gagatttaacgtgggaaaccctccaaaaacaggagagaaaaaaccacgtgtgccagccagcagaatatgtttactatatctgaggtgaggttacatcgccgtaaggcggcttacaagaggtatatatatggtggaactctaaaagggatgacgggcaggcctccaggcgacgctccagaccaagcctcccgacgacgggcctccgctccgctacggcagaagctggcatttattaagtgcaaataaatttggaccacaactcaacaacaccaaacagaagatcgactttagtggagtttatcttgagaaaaggtaggtaggtaatacattctaccatgagatacaatcacacaattaataacccaacaattgcagattcggtaacgatcctacaaggaagtcacaccatagagagagtaagcataaggatagtggctagaatttcattcgaaatcaatcatcaagcacgcgttacaaaccatgatgacaactctcatttggtcctgaaactgctactccaagcacagcagcctactgattgcagattgacgatgaggagactttggttctggttttgcctctgattctggcaaacaaaagaaaagaaaatttatatgtattgaatatataggggtgaatatccaatgcgactcctgaagtttctcttcgggctcaatttagtcatcgatgtttcaaatcgtccaaacaagtccttcaaattaattatttgggttaatatagtccttggacccacaaaaatgccacatgagtatgtcaagtcatcctcgcatgcagcggtatgaatgaaattaccattctacccttatataccatatagaaaagaaagaaatgtaaagacaagcgctgcgttagttagctctgcgaatttaaagtgttgtccatatcaaacgcttaaagggaaatgatcaatgagtattggttcaaagtagaagggaataagttcaccaagtggcttcgatcatgactaatacagctttgccataataattgcatgatgccacacttggcgactaaatgaagtcaattaattacatagtcgacccggcaaaaattaattacatagtccaaactagcaagcataatcacaggaagagatcatcatatataaggaatagctactggagatattactaaattcctttgtatgcgattagatacccaaatgcaactcaaagtttaaagggtttagatgacacagctgaagaagtgagttatgaatgcgcattgtactctatgtacaaataatcatattaatggttgactaggggttctagacaccacgctcgaaacttttaccactaaatcgtacacggttaagaaactgaagattaccttcatagcaggcatctagttctttattctcgatgtcatccagacgttgctgcaggctcggtggaagcaaatttataccagaacaataacgaatttcaagagatgtaagagatgagtatgcttgaggccccttcggcaaggataccaggcctgggcaattaacaagtctgaggtgttgcagcgacgggagctctcctaagcaagattccagtgatttcaagctcccgcaatagctgatatttaatgctcgaacggcatccagctttcctgagagtgactgaagtttttcacagcgtacaatatccaatttcttgatggacggaggaagatggagaaccttcaaacgattgcaatactctattactagagattctaggcgtggaaggacgcgatcgttggtctcgctggtggaccctgatattaacgatgacttgtccggctgtgcgaagctttctgcactcaccaacatcgtcgtatcctgctgctgattgaatatgatggacctcaggtcatggcagtccgtaatttgtaatagcttgagagacgtcggtaggttggggacctctacaaaagaataacaacggcgtatctgcagggactccaaacgtggcaggagttcacttggtgctagtgtagattgcccacgagcttgtgtgagtcctgtcagattcttgcattgaagaatatgtaacttcctcaaggaaaccaagccctggaacacctcttctggccagtcgacaagcgcatcgacttcccaaatattcagatctaggagctgaacaaaacatgtccacagagccaacgcacttgggtaagagaataaaaggttgcagccagttaagtccataagttccaggggagatttatgattccatttctcatcctcaatcaccaattcactcgaatcttgttgcttggccaccggtgctgtttctgtgtcatcagttgacaaatgcaggtggagactggacaatgaagtaatatatctgctggctgcctgtagggatatttgctgattgacttcatatatgtttaagtctctcagctttggtgcttcaggtagagtagtcaactctgggcaccgtctaatatctaatttgtaaagctgaggaaatgttacctcctcccttggagttccatcgactgcctcccatttctgaaagatatccaaaccatataattccatttccttcaatgctggaaatgcagaatgacacacggtgctaactccgccagacaattctgaaatcacatttgacgcttttggtaaggcagttagcctaggacaacttttgattatcagcttttcaacctcaggaaatatcagctcttctccttttacctcatttgtgtcccaccatgtctcaaaatttctcatactggccaaggtaagctccttcagtctgcaaaatgtaaaggaggtgtatatgtcacagttgaacaagcaatttaaaccatccagtccttcaaggcaaagaacttctagagctggcagctgccacagtggaggaagcttctcgagatttttgcaaccatctaacacaagcttcaccatgtcccgcagtttattcatccatgttggacatgtactgctcccacagtgaagtatactcagaaccttgagcccctcgtgaggcgtgagaccttccagcacctctttatgattattactctgtgcctccttgtacttctgaccagtccatcttaagctcaattcggtcagtttttccttctttccgagatttgctgcttttgcatcagcttttgtcacatttccagttttcttagctctagtcgaccaccaaggtccaactgccgcagctctcccaaatcactgcagccagagcaagaaccggctacaaaacatgtaagcgtctgtaggcaagtgaggtgtccgaggtccggaggcatgctttttaacctccaacatccgtgagtgtacaagtgacggagggcggtcatgtacttcattccgtttgggagttgacaaagacagtcacaaatggaaaggttcaatgtttgcagatgatataggatgcttatgtcttcaggaagtgcttcaattttactgtatgacaaatcaagatacctcaggtgatgaagatattttggtttcaggaatgaatctccccccatctttaaagctcgcaatgaactgtattttgatatttctcgcgaggaacgtatcaattcttcttgcgaggaacatatcaatgtttggatacctggatatactttctttaggaaaatgacacctgagaaaaacaagtggcgagcggaataaggaaaatcatcacttttactaagttctgtagctatagtagcgcattcttttcccatggaagattgtgcaacatcatgcataaggtcatggatcttacaagtaatcttagagcactttatatcatggaactcaaatgggatccccttcacatcctgaaaaaatgaccttgacaccaactcactgaaaattcttttaccaatgatttcagggcactctccttgtttctccgggataaaaccattggccatccataactggatcagcatttccacgtcgatctcatgatccttgggaaaaatagcacagaaggaaaaacattgccgcatatatgatggcaagcaattgtaactgagtttgagtattggtaaaattccattttcctcatcgcaaattgtgcttctgctcaatatagcgtcccattctttcttggtggtcttcgtacgcagtgtagagcccaatgctgttgcagctaaaggggaaccagaacatttcttggcaatatcaccaaccatttcgagtagctcaggaggaggcctttcttgttctgaattgaaagcacttctcttgataatttcctcaatgaagctttcattcaggttcttgagatcataaacttcttgagctggagccattagttgagcaactgcttgatcacgagttgttgtcaaaactgagctaccgctgccaccatgcttaaggttgtacttgagtgcttcccacttactggcatcacggttccagacatcatccaaaatgaggaggtacctctgcccactcacaacttctttaagttcatcctgtggtaactttttggcccctccattatcattcttcttattcatttctttgggagctgcttcaactattctttttgccagcgaatccacatcgaagttgtcagagacacacaaccagagcagcaactgaaaatgcttctgaatttcagggtcattgtaaacgagctgcgctaaggtggtcttgcccatcccccccattcctacaatgggaataacagtgagatccccattgctggcttgagcaagcaatcgattgacaatctcctctttgtctttctttcttgacttgttggcaatgtccatagaaaggttggagattttagaatccgtctttctccatttgatggaggacattggtggctctggtcggaacttaaacctaaaggcattcatctctgcaattaggacttcaatggcattcaggatcatcctgagcttgttgcccatcctataacgaaacagaatacggttgtgagtaggaatgagctttataacaacaatgctgccgagcttcttgtagtgccccttggccttggctttgcggcggagtgcctcgtacttgaactcgtcgaagacatcattggcctggtaggccaccttccggagctcctcaagccatgctttcgccccttccctgtgttttgccgcctgctcctcggcgtcggcgatgacgtcgaggatggcgggcagcttgcgtttgagaatctcatgctgctcctccatgccctccatgaccttgtactgctccaggaggtagctggaggccttgtccttcaccatggacagcagtggcccgaccaccatggtggccatcagctctgccatcggaaggatctcctagagctaagaacacacgaacagaacacagggaagcacaataagcaaggagtgtgagcagcagctgctttttgtgggaaatggaaactgaaggaatgtgtttaactgaatgcaactagctagtattaagagttgctgcctggaatgaaagtgtttgattggaatgaagaagtaagcaagtacagtacagtgcagtaagcttccgagaactgggcgacgatagagatagaaaactggagtgcgcgggagagaagccggtcggtcggcgcaagcgcaaccacgaagtactgacgatagctgagaagaagctgggatgctcaccggtgtggtgccctgtcgttcttgtgttcctccgtcgaccggaactcaacggcgaattgggcttggccggttcgtggagagcaaggttggagctgctcggacccgtctcaaattaaggcggcgcttgacggacgagctcagcagcctgcagccgcaagcgcgtcactcgccgctgtagcccgtagccttgcacttgatcagctccagtctcgaaaggagagagagcctcgcacagttgcacctgtcggtggagaaaagaagcaaacaacgttggtttgtctctgtggccttgtcgataaaatcatggagaagtatccactgcaaatagcacaagtgggataagcaatcaacaacgtcgggtacagtcgttcagacatcaggtcgctttaagctattactagcagatggcaaaaatatctccaaaatacattgtactctgtgtaccattaaaaaaacaaattttgaggaggatgactcctaaaatactgaacacccagctcgatgatttgcacaaaattaattactgaactatgaacctttttttttaggaagagatgcatctcctgtttctgttagagaaatgcagcattacaattgttcagcgaagcgaaaacaaaagacgggctacaggtcgccatccggggcgccaccaccagatgccatccctcagccaatcagttcagaacaagctaggattaagttaagcaagcacagaatttaggcatccccaggcacaacatctgggtttacaacttcagccatacaaagactttcactctaggtggtatttgattctccacattttcttataggggaattgcatgttgtgcattttcaaagccctataaaaaaacttaactgtgaacacaccattctttgttaatctccaactcagcttgtcattttcttttgttaagggcagcctattaatctcattgcaaattcttctccactttaccctctttgaaatctaacttctaagcctttttgttttagctttgcaattgttacatgtttttttagagttatattatacagctcaggaaagctttctcctagaaacttgctcctacccaccagtcttcccaaatctccattttccacttttttttctcacaaaaatttagaaacagatatttttaatctccatcagacctgaccaaaagtatgaatcacccactctatgttttccgtaagagtgttttgatttttaaatatttgtttctcaatacctcttgccataagccatctatggtttccaacttccaatgaactatgaccatagcatcagaagtagcaatttcagatcgctgtggccttatcgaggaagaaggggatacaatcatggagagagagagagagaggatgtatccactacaaatggcacaagtgggataagcaatcaacaatgtcgggttcagtcgttcagacatcaggtcgctttaagctattattactagcagatggcaaaaatgtctccaaaatacattgcactctttgtcccatgaaaaaccaaattttgaggatgaatatagacatagtatatatctatattcatctctataattttattttgttttttaagtatagagggaatacgaagaaagcttttcattatccatttccttctactcgggactcaggagtccactattcaaactgaagcggcttcagaccttaggtcactttagagtaagggcctgtttggcacagctccagctccaactccacccctcctggagctggagctcagccaaacagtttcagcttcaccaaaactgggagtggagctgggtggagctctcttacaaaatgaactggagttg

SEQ ID NO: 9696 - DNA, 30190 bp, Oryza sativa
gaagagagaagggagggaaggaaatgggctagggtttcagcggccgaggagagagagagagggggggtttgtttcctcgatctcgacgctcggccgtccgatcaaaaccctagagatcggacggccagagtcggccgggtcgaaatcggcccaagagggatcgagagcgaggccacttttctggcccaagcctaggttgcggcctggggagggaaagcgcgcccgcgcgagcgcaaaaggccatgggctgaccggcaagggccggaaagaagtctatttttggtccctcgggccgaagaaaaagagaagaagttcatttttagtactttatttttttagaagcatttacaattatattacaattatagttattaaatgtatttatttctaagcaaacctgcaaacctaaaaggaaggattttctttctttttctgattaaataattgttaaatgatgtttgtattattaaaattagcaattaagctttgaaattttcaataaaattccaaagagcgtaactaatcatggagaatttaataaaaataaatttaaccatgacattttatttctcacacttgctttacttgtaaattttgtttaattatacacatacctacttaaaaataccaaatattgcagcaaatttgtattttaactaattgcatatttttctgatctgtacgtttcctgttgcaacgcatgggcacttttgctagtactcccttcattttataacgtaagactttctagcattgcccacatacatatagatgttaatgaatcaaacacatgcatatgtctagattaattaacatcaaaataaatatggccaatactagaaagtcttacaatgtgaaacgaatgaaatacttaattaatcatagaaaattgcgttttccatgccgagaggatgagttccccaactcaaccaaatgaaaacagccggtggtggacttggtaaagtaaagatagcaagccaaccaaaccggtgatagacttgtactagttatagatggccaaaaggtccgaggcccgacggcccggcccatggcactccattttggcccggcccaagcacggcatggcccgatagaggtcgggcccatgccggcccggcccaaccatctgaccgtgcctaggcctctccacaagcacgttgggctggcccggcacaatgggccggtagctaggcccgatacacaaaaaaaataggagagtaaaaatagacatattatatgccataaacaaaaaaatatgtacctataatagactttttttatctatacatatgtcagcccaaagaggagggacgaaaaatagacttattttagctatacatatgtcagcccaaagaggagggaagaaagatagacttattttagctatacatatgtaagtccaaagaggaggaactaaaaatagacttattttaaaaaagacccgatgggccacccatgcctacgggccggtacggcacagcccgacagctggtgggccgtggctgggctggaagtgcagcccatgggccggatcggcccggcacgaagtgccgatcgggccgtgcccggcccgatggctgctgggccgtgtctgggccgggccgtgccgggcgggccttttggccatctataactagtactaggactagtagtactccaaatcagtactactagtaatcaccttgagtccttgacgccgcgtctagggtttcttcgatccacttgacgccgcgtcgcaggcactcctcgtcttcctcggtcgaagaaaagcggcggcggcggcggcggcggcggaagctgccgccttccttcaccccaaggcccaacagatcgaggacgctgacattatgttgcagctacctttctcccccaaagagagttggagttcaccaggcaagctgttcttttttactttcgtctccccttgttcctcgatcgatctaacagtcgcccatcgccgcctccgcctcgtctcccctatcgcttgtcctccacctaacccagcccgacggtgaaccggggaaactggggctggccttggatgacgtcgtttggttcgtcgcagaaggagacccgtctccttcttggtgtagtcgtcgtgccttgccggggcggggccagcagatgggcaggcctagggctgaattcatcaattttagttattattaggcatcatatgtttcaaaattttcatagaatttgaagccaaggcctctaaactaattaccctatgtctggagttcttgcatgtacgattacgattaggagggtggagtgggaggggaaaaggataaagcggggtggagtgggaggggaaaagaataaagcccccaaaactacaactaagcaatctgcacccatacaagcatccagatccattctaatgctcagatataaaactcactacacaagtggatctaccttaatacttataagccacaggctgaacatttaatttacttcatactagttagtttcacggatgaacatgaaccagatgtatgttcagctgtcgaccagccttcttttcgccacggaatctgcctggcactttctttgctctccgctgtgctgctctgtacactcctatgtgaccactgattgcacgtccttctgtttcactgcaaagccacagggattaatgtctgaaaaagcttgctcaactatgggcatggtggagtgctagcctcaacttttttttttagaaatgagatcattatatatcggagaaagcctaacacaatcagaaacccaacttacacacgcacccgcacactggggacactccagcttacaaccaagttctgaaacatttcactaacatctaaggccctgtttgtttcagcttaagattattgtaatctagattattaaatcagattactctaagctagattattataagctgacataaaataagctacgagttggttggttctctagattattagaggcatctaagggtagtgggtctttatccactcaataatctgttaaaagctcctctagaggagattattggaatatagtaatctggcttatagattataataatttagcataataatctacttgtttgtttcagcttactcctaataatccagattataataatcctaagctgaatcaaacagggcctaactccagcaccactcctggaaacagagagagacagcaaacttctagctcctacagaccacccaaagctagcctgaaatagcagccaactgttttaccctggttgcctggccgatccaagtttgtaccaactagcctattattacctccgtcttgtccaactatatgcagggactaaggaactggcaacttcaccggaccatcaaccttgacattaatccacctgtattattacccgctaccattcctttcgttagagctctgatgcatggttttgcagtgtttctttactgtttatgacaccacacttttttttattttgcttaattcagtcaattcagccattgggcacgtgcggaaaattaggaggagggctggtcattttctctcaagaagctccaagaataaggctgctcacagtaaggggggacagacaaccaagtcattgatctcaggtccgctggcttcccttatatgcatatcttcttttcacctctatttgagaactaacacgtgttttatagtgttttaaaccaggcgacttacattcgggctctattcaagatgtctgggctactctcagcgctgaagttgcatcaaaattgtctaaaagcgttgtttctctggctttgtctgatggtgatatatgttaccgttatacatacattcacaaatttatattttaatagtgtccccggttataaatggtttaacctgcaatcttgtgtaggaaacataccgatatatgcatgctcaggcacagctatcagttgccaggaggggtctggtacaatttttctgacttcggctagtttggttagagctttctatgatactgaagaaatttatgataacttaaaggttggtgctgctagtcatcctttactaattttcgcttgtttgcttaggatatttgtgacttgtttcttgctttgtcattatagattgaagtgcgccatgaaggcaatgaagtgtacaagggttatttggcaaaatatgatttagacaagaactttgctgttgtctacaccatggagtctcttgatgttcatgttgtactttccgaacatttgaaggataggtatgccaaaaagaagctagtagctgtatcgcgtaacaagtatggcggattaattaccaaaagtgtgatggtgggtagtcatcataattcaaacagatctgaagtttgccatgacatttcggtgatggctgaggtacactcgcattaatacaagcacattttgacacttttctgttaccatatgcgctaaactttatcagagcctataaaaatggtctttttttttctatgcaactcttgttcaatatcactttgttttgttgaaatgtaacccttgttgaccatcactttatatttgtgttaggactgggaaggtggacctctctttgactttgatgggaaatttgttggcatgaataagtttttggctatggatacaacctttatcctgtcatggatgtcaattctcattatctttaagcattatttgccaaccctgcaaaacaggattcttaaacggttacaaaatttgaaaagagtcaggtatgccttactgatgtttgcctctcgctggttcacccacttttttctatcctcttaccctacatgagtttatatacagtaggctgatttgcatgcaaacacatatgagctcttatatgttctgcaatgatctggatcaatagctgttggttcttagccacctgtaccaaggcagttgacgtccatttgtgtgtatcacagtcagtgcagtcaaaagtgttaaacaagccctcctccccttttaggtcttaagtgcaactgtgcaaggtgctagggcacacaagtgctcactctagaggaaaaacagtgaggaagaaaaaaaaaaggatgaataggctaagctgagcttctcatcctgcctcctttggccaccttcctcgcctgtcagtgagcttggtccaaaagctactgctttgccctcctaggaagcactgtgagctcggtctggcagctgtgcgagcttggtctggctaggttagagggaaaggagaagggataggggcatgcatggttgtcattatcgtgctgagggaatagtagaggggcaatgtgtggcacacaacgagagaaccgtgctgctgaacagaggataacgccttgatgcgtccttgtctgatttatggtttttgaagaagcaaacggaggtgaatgagcactgtgggctgtttggttgattgagaggtaggactagtgggctagttcatatttgtcagatgcacgcctgttttccccatttgctcttttcgcctaaggtgacaagatgacagcgtgcattcgtttttcacttgaaccaataataattttgctgtataaattagtcatatttcttgtttccattggtgaagcctgttttgtctaatttaaaggaaatgtgcacactaaagggattatgatatttcacagttctggtgatcttttgatgctcaacttaccccttgttttcttgaaatgtgggtacaaacccacacaacttgggatcctcttttctctctctgttttacccttgcctatgatgctaccgtggtaggtttttgtactgtgttgcatattaatgcactggtatgacctgttttacctttgggttgttgttcttctgcagggatggagagggaccgggtgagctatctgactgtcatccagaaggtgagcatagtgccataccttgcatatattgtggttatctgtaatgtatctatttttaaggttctcactggtggtgcgggattagcttttacatttgaagtttctattttatatgaacttatcacatctaatagtagtgtatttcagtgctaatcagtaatcatttggccttgtgcagcaccagttcatagaggtggtctcgataaggaacacgttgagtatctaaactccttgggttatcccaagccaccagtaaacgtgttagatggtgagtcgatgtttgtaaatttgctaacttattgcgcaccacaccttttgtacactattgactattctaccatgtatcttcttccagatggcttgatattggcttattcttttgaggagaattttggctttgtatatggtgaagtcattaaaaagtttccttgtgacatacatcaaagtgttgttgcacttgcttcattcaaaggtgattttacactaaataatataatgtgctattcatatttgcatttggtcctcactaataaacaataatcaaaactatgcatgtgtgcaggagaaaggagatttttcgcatgcacgggtttttttatagaatggaagggatgtacaattattctgacatcagcgagcttggttgcagagtctggtgacagaaacaagattgatgaaaacttgagggtgggtgctaattaattagctcctcctacttattctgctctttgtttaagtctcactcacttcattaatttatttgcagattgaagtgttgcttccaaacgaacaacgcagacaaggaacattacagcattatagtttacactacaatgttgctctagtcagtgtcaacgacatggatttccatgctcgtccagcaaatatgaagcttgacaatgagtgtccacctcaagtagcagctctagggcgttgcttcgaatcaggcaaaataatggctgtatgtggggatttggttgactggactggcacacttgattgcaatttccttatacgttcctcatgcaaaactactaaggtatgtaccgctagctagctgttgatttaaaatttcttgtctatttatacacggtgattgattacaaatgacaatttgtccatgtcactcaacgtaggctggaatcggaggacctcttattggtttggatgggaaagttattggcatgaacttttatgataaaaaaataggaaccccttacatgccatgggatgtaattcttaaaattctggcatgttttgagaatgaaaggtatttgcggatttcttctctcttttggttattcaagtgcttgccatctgatgtcttcatgttatttttttttttaaaaaaagacttggctgtaagatttgctaaatataattcaatggtgtgcttggcagtagtgctgctgaagttggcaatggtagtgatccatctgatgcgcctggctggaaaatccctggagatggcagtgtcaagctaaacaggttttctgatattatatatatatatatatatatatatatatatatatataacagtgccaagttacgtctcaaaatcctcatcacattgcgtatattgaactacatacaggtggcctgtgcccttgccatattggcgtcctcatgacgatgtggaagagcaagaacccccagagggctgtgaataccagtgcacatacagaaatggtgaaagatggtgctaccggtagaatatgttcgttctactcctctctctctctctctctctctctctctctagtagccctgtaatgttactacatgtcccttgccgtgttttgttttggtgtgtatcgcactgggagttgaagaacattcagctatggtgatgctgagatgttaaatacaatgttaagtaaaagtagcgtgtctatcttggatatatcctatttgttttttaaaaaaatcccaaagtatttggcaggacgggaagtgccaaagcttccaacttgaaacgtattgaatttcgctttgtggatgctgcacgagtaaaaccgatattgtgcattatgtgtttgtgtggaaatataaggggtgggtggcaggggatgctcatgagatggtcgtctagcaatgtgtacttgaaattgctacgggttttattaaaactcagataattgctgtgggcctcatggttcagtccatggacagatttcattaaatattggctcattattactacttgtaatcgtaatcgtgcatgcgcattgtactccctcattttcatactacaagtcgttacttactttttttttgggtcaaatttcttgactaagtttaaaaaaaaatatatattagtatttttaccaaaaacaaacatattgttaaaatatattcaatgtgagattaaatgaaagtactccctctgttttaggttataagacgttttgactttggttaaagttaaacaagtttatagataaatatagtaatatttataatacaaaattagtttcattaaatcaataattgaatatatttttataataaatttgtcttgggttgaaaatgatattgtttttttctacaaacttaatcaaactggaagcagtttgattttgactaaagttaaaacatctgataacctgaaacggaggtaatttgctactccttccgctccaaaatataaggcacatgcatacaactacccttaacccaaagacaagaaacaaattaccctaataaatataatgcatgcatccaataaaattagagatgttaagggtgaaggatttaaaaaagtaataatttaatggggaagatgttctagttaattatatgcatacatgcatgtcttatattacggaacatctaaaaaaaagtagttgtgtcttatattatggaatggatgaagtaatttttatataaactttgtcaaatttaacaaagtttgactaagaaaaaaagtcaaataacttataatatgaaacggtgagagtatgtcttaagcatattacacgtagacaatagtttattttcttttttagtcaacttgtattatctatttttaggcttgagttcatttctatgtgttcccaacccatttctctcgtattccatgtgcatgcttttcaaacggttaaacaatgcgtttttgcaaaaaagtttctatacgaaagttgcttaaaaaatcatatggattcatttttgataaaaaaattagctaatacttaattattttatgcattatcggacctctatgtttttccgtgcgcagcagctgcattcccaacttatggaaactaacacagccttagtattaactacttggatttcatataaaaagtgcaatagaaaaaaaaaactggcataattttatgtgaaccaattatggtcaaccaaccaacagatagtgttgctaggagtttgggggcttgctagggacgcgcggcgttttttttttctttttgcgccactttttttttgctttttcctttttttttcgtgcccctcccctcacgcgttttcctgattttttgtttttttttcattaattagccggcacagcgctagagagggagaggagcgcgatagagaccgtcacctcagtggagggagagcagcaagcgtgccgggagcccgggaggagttcaatggaaataaattgctaatcgggcggagcttacggttgttactcttacttgttagtttaagtgtgttggcttaatgagcatgtgcttaagaaggagagaacaagcaggagcggtaggatgaaatagacggcagatatggcagaactgcacgcccgtgacgtttctttggtaagtcagacgatccgagttcatccaaagctggtatgagtctgaccgtctatgcatataatccattgcaaacttccaatatttccatcacatcaaaaattttctacacacacaaacttctaatttttccgtcacatcgttttaattttaaccaaattttcaattttagcgtgaactaaacacaccctaatacactaatgtcaattgaaatgctgaaaaaaatcctagccactttactaatgtgccaataattcatcaattacagctacatgcttggcaatattattatttagagaagaaaatatttgcaataataaggttgtgtttgacttcagatccaaaattttataaagttgtatgttcctagcttcacgaattcacggaactgaatatgtgataccgtaacaattagatggattatttaacatgcaaattttaaatttagtgtggatctgagatctggagtagccaaacggatctaaggttgatgcattgacaactctaagctgcgatgcctaatgtcgacgtatggctacaaaattaacaattaaacatgcttgttttcgtgctaaatgccaacactatcaagattaaccgcctagagcaatggatcaaaataagttggagttggaagtactaccttcccattttttttcttccatttcaatatttcccgagataatatttgcgagaaaaaaatattactccctccatttttttcattttatgctggttttcataaaataaaacaaaatgtaaactaattaatgacttaacatacaaacagggataatataataccctattatgattccagtttatatctatttgtcacataaattttcgttcgttgtccccgtgcacaatcatcgagcccacacatcaatagcatcattacacaaacatatctttgtgatcaaacttatccacaataacattaactggtgcaatacacgggcaatgtgtcttttaaaaacatggaaacaaaatatgccataattagaactccaaaccatatataagtcgataataataattattactatgattgatttcgaaatttttttaattttagaaaatatagagtgactataaatattagaactgcttaggagtatatattgcttgtatagtccatccgtttcaatcaaacatttttaactttgattattaataaaaaagatcaatcatgtaaaattaatgttcctagatttatcattaaacaaattatcgtaatatacaactctttttatttaaaatattttattttatagatattattagttaaagtagtatctcggagactgtgtcaagatctaaaaaacaattatatattttaagacagagaaagtacgtactcactcagatcaataagagcaggtataatagtaggctaagccagctgtaaacaattatatattttaagtcagagaaagtacgactcagattaataatgcccgatattttcctcgggactgcctatacatttgtcgggtgattttttaacaagaaatcacccagattttttttacacttagatttatatccaacggactacaaaataaaataacaaatacaaatttacttattcaacatttttatcaaaattatagtgcacttatatgtcatatcaactaaatttacatatgtagttttagttatataggactgtaattttatattttaaatccttacatgtcatatcaactgaatttacaaatgtaattttagttatataggactgaaactttatacaattatagtgtaattacattgtaacttacatataattacagtataattatagtgtaacttacatgtaacttcaatgtaacttttaaaacaccgctagtcatacgaaatagtcatcacgggagatctctcacccgtattaaagtagtattatcgttcaatcactttcgttctatacagtggcaaagctaaaaaattaaagatgcgtacaataccctcacttagttatcagtgccttgccctaatcagatgctaatcggtaggttgaaaaaacgtcaaattttaagtaaaaaatttgacgacagatttataggaaaactgttttcctcgggcttcggacgccgacgggaaggattctcgataacttccctcctttcctcaattccgctctgcacggacggatttttcatatccttggactcttccgaagttccaaaacaaaacaaaaaaaaaagaaaaaaacagaaacaaacaaacaaatccgtaaatccccgaaattccctacgaaaaacccagtcattacctacatcaggactccaccgaacgcaagacaagagtaaaacggaagcaactcccagcaacagatcgtcacggacatggacagtacacgaagactatagctgtgtttgcaatcccattttcccaacccctctccctcgttttccgcgcgcacgctttttaaactattaaacggtgtattttttgcaaaatgtttctatacgaaatttgtttaaaaaaattatattgatctattttttttaaaaaatagtaaatacttaattaatcacgcggtaatgaatcactccgttttcaatgcagggagtttagttcccagcatcctatatccgaacacagccggtaccagatgtgtcgatgccgtcttccatcaggacctgatctggctcgccccatatcgcacctttggttgctaagagcatctctaacagtctttttaaatcggactctccaaaacacgtatataaccagctttctaattgaattgtaagccaaactcatttatcactccaacagcctctccatctacgccttccattctgaatctatgacactgggacccacgcgtcagcatcaactccctcgtccctccttcctctttctccctcctccaatcctcttcctcttttcccccaacgtagatggctacagcgagcatggcgtcggaagaggaggacgtcgacggcgacggcgacgatggaggcgaggcggccggcgccgaagaggggtccggccccttcttccccatcctgctcttccctcgtcgccgtatgcagctatgcatcagctacgttctgaattcacaaaactgaaatgatacaagaaagatatcagcacaatgccatgctagaaaagaatgaaaagcatgaacaaatgcactcaggttgagaagaaagaagaatataccgatctcgatttcaacaagcttaacagagacaagaaaaacatgaacaaaaaaagaagttcacctttctgccatctaccagatggaaagaaccgggaagccataaatcctattcagtaccctttttctaatccgaattcccaattgctaatcgagacaaacaagcagcgcagaacagacggctacagagattaaggtcgtacctttgcaaatctgcagagcgcggatgcgcagattgcggaagcccccggcgacgacgtcaaaggttgtcgtcgatgacgccggagtagaacaagagggacggcgactgggagaggtccagctcgaggatcccggggaagcgcgcggcgaggcagcgtagcatggccgggtcggggcgcgcgcgcaggcgccaccgatcggagctctagacccgtagccagtggagcacgtcgtcggtgagcacatcgttgatgagcgcgccgccggatacgatgcccggagacgatggcagtggtgctcgaaactgatgggagaggaagagagtgcgggaggagagagagagaggagggagagagtggggccacgattggcaagccaatttggactggccaaatttagccattgaggagccagtttggccagccatatggcttagctatccatttagtaaaattgttggagtttgtttttgtctataattattaaattttaatttgaaaagtgaaatagtcaatctgttggagatgctctaatctggcttagctcggctcgccatcgacgccagactgaaggtgcaaaaggttggcgccggtgccggctgcctccattttagcggctcctttttccgtggaccatttctttcgtcggaactacgggatccagccgcgtgttgccgcgtgaaaacgagagaggagaaacgggaaaatagaatgaccacagtgggtcccaccgtatgtgtatgtgtcttgtatttttccttttaataaatccaccgcacttttgcacatcttaaagcatgcttctacacatctgggtacagtgccatttacgatgatgttgcaaactactcataattacaatttatagtaaatggtcatatatacttccaaaatacatcatatacacgtacaggctacaaatttacaccatactaagtcacaatataagaacttctatagcccgcccaaccacttatccaatcttgtccccagccatttcattcatttactgagcatcaccaacagattggctaaatcattcacgataccagaagtttaggaatttttttaaaaaaaaacatgctccatcagtatccctgaacgtcattcaaaatttagccactcccatccccgcgtttctcgctctcgtcttgtagttgtagggggcagggctcgctaccaaaatctattcacgcgcttcttcccgcaaagctcgtgaaatggtcgaggtcgtccgccgatgccaccatccaatctccactgcagcttaccggaatgaaagggcaaattccataagcaccgcagctgcatcgagctgctccgctgctgaccacatcttcccagaaaaccggacggaaatcatagccccgagggcttgattcgtcacgccgacgactcccctcatggcatagatggccatatggcccaagacccacggcccggcccgaagcccgcaattttggcccggtccaagcacagcccgggccgtgcctgggctgcaccctcggcacggtgggccggcccggcaaggcccgatcaaataaaataaaagaattttgctgatttatttattgctatatccaatttatggaattgatacaccgtttaattgatactatcatttagcaaaatgaaacatagcatatgcatccatctttcggctcgagaatttcacgggatagagatatggtataagaaataggctattaagtaactctaaatgaattgttttagctccggttcgtgaaggaccagagaagctttctagttatgaatcgggtatagaaccccctttatagcttcatgctgtttgaatagttccaattaatggaatcgaagtcattacacgagtgagtttagcaagtggaatatctgactttgaaggagctgctgcaagttctcgaattgtagttgtcaattctggaatactttaattaactatttgattgaattttcccttccttttatcctcccgtcttatatgggggataggcccccataccttatatctgtatatggagagtatacttgaaatataaattgatttaaatagaaaacctttgtatatattctatattattaaaacaaagtctaaaaaatatatataatatgttaaaaaactcttgtcttatcgcgaaatgtttcaaaagagcataaaatttattttaagaactaagaataagaaaagagtataaaacaaatggaaaatgtgcgatatgttgggaatagctccgcggaagaaaatctaaagttcttatgtatagaacttttttaaccatgggtcgcttctagtagcgattatgaattgctctcaccgctctttctatttctattttctattctttctattctactatatagaaatagaaagaattatatagaaatagaaagaatagaaagactctttcttacaagagtttcttacaggagtgaaacaaaattaaagaaagatcggttcaaatccgatagtcgtcttttttctctatcaatgttccatgaacaaaaatacctctttttctccgaactcactaacctctagaaacatctcaaatacaaatcccttttcgatatatttctatatactgtatccatgtatacaggatccgctatatctgctttggcactggaatgctcacttcgtgcctatcgcgctatttctacataattgtcccttatcttatattgttttcttctcgtcctctgtgtaaatagcctaatatgggttcacaatcaataacatcttcaccatcgagagtaacgatcagtcgaagaacaccatgcattgatgggtgctgagggcccatattgactatcatgagatcttttcttgtaagcagtagactcatatcctttattccttaattcattattccatgaaaatggattattccatgaattcctcaaaacgaggctcatcaaaatgcaaaatctaatactactataagactactaataaaataagaaaaaaattcgaacgattcttattccatatcctttataaacgaatttccctaaaaagtaggggatgatccgtgaattaacctaaccatcaactaaaaaaaatcctacaaaagcataatggaaaagtaggaaggactcaaaatagaaaaaactcacattgggtttagggataattaggctcgaactgatgacttccaccacgtcaaggtgacactctaccgctgagttatatcccttcccttttatccactagttcccctctctttagtttaacaggatagaacagtttgattgctgacaaggctcataaccgtggggttgcgggtttactgattactagaatttttttgttagaatccaaaagttctttactaactagaaagaaaaacgaatacctactgcttattgcaaattattcctgattttaaaccagagtagattttcgtgatgtgattcccgctaaaagcatacatgtactgtaatgcgcttccccatgggtatctggtaaccacgtatgtaggggtataatcggcaatttgacaacataagcaataaggaagccaaaataaaatagtatttccaatgttgcagtgagccctctcccccttccattagaagaggtttttgtccctccaccttcgttgaaggctgtttatcggaagaacccgtactttcctctgggcatcgtatcaaaaatcgccattcctgagattaaccacccgccgggggagtttataaacaaaaaaatattgctaattccatcttctatactgagatataccaaaaaagtatagtgatgccaaatagacttatataatcgtataaggcaaggtccaagacaagaggtatacaaaatagacttattttccagccatttaaacacagctcacagagttgagggaccaaaaatagactttttctgttatacctgaacatccgtcgcctctccccaaagctcatacgcatcctcgatttgtcccgccgccatcccgattcaaccatttggccgctgtccggacgacgccacaccgccgcctgacatattgtctgctcgacgcctccctgtaccggccgctcgccgtcgtccgagaacacacaggcgacaacagggtgaggcgaccgcccagaaccatcagagacgaccaggcgactggtcacggtgtctacgattcagcggatttaatttgtcgatggagagttcctccatcaaatcaatttagctattctgaaattgttcctgctactgctggtgctgaataatctactggatgttgctgctaaatgtgctgctactgtatgctggtgtttctgttgctaaatgctgatagttcgttgctgctgataaatgcagctggaaatgttgttgatgatgcttgctggtttttgttggtgcttaactgatgttgatattgctaatctgatgatgttgatctggaagctagctgctgatgatgctaatgatgttattgatctgatcatctgaatgctgctgctacctgctcatcttatttatgctgcttgtccttgtatatgctactgctgagcaacgggtggacgccgggaggagcgcccggccgatcaagatcacgcgggacaaaaaaaataaaactgatttatcttgattagttcatatgcggcccacttttttatgttttgggagtcatttttaggtattctcttggatagatcaatatattcacccctcaaattttatttaggaatcctaataactaaattttagggatagaattttcatagtctcttggtgatgctctaattctttttttttcactctatctttaatccctcaaagaaacaacagaaaaacagaaagttaaataaattttcttcgttatattttaggagagccatggaggagtccctactaaaaagttaaatcgatttcattcattatctcatcttttgtcaattgtcatcgttagcctcgcagcgactcgtgatgctacaaacaatctcactacattggtggcgaccgaatcaatccaaaaatctctgtattccctatggcgagcaaattaggaatgcaccaaacatcttgggaagaatgacttctcttatagccagaggcgttcgagaaggtaaagactaatttgaaaaaaagaaagaaagaaagcaatggccaacatgtactcccctcttccagatggagagaagagggaaacactagacgacttgagcaatatgagatagaaatggaggattaccatgtaagtctctttgtatctgtttagtcagtacattatttctgcataaagtgcaggcagctgtctctgggagactgggaaaatatcaagaaagaaaggcgaaggcttcttgttgaagaagctgaggataaacagcagggatggtttgtggtagatgagaaaaagggttatacaaatcttaataactcgcaacataggggccacagaatgtcttatcaaccacacgaggagattccactttcaagagttaaatagaactaagttgaatacttgtatttagagaacatatttgttaggaagaaaatacttcatggctcatgatagagccgacaagaaagttggagtgacaatctcagaactacacatgatagtgatctgatctatgcctattgttgctgcttctcaaaaataccgatgctcaagtaaaccaccaaaaaagaacttacttgagtctatgaatggtgctaatcagcagtaaaggtcaccaaaaatcttacttgagcctatgattgctactaatctgcggtgaaaatcaccaaaatgttgctgctggcctgctgtttctcaagccacaaaaaagggaacttgtaacatttgctttgctccttcttaggatgggcgttgctgcctatgggaacttccctcccttcttccttgaagcaatcttcttcttggctgcatctgacttcggcagcatcgcattcagcataccatccatatgagatgttaacagtgccaccttgatctcatagccaccaaggtacaaattgagctctttcacacaagtcccagcgattagtcccataacttttccttttaggctgaagaccggagaacccactaatctgcaatgcccattgaaacccttctcggcatagtggcacgttcccaggaagtagcactcagaaccattgatatggttgcgtcgaaggtcgagtgcagcggttgattctgatatgacaaagcctgggatgtggtatgcagaggttgctgaagaaggggcaaaaacgacaataggttcgggcataacctgaccacgcatcttcttgattggtctgcagtctgtgtgccttttcgtcctaagagacagaacgtatccccagaagcaaaagccgaggcttcccgttcgatctgatcaaagaaacagatcttgagggtatcctctctgcctgatgcaaatgacgattgggtcaacacgtaagtgtactttccctttgatttcaacacgcatccgctgcaatattcaccattggcgtcacggactacgaccatcgatttccttgctctcttctctaccggaatgtccatgagttctacagattgcgagaggaagtaacataaggacaagtactaaagtaggtctaccggaatgtccatgagttctacagattgcgagaggaagtaatgtaaggagaagtactaaagtaggtactagatatggggcaagatgcaacacggggaagcagcacacgcaccttcaccttcaaggagtggaggagcagcaggtgaccgggccatttctcctccggcggcgacggcgaaaggataaggcggcgcaactctttggtgcgggagcgggaggaggggggattagagagagcgaggcagccgcagaaaagaaaacctagtggccaatatggacaaagggaacatgggatgggccgggatcgccaatcgaaggccgcaatgggtaaccagagcaggacggataaggcgcacggggatgaataagtttatccaaggtccctgaacttgtcaacaaaatctgattttcgctcttcaaacgaaaaaaaatacaacggtgcctcaaccatcaaaaccggtgcaatataggtcccataacgatgtggatggcagttttaactggcatggtgcctaaatggttaattcgattcggttttaatctgatttggcattgacgtggcatatgaagcaaaatttaacaattttaaaaataaaataaaatatatgggcacacatgtcagttgaacgaataaatctaaaataatgggttatttaacttttgaccacttttaagatatgacaattaattattttccactcgctgtctatgacatgtgggttctatggcaaatcatttatcactatccataagagtagcaaataattaattgttccaaaaaaaataatgggcaccacttcctccacgtcatctcctctcttttctgtcttctgctcgccaacgccgctggagaacgggagagtggtggaggtcaggggccagatcaccaggtttcatgcgccttcttcttcatctactcggcggcggcgcttgcattcctcagctcgaatgcagcgcacaacgcgcacccgtcggcgagcgcgcgcggagaaggacaagggcggcggccaccggccggcggggagaagggcagggggcggcagccatcgggcggggagggtggcgagcgtgtgcggagagggaggaggccggcgagtgcgcgcgggccacgccccgtcctccgagttggatagtatagagaggtatactgcgtaacgtgggacgattgtattgagcctcaggggaccggtatatataggagtacatgtgaaggagataaggaaagattatagataaggaagtaatccacacaaatcaatcatatcctaatacatttctaactaccatatactttaacatccccccgcagtccaagcgtgagcagcgcggacacttggactggagaagaaaccggcgagagtgctcaatatcgatgatagccctttgtgccgtagacgatgtagccgagatgaagttgtcgtagtcgtagtagcctgtcgtcgctgatattgatgcagcacaagtcacccaatagtgtgcggttgtggttcgtggcaaggatcacggcgccaagcatgagagtgtgcgggtgtaggcgaaaagccaacaaacacgatgaccaaaaggaaaaaaaaataaagaaaaagtgaaagtgcatctacgacccctcatttattttggtgttaatgacaacacaattagaggttcactaatgctctttgttgagatagatgcaaggataaaaaggaatggaacttgagtttaaaagcattgcggcatcttttgtggtaattgtcttctaatccatgtatatcttgtgttcttgagtatcaggatgccgaactattaagagggataccacatgcatataattggtagaacactagtgctcaaaatcctgcttttgaagtgttcttgttcttctcctgtcggactatccgatataaggtcggattgtctgatacattggactatctgaaatttctcagaactttactctctgtgttgaattgctttttattcctcttgagtgattttttttatgtcaaatcagactatccgatgtgatcggactatccgatgatacagagactccgaaattcaatggaacttgagtctctgtgagaggatgaaattcatgattcaaaaataacggactatccgatatggcatcggactatccaatcgatcggattgtccgaaattctccagaatttcgttctctgtctctggcttgcttggggtcaaaaacatcagactatccgatgtcacctcaaaaatattctctcccaacggccacattttggggatctataaataccccccacctaacccttttctagggttacccaactcattcatttacattcactttgggttgagcttggtgctaaggtgctttgaatctttgagctctttctccctcaatcaaatccctcctcattctttgtgtggtggatctttgtggttgtggatttggtgtttgagggcctagtgtgtgtttcactcgatcttgagcactagggtttgaccaagagttatgtggtgtttgttactcttggaggttgaggactcctagacggctaggtgtcactcccgagccaccgatctacgtgtggttggccgggagaagtttgtgaatgccggatctcgcctccgcaaggaaagagataccccttagtggaaggaggagtgcttagtgcaacctcttgaggaaagggttagcaaagacccggctcttagtgagctcctcaacagagagtagaatcccctcaaggatttgaactccgggaacaactcggtgaacttcatcgttggtgatatctcttctccccctatttagctttgctttttgtgccgctatagatctagtcgctgtttacgccatactcttgtttgtgcactagatctacttgttctgtttctttagtggatcagacagtctgatccaacatcagactatctgatattgactgtggatcagactttccgaccctaactcaattttagcttccgcataaagttttaaattagcctattcacccccctctaggcctaattgaccctttcaaaaagaaatttaaaaaaaaacactatggtaatcacggtgtgaagacgttggtgatgacgggcagacggtgatgtcgacaatgttgttgtaggctggggcagcaaaacaacaacatccttgatctcggtgaaacgacggcgtgggcgacgcaaaccgatctctgatcgaaaaaaaaacagcagcagcggctcagctctttcgtgtctcctgacgcactaaccggatgcagccatgcatgcatgccatggaggcacacaaattagaaccatgcatcttcgttacccatcgttgcatgcaccaaccagttacacctaaaagcctaaactgataaggaaagacggacaattcactttatacactccaacactccccctcacgcgagatcccctcaagtctcaagcgtggaatattggagtgggctacaattattttatttaattacgtgccagtcaggattcgaactcgagatatctggctctgataccatgttagatagtatagagaggtatactgcgtaatgtgggacgattgtattgagcctcaggaggccggtatatatagaagtacatgtagagaagataaggaagtaatccagacgaatcaatcctattctagtacgtttctaacatcatatgctctaacactccgctgccgctgcaggccacgccggctcctctcccccgcgacgccacccaaagttgctgcaggcgttgtcgccgcagccgttgcgagaaacttcggtcgccaccgccaccgaaagctcctgcagacgttgtcatcgtcgtcgccgcagccgtctcgcgaagctgctgcagtcgttaccaccatcgttttcatgtgaatcaatcgccttctccttcctggattcgccgatgaggatgtacggactcgccggattccttcatcctgctgctcctgcttcgcttccttgtagccgccgcccgccgtcgacatgaagcatgtgaatgaagcatgctgcagccacgcctgatgtaccaagacactgatgaaggcttccacggattgtttgattgaatcaattcgctactagttgggagtagtagttgaaggttctgacagattcgtcgatttggtgattatttttttcttgtatttttctgttcttttttccttctgtatgtatgcagttgtttataaaaactgggtactacattaatttctttggaggagtaataaaattgtgccaagatttgtcatccgaccagtgtgagttagcagcttccatctaaatcctaatatatcatattttttcatctcaggcagagatgcacaagtgcacaaccaaacatgtaagatgtgaggctgccaattcagatgaagaccgactcaaattagtcacgtaggcgccacgtcagctaaaatcgtcatccaaacaactaggggatatatattgcaccagttttaacagttgagggatccgttgtatctggttttccggttgaaggacgtatattgaattccttgacaagttaagggacctcagatgaacttacgccgcacggagatgctccagtccgtgtgaaggaataagtctactttgcctccctccactcctttccctgttgaatcacatccctcaacatgcaaaaccaagtataacccgtcctccaactcataaaaccgttgcaaatcgactcctccaacagtttcgtcctacgtggcatgttcaaccctgttgactggctgagtcagcacgtggaccccacatgtcagtgtcatgtagagaaccctaaaagtgagggtaaaattgcaaaccctaaaaagtaggggtaaaacagctgttggaattaaaagtgggggtatggatgcaattgccccctacttcttctatttgcactataaaaaatatacatttgatagaactattaatttttattttattttttaggtgacctataatagatattatttattagaagatttacattgccatatatttctatgcaacaaaacttatatatatacatgtttatgttttcacgtttcactcatatttgtattatattccatgttcttatttgaaacatatattttatttgtatttcccaaacatagtaacataaatatttgcatgtattaaatatttgacttattttttttctcatcaactaaaatacattcaagtaattatttgtttgatacagtcatcctatgagttgcatataattgactgaagtctgaaggtattgttatgaactttaaaaaaactagaggtaccactttgttaattaacataatatctaggtctgtacacattcgagaattgcggtcgtacttgttcgcttgtcacaagtacttggcaatgcatatggaaaccaagacagtactagcccgcccggaaatcaaccaaatattatgtaccgtcccaatctaagtataaagcattttaaccagattgtaagcaaggataagcaaagctaaattatctgggtttctatagttgaattatgcctacataaaatgggatatttgaatagaagggttataaataaataatttgtaaagtataggcttaaaatgatcaagaggtggacaataacttgccttgcttgatgtactgagatggattgatattatctagtaagtcagaagaatcctcaagacctagggttaaatataaaattcaaattcaaaagaaattcaaatgaaatccaaaaatagggcaaaataacataaaatgagaatagcaaaaaaaaagctttagaaggtagagaatgattttagaagaattttggtctaagtttcattagaattgggtttatatttaaaagatatgggcttctaaagtttcgaattcaaattaaaccgggaaattactaaagagtactgtgcgtgggtcccactggccagtctctctctttcttctcttcttctaccgccagccgttccccaattgcgaccggcggcgctagggttgcggattgcggcggcaatagaggggaaaagtgggtacgggcggagaggggaggctgctagggttctccggcgatggtgagcggcagcggagggttcaatttcatctgtggacggcatagcggctagggtggcggcggtataatggtgtcgtgaaggtgatcttagatttggttgttagacacaataggacatgggtgctggaagcttcactagggttcatgggatgggttgatggctatgccgaccgtcggcaaggtgtggagggcatgcggccgtgagcgccatcatcgggggcgatcgagttcggccgatagccgtgtaggtgatgcaatggtgcaatgcgactggaaaaatggaacctaggtggtatgtagatgctagaaaacggaagaactcaccgagttggcttgaaatggcgagatgcggtcgagaaaactcctcggcggcaaaaacagggcatagagggacgacggagctcggtcggacgcgacgaggtgaaagtccacgcagggctccggctaagcttcggatttgtagaacatgactcaacgaatgtgtttggttgattggataggacggaggttgggcggagtggtggggaagtagtcgcgcacaaggtgctcaaccggcggacagtggtggttgatggggcaaatggagaggcagggctttgggggtagtgtggtaatggttgatgttagagcatcaccaacagattatctataattttctcctaaaaatttgcttttgggtttcctaaactgaaaataggaagtgaaaaaactcctctctccaacagataacctaaattcaatccccaaaacttaaaagtgggcccgtctgttaaactaccaagaaaaattccatcttttttttctttcacgcgcagaaagatcgctatctcccacgcgcgggaatgaaggagagagaggcgggattgcgtgattggaagcgactttcacgcccgcatataaacggagcgaggaaccggtggaagggaactccaaaacttaggtaggagagcaagggatctgttggagctgatttttggactaaaatccctcaaaattagttttgggaatcatataggtagactgttggtgatactcttaatcgatgatggatgagtgagggcttggggtcctatttatagggcttgggcgagcagatgagctcgagcgccatcaacgcaattgatgagctcggtgttcgggcatggcaggggtggcagagggctgagagagggaagggaagagcaaattgagtggcgggacatcatgttcaaacatttactgacgacagtggggtttaatcgggggcgaagacaagcggcggcgagctggcgtcctcccgggctcgacgcacggcggcggcgaggggtaaaacagtcggcttggcggcgttcggttcgagttgagagaaggaaaagtgactgtcgacttttaccccaaacgcgtggcagaatttggtcgttttatccccggtagaagcaaactcagtcttggcgtcagcatcgggtgggcacgcacggcggcaggcggtgttaagctgcggcggcggccgtcccggtttctcctccgacgagattagtgcagcggtatatggttgaggctcactggacggcggatggcatgcacggggcgccaaggcagcgcggctaggggtggccacggttgtgacaggacacgtgtcgcacaagagattaagtctttcgcaggagcgtaagacttcagtcttaccaaattttcttccggaaaattgatggggaggccacggttttagagggttgtggtccccaaggacctaacttagactttgccaaagtttaggtggaggttgggctgctgttgtcgggctgaccattttatcgaacacctagagtgtgatgaacagtaaattcagaaattttgaatattttgcctaaaaggaatagaaattatctaaggcctttggatgggttttgctaagtttttgcactatagcaatgtctcactagaattagggtaatctaaggaaattttctaagttttgaattttgaaagaaatttgctaaaaaaattagggtttttgggtaggatggtataaagttggttttaaaggaattctaaaggggtattacttgaaccaaagaccaaggttaaaaaggaacttttaaaaaaaactttgattaattcaagtaaaaaaccaacataatgcagttaaattttagattaaaatttgaggatgttacaatgatgcatacctgcttgatatcctggagaagagattgcaccttgccaccgccatttgcacctgcatctgtaactccaacagtgcttacctgaacataagagttagcaacaagccccatcgtacatctagttcgctatcatcaaacaaatccttgagatttgataataacatatttccagcagtgaactgtgattacaagcattcagtttatatttagaacgtttaggtttttaaggtgcaaaattactaactggccatcaggaatcttaattggtgaaagcagcaagctttctggatggaggatgagccacatcatccagaatagaagaaccgttggatggatctagtaaaagaaaatacaccgttgaatctatacatatgtaatatatgttggacctatcaagaccctcatttatgagaatagaaatccattggaccaatcaagaagcttctggacaaaaaagttgacactatgtttggttaattaatctctagattaaataaagaaaaaaaaataaggctcagctataaattcatactgaatttattaacctctatgattatcctccataagtgatttgtagcaaattagcattagatcacgttccatttctccatatgcaatgactcagcatctatgatgcactgatacttcactttcttgccgtaccggtatccgatacgtccgatactccgtcgatacatatgcttgggatgttttttgaattatagagaaaaacaaagaaaaaacaattgctaacaagttccctttaaaaacatgtcaaaacgtatgtttggaatgtttttgaattaaacgtatgtttataatgtttttgtaaaggacgtaactacagagctagtgctaaaccagataccaagaggcaccatccacctatactttaaatacaattttttcttcaattactcatccgatctacaatccgattacaccgttgtgttcgtaacaattaaatctttacaacaagatctcacatgattatattttgataaaaaatcacaaattacttttatgatatgtctaaattacttttagatttcactaagttacttcttagatatataaaactaaattcagtaaaacctaaaattaatttacatatattataatagtaacttagaacaaaacgaagataactttagcatgtcatttgaagtaaatccgttgtatagataaaaacacacacacacacacacacacacacacacacacatatatatatatatatatatatatatatatatatatatatatatatgtatatatactggatttttcacattttggtccttttgaaaaacttatttcgcaagtagacccctagaaaaacttatcccaaaaatggtcctttttggggcgccagcctctttggcgccgtccccctgccgacgtggcggggcgatgctgaggtggctagggggagtgcgccagagtggctggtgcccccccccccccgaatttttttatttttgttttatttgtttgatatttttttcacgcttagggacacacaagaaccaaccatagaaaaattgaactcaaatgaatgtaatatgtgacatgtagaatttttcctctcctctcctctctccgaacgagtgcagaggagagagatgtgcaacttttttatttttattttatttttttgatatttttttcacacttaggaactcacaggaaccaaccatgtaaaaaataaactcaaacggacgaaatatgtggcatatggaattttccaaagctccaccgaaaaacttctttcctcaaaaacacaatcttgcaagcggaatttggaggttttaatatcgccgaacccggcaaagcgggggagaatcggatgtaactttttctgtagatgtccgtgcatatattatttgcctgattccgagtccgtatgagaaagttatgcctattttaatagatgacatattttgtccatttcgatagagttttggaaaattctacatgtcacatattttgtccgtttgagtttattttttatacggttggttcctatgttctcctaagtgtgaaaaaaatatcaaaaaaataaaataaaaataaaaaaattgcatctctatgtactttttaacttatatatgtcatttcatgtggttatattttgaattagattaagtaatttcatatagtggtagagtgcattatgtttaacatgctgatcaaagggttttactaaaagagttatggtctaattttagtgaaagtgcaaagtagactaagtggtatgctagatattttcagacttagctaagtggtagttcgagtttaaatttttttttgtggttggttgtatcgtgatcctgagtgtgaaaaaacatccgaaaaaataaaataaaaatgacactgttgcaactccatacagagaaacaggaatggaggcggcggcgccagccatgctggcgccctccttcctggggcgg

SEQ ID NO: 9697 - DNA, 6762 bp, Oryza sativa
cattaatagaaatgaggtggtacaaagttttagaaagaggaaaagccaaatatgggaaagaaaaagaataagaggagcatagaaagaagaaagagccccggggggaggatttaaataatgttaaatatgtgatccgaattttgggcccacaatatattcggattatatagtttcctagtaggacttcatgtctatcctattaggtgtccttctattatctcctatatatactcttgtaaaccatatggaaaggggtgacgttcccattgtgattcccctacgtttgtaatcaactcctctatagtgattattgccggttgacgcccgtggttttttttcgcaagagttttccacgtaaaaattcgtgtctccgttgtgcatctattttcataacacacaattatatttacagatttaaggttctaactgcagcagctgacagataattacacacatgtttcaacttgagtagcgacagtttatttttcagcagcttgtaccagtctttccattttttccacaatgggaaattcattccaataagtaggaacatcaattgatcaattccattgatcaacaatgggagagataacgttgctgcaaaatgttgttgatcaatcacaagtatcctctgcagtcatgtcatgtaggaaaaacatcattgaaatggaagtgctagctgtgattctcttatgatggagcatgaacgagatcaaagacatcgcagttcacacgaaaataaaaaggattttaaaaaagtgaagcagtttaagctccagcatgttattctttagcttacaacctgggactagctttctgcttaaagtcaaggccttggatcatcggcttcatccttcttgtagcagctcacaccaaccggacgatcgactttactggagtttatcttgagaaagggtaggtaggtaatacattctaccatgagacacaaatcacacaattaataacccatcagttgcagatttggtaacgatcctgcaaggaagtcacaccacagagagagtcagcataaggatagtggttagcatttcattcgaaatcaatcatgtataatgatgttacaaaccatgatgactcatctggtcctgaatctgttactttaagcacagcagcctagcgactgcagattgatgggcctttggttctagcaaacaaaagataatagtaataaaaaatgttatgtattggttggataatatgtagaccacagcattccatagtcaagtttggcataagatgattagaaggaactacgtatactcaaactacatgcaatggagctatgagtttccagagaaatgttaatacaattcaagtaccgcgacagttagttctacaaatttaagctgctgtccatatcagacgcattaatatatatttttttatttattttagataatattataatttattatttattcgtagtaaagcacgtgcattcagcttgcataatagtaatggctacagtagatataactaaattcttttgtacccccaaatgcaattcaaaaatttgaagtgtttaggtcacaccactgcacaagtgagttatcgatgtgcattgtactctgtacatataatcgtattaatggttgactagagattctatacaccacactgcaaacttttagcaataaatcgcggtacatgcttaagccgagagttgccttttagggcacccaccaaattaaattgagctcctggctatctattatattatcaaaacagctatgaaaggaggcaccacgtttgctgtggatgctcgaaattcccatattaatcggagaaaaagaaaagaagagtcaatctaaaaataactgaaattcggaattaaaaatatgcaatattgatagatgagtccatataggaacccaatacgtgattaattaaaatttggaataataataaaataaattccaaaattagaaaaacaaaaaaagaagagttcgagtacgtaggtgacggagcgtggggctcctcaccgggagaccgcgcaggcccccctttgccggttcggccggggactcagggtgaaattctaagctctctgtatgtggaaggttcgcgaccgtcgaaagagcataagacacgggcgatgtatacaggttcgggccgctgagaagcgtaataccctactcctgtgttttgggggatctgtgtatgaaggagctacaaagtatgagccagcccctcccttgttctgggttccgaatctggaaaagtccagtcctcctctaagtgggcaaggtcctccttttatatcttaaggggataccacatgcaccatctccctctcttctgtggggacttactctaccttttcataaatggacggagatttgtatagttgccgtccgaatgaccttctgataggacggcccatacctacctccacttccgccggaagcaggtgcgacgtgggattatggctgtctgctgacgacatgaccagtgtcagactggtcacaaatcgctcattcttgtccaccacgtgtcagtttagcaatctacatgttggcccttcttcacacaacatcttgcctgtaatggttaggatgaagcctggcatatatctaaccaggactaacgtgccatctctgggaggtaacacgctagctccagctggggacaagcgcctagaagccctcgtcctgacgggatggggcgaggcgtgcgtcagatcgcctgtcgccacctaacccgcgatctgaccggtctgtgactggtcacaaaccggataaacgagtgcactgcactgcgttacatgcggcgtgacacgctcagccaaaccacaataaatgtggttaggtgagccccgctgtgctcacctaacccatacacgcggagcaaaaatccacgaggggtcggggcgcctcggccctcggggccgaggcgggtgcggcccgaccccctcggggggactaagaggagggcgaacacatcaccctcgggcccgacgtcccccgagggtgccaggccacgtgggcgattgtgtctgcctcaaacctctagtcatgatactcctgatcccatgtcaccgacagtaggaatacaatttataaataactaaaattcagaattaaaaataaaaattattgaaagaagagtgcatacaagaatccaatacgagataaattaaaaattggaataaaaaaataaaaaaatcgaaattagaaaaaaataagagttcaagtaggaatacaatttaaaattaacttaaattcggaattaaatataaaaaatattgaaataagagtacatgtaagaacccaatagtagattaattaaaattcagaataaaaaataaaataaaatccgaaattaggcaaattaaaaagatttgaaacaactgaaattgaaaataaaaaataaaaatatcaaaagaacataataataaataaaataaattctgaaattagaaagagaaaaaaagatttcaactaggaatacaatttataaataactaaaattggtgataaaaaaataagactattgaaagaaaagaccatctaaaacacatgacgagattaattaagtaacaggcctatggaggagcagagttgtggcggttgatgagacatctaaaaactattaataaaacagtaaatagaatcctaatgacgattaaaagaaaggatgatgggcagatcgtgaagcaatcggtcaaggcggttgtcggggacttctagaaagtaaaaacataaaccccaatgataatcatatttgatttttaaaatctcaattataataaaaatgagaggcagcgggtgggtcgtataggagtacaatggcagagtcgtcgatggttgttgcgtcttttagaaagtaaaaaatgaattccaacgatagttatgttcaatttttagaatcccaatgacaataaagattatgcggcggacgggtcgtagaggagtattttgacagcgtttgacatgatttctaaaaattataaaaaacatgaaacccaacaagacaataaactctaaaaactataaggtacaatttttaaaggttcgggcttctaaaaagtaaagaaaataaaccccaataataatcatgttagattttaaaatctcaatgataataaagaagggcggcagtgggcgagccgtagaggagtatagtgacaaagtcgctgacgttttggcggaacttctagaaagtaaaaaaaaacctaaataataattatattcgacttttaaaatagcaatgacaataaagagaagatgcaatggatggttgtagaggagtataatggcagctctgacgagacttctagaaattataaaaaaagcccaacaggacaaataaactctaaaaactataattttttaatccaatttttaaaggtttcaatgagaatgaatagaaacaatggtagatcgaaaaagctaataaaaaataatatgataaaagtaaggggtagcaactgatgtgacttttaaaaactacaaaattagaaacccgaggatgataatgtttggtctttcaaaatcttaagacggtgagataacttttaataaattttaagtaaaatcatattaaaaaaatatatgattttatacgggtgctagtcgcgcaattgcgcggaccacccagctagttcttattattaaaagaaatgaagaaagtggagattaccttcgtagcaggcatctagctctttctcctcgatgtcatccagacgttgctgcaggctcggtggaagcacctttataccagaacaataactaactgtaagagatgtaagagatgagtatgcttgaggccccttcggcaaggataccaggctctcgcaatcaaaaagggtgagttgttgcagcgacgggagctctcctaagcaagattccagtgatttcaagctctggcacgattctatatttaattcttgaacggcatccagctttcctgagagggactgaagttcttcgcagcaagaaatatccaatttcttgatggacggaggaagatggagaacctccaaacgatcacagttccatattactagagattctaggcgtggaagggtgcgattgttggtctcgctggtggagcctgatattaatgatgacttatccggctgtgcaaagctttctgcattcaccaacatcgtcctatcctgctgctgattgaatatgatggactccaggccacggcaccccctaatgtctaatagcttgagagacgcaggtaggttggggacttctacaaaagaaccacaacagcttatctgtagggactctaaacgtggcaggagttcacttggtgctggtgtagattgcccacgagcttgtgtgtgtcctgtcagattcttgcattgataaatactgtacctaacttcctcaaggaaaccaagccctggaacaccttttctggccagtagagaagcgcatcgactttccgaatattcagatctatgagctgaacaaaacatgtccagagagccagcgcacttgggtgagagaataaaaggttgcacccatttaagttcataagttcaaggggagatttatgattccatttctcatcctcaatcaccaattcactcgaatcttgttgcttggccaccgatgttgtttctgtgccatcagttgacaaatgcagatggagactggacaatgaagtagtatatctgctagctgcctgtagggatatttgttgattgccttcatgtatgtttaagacacttagttttggtgcttcaggtagagtagtcagctctgggcactcgttgattgttaatttgtcaagctgaggaaatgctacctcctcctttagagttccatcgactgcctcccatttctgaaagatatccaaatcatctaattccatttccttcaatgctggaaatgcagaacgacacacggtgctaactccgctagacgattctgaaatcacatttgacgcttttggtaaggcagttagcctagggcaactttcgataaacagcttttcaacctcaggaaatatcagctcttctccttttacctcatttgtgtcccaccatggctccttgaaatgttaaacacagcggtgatcactctgatccccaagaaagactcccctacactgctgaaagactataggcctataagcctcatacatagcttcgccaagttagcagcaaaggtcatggcacagaggctagccccaagaatgaatgaacttgtgccctacacacagaatgcattcataagaggtcgatctattcatgaaaacttcatctttgttaaagggctcgttcagcaataccacaggcaacacaaggaaatgattctactcaaactcgacatctccaaagcctttgacacagtgtcttggtgttttctattggatatgctgaagtggagaggtttcggtgccaagtggagattatggttggtatctctgttcctcacggctgaaaccagcatccttatcaacgggaatgaatcaaacccttttaagccggctaggggattgcggcagggagaccctttatcgccactgttattcgttctggcaatggatgcactgcaagcagttgtagctcaagcgaaagcaagtggactgatatctgaaccagcaccaagacgcccagttccaagtatatcaatatatgctgatgatgcagtattatttttcaaaccaagtcaacaagaagccaaggtagtcaaggcaattctacagatttttggtgcagccagtggattaatgaccaactacaataaaagtgcaatcactccaattcaatgcagtcaggaa

SEQ ID NO: 9698 - DNA, 5380 bp, Oryza sativa
tgcaaactaatgttagttcaggcaattactctgaattttctgatagacgaacctgattttttcatgtcaggtgccgtgcttgttcagattcagcaatttacatttccaaagaagaaaaaggaaattcatacattttttttacttttttgaaagtggcctggattttcatgatttggttaaaatttagcctttgtcgtaaggatttggatcctctatccagacacatgccttccaagataaacgaatccctcattatacaaaaaaaagcacaaaatgctcaacaagaagcttcaaattcgtgtaaatacatgtcatgtctcgctaccaaacaatatctcaacaatgacaacagattggaggtattcatctcacaatgatacatttcaacacaaatttatgtaggcctcgctgacaggacttggctggatggctgtcagttcagttcttgaaccaactgaagcatgagcagccctgcaaggaagcgataaactgaattaaaatagggatttgttacacaatacctgtaaagtggattacattaaaatattaccaaatcatactgtaagcaatcatgcagaacaagattccttgcaaacaacactaaccaaacttctagtaaaaccattatttttgctgtagtaccaactttttgcaaccactatatactccagtaaaaaccagaagtattgttgcaatgactttgccgataaattatagaatgcagctactcgaagcagtagattttagacaatttttactgcataataactacgcatggtgccatgatccctaaaaataaatagaggtataccaagctcaagtattgacaaactcaagtggcaattggcatatgaacaattttctcgttcaaatatatctgaagcaatgtgtaaaacaaaatagttttgctccacacatctgaccatattttttttgagtaagtagacttactgtggattcatatttgcgttgttgatagcgtttgatataatctgcctcgctggtcatgacgggagcgttgccggtaccagactgtttctcctccctcaccttctcaaatatgtcagtgaaaccttcacctgtagaaggatctttctcatcccattctccaaactttggcacggctgatcctctatcaggctgcaaacgcaattaattacttcatctaaaggtatttttatagtcaatgaatcaaagggcagtttacttaataccatgcatcataagttagagctttaccgtctcatcaccacggccagttgatctgaacttggaccttccaggtgtagtgggagcagatccacggtttccttccaatgaacccctacggtcacgtgaaggagacgaaactccacccttgtttgcagctcttgcctggtgacggggatgaacgggtgacttctctatgccggtttttctcacagcattgtcatagttggtatgatccccatatctatgattaggtgactcagcatatggttttcgaacagtggtttcgtgctgacgaagatcaccttctcggtttgagcgtctgtcatccttgggctttctcatggctggatcagatccagcgtgcaggggagaggccttagagagtgcttcagtatctccatgatgattgtttggattaacagacctccctggagatttacccttgcgggcattttcgaaatactgtgtgtagaggtgttcaccacggtcttcatcctcccagcttccaaatttaggaactcctttatgctggtaaagtttaacaaagaactatcatattattgaaatgcgctaagaaaaataaagaagcacatatactccgaaaaaagagctgatgaaaaaaaaaagtctagagcagacagcatgctgattgctgaatctactacatgagcttgttgccttgtcagttgtcatcatgttttctttcatatgtaacaggaattataattctagcctaaataggcatgattatctaaactctcagatattatctattgtaatcatgtatgcatgacatcagctttgtccgatcaaccagaatttactcagatcctgctatctatactgcttgaaagaacttgaatgtaactacttgtgcatcttttctgcaggaacactactaaggatgcattaaaaggacaggtctcaaacgagcaagtaaacaagctgtatcaattatcacattcacgaagctgagatcttttctctgcacgagattcctgcattaatatattactcagcaaatcagccctgcaagcatgccatgtcgacattcttgtaacattgaatccgcagcataaattgcatccttgaatgcagaaaggctggatcttggcagattggataactacataattgagcagaaaaggacatggcaacaatttcggtttcagattggcacattttcttgggaaattaaaaagatcccaaggaaaatagccccagaaggaggcaacaagaaaatgattccacaagatgcaacctgtctcctcaccagtaaacaaaaatactgcaatttaaggaacccctaacattgggcaccgagaagaaagaaatgacaaagcaagcatttctgcaaatcagaggcaaccccgagaaatcccacatggcaggagaagcgcccaagacgattcgagcaaacccaaccgatccaagcacgatgcaacccaggaaacacaaacaggccagtcaatcgagcaagaacttacggccatttcggcagggaagctccaagaacagcagcaaaggtgggtccttcacgcctcaggacgctgctccttgctctaatcctctccctcctggattccgaccaagaaaattgttgcgttcaattcaacaaggtcagtaaaagaagaagaacaagtgacccccaatacgagagcagcagcagtagcagcaggaagagactaggaagagcaggaggaattgaaaggaagaagaaaaggtaggaggaggaagaagatgaggaggagtcacgtttgaccattatggcgtcggattcttgctgcttcctcgcttgcttccccttcctttccggctgctgatgatgctgaatgcggtgggtgatgtggtggtggtggtcactgccccggccccttcctgcacgggcctgtacctatcgccttaactccagtttcaccatcatcgtggtggttaaccacacgccaattatccattaccaccacacacacacgctttgccctgcaatgctaaactgtaaacagtaactcagctttaagaattaagcagcttagcttaactgctcctgttgctgacgctgtcaatgctagtgtggcttgaaggctgaagtgctgaactgcactgcacagcggcaggtcatcgaacattctttccttggttgactcaggagtaaaatctccttcgtaataagggcatatgcatatctccttcaaagattttttttataaatatttgcagctacgtatagtagtataaaagcaagtttaatagtatagacaactactggctcctaatcatctatagttaatttaatagctaatttatacaatagttatccataaatatatactacacaattcatatttggtcccacatgtcatacacacatacatatttagtctgtgttacagctggctacaaatctgtaaaccgctgatcttctctatcttcttttatcttctcgaaatgtgtttatagctggtttacagtttgctattatctaagctctaatggtaggatgattatcatactgttgcagcaacgacttcttcctttggtgttgctgttgcgtggaattctcatggtatcatcgtctttcgccctagcacggagctttggtttgccctgaccggtctaacttggagtctactgtggtccaaactccagaccgtgatgattatgaaaagctcttatcataatttctcttttggaaaaggacttttctttttctttatgaggcatgcattattcctgtatatttttatttcagtagtatctaaaaaataagacaggcatcatttggatttcttcgggttccgaataaattcatgtaaattctctacatttcaaccggagaatgattcggtttagatgggatttaatgctagaaaggaccatatttgtgagcctaaaaggtagaaaaacaacatttactcgagctaacatgggggcaactttatctgatatctatcctagtcattgagagctaaaagtatgaaaaatataattatctctgaacaacctctttttttctctcttttcctagtcattgtctacagcctttttccaaactaatgttgtataagaaaaatactatacgtacgactaaacttgtgtgactttggaacgaccttaacgccgtgagctcgtgacgttaatctccgtataaccaagccatgttgtcaccatactcagtcacgtattgagttgttttaccgtttgatcgtacgctggtcggacatacaagtcatacgtatagcattgttcgttgtataatttgattacagactacagtcatatgagatgatagaacactgggtgtactgtaccttatttcaggattgcactgtatccctttgtcatcctccctcttctctttaggctcttctgtactttcaatttttcgtcacatcaaatctttcatacacataatttttcaatcacatggttttaatttcaaacaaactttcagaattaagtgtgaactaaacacacagtcttgtttgtttcgagtacaattactgtacatcgacagacctgcatcttcatccgatctacgtgtcgcagaacacaaactgacgacaacgatgggattttttttttttaaaaaaaaagttcaaattgtgaaaccatgtgtggttatagttcttttgtgatgggaaattgacaagtaccggatgtgcaagaagtgtgtgtgtggactaacgttggtcaggttgcgacatctgtgccaagacaacggttgtttggttcatgtgtgtgcaggtgatcggggtcgatcttggtcaacggcggatcgggactagactcaaggaggagttgaggtccaaagcgatcaaggatgccgggtgacaagattggacacaaggttgcacacggtggacgaacaccgtgtgaggaggtctttgcaacaggcttcacaaggtcaagtgtgcaagcatcggattcgcgaagaaatcagaagggactgtgcaagtgcattgctgctacagtacttgctgtaggtagcatacatgcatgtacacgtactgtacttgtgcaaggaggagcttgcactgtactggttgctactagcatggctcggtggaaaagtcaagctagctagctgtgcatgtgcgctgtgattggttggcagggaggccaagccaatccagccgttccacgtggcccaagatggtgaatggctcgg

SEQ ID NO: 9699 - DNA, 13022 bp, Oryza sativa
tcccagagggcggtaggcgactatttccgtcaattttcaaaatggaaaattatttttgtaaaacttttaataaaaaaaattataaataaaaaaaattcgttgataccgtgtagtacttgaattatatacacgtcattgttcatgctagtacttcatacccaaaacatgttgctactaacatacccaacacactggagtacttgaaatactagtatagtggtagcagaaaacgaatggtacagtacctggtcaacaaatgatttttgcacgcaaacaaatcaccaagaacgccatactattatgtgctcgctgtccggccaagtggaatggacagtaggcaatggcttcttttgggacttctttatggagcccaaacaaccatgttttcaatgccactgaaagctctgctctgctctgctcatctcatcccgtactcttgttgactatgacaacttgacaagccaattcccttccttaattacccctgtaaacgaaaatcaacatgattaattagccagcttatcatcagtcacgtttattactcacactgtcacagcaaaggcatgtgagtgacttttattagtgcagtagcagcagtaaagggaatgcacatgaattgcagttggtttgcacgccaacgaaggtgagagagagcagtcacacggcctaacacaagtacgaggacaacagtgcttggtcatgcgttacacttcgattcgatgccgagtacttataccaagcaaggccatacatgtgagtggtgctgcgtgttgactgcggtcatcaataagtttggtgtgtccctcccctctgcacggagtttttggccaattctagttcctggttatcttggataaaacatgcatcatttgattatggacagatattttatggtctagtactgccttacgtagaaccagcggttataccggtggcgtttgaaagatgccacttatgtcttctctgaatggatgattttttagatatttcgggagaaactgaactaaatcatgtgaaaaaaaaattctgcaaatttgctgcattatataaaggagcatgagtccaacctatttagtaattaggattgcgatttcgaacttttagggtatggtacatcaaaatatctagaaaatagtagtgtttggttccttttcataatttaatcttaaccatctatatgtcatatgcatttataatacactataaatttacttactgtagttattgatttattgctataaatcttaatgtgcattttaaccgtataacgcggaaagcaataaccattggatcctcacattcccaatacataaccattcctatgtgatgtgcaattgcaattccacatcaactatttttttagataatgtattttttattaatctggcctctatatctataaaggatatacacgtccaaaattccacatcaactattaaggagctcaaaataatgccttttaggcattacgagtatacggattacaaattattctcttcgaattttatttgaagtatttgtaaattccccactgcaacgtgaggggtatccactagtttgatctaataccttctccatacgtttgatgtccgtggcttgctatacttatatttactgtatattttgtgtttcctccgttacgtgtacttgcaatgcccacattactcggcgatttacgattttatacgtaatttttgttgaacattttataaataatagacatatcaccactttgtattatgtttttacatagattattctatgtttctttctaaaaacacctccttaccgtgtatgcattgatcaaatgtgtgaagtaaatttcaaccaaaatggtattaaacatatcgattctcagtgttatagtcctttttttttataaagcaactaaatagacccacaagcaacaatagttcaaatataagaaaggaaaaaaaaacatattgctttatctcggaggacatttcgatcataattccaacaatattcagacgtgtgtatccaacacacgtgtatgcgcgttatggtactaactgtggacaacaacactctacacgagacaatatgtaacattaggcgacaacaaaaacgacggtggaactgtggctgccaattccactagtccaattagggagcactgttgcgaaaaaaaaacttggtagccagtcagaaatgccaaaaaaaaaagaggaaatcgtttagggtaggagtcttatttattgatgataagtgtggtgtacgtgcatatatacatccaacaaatactaaaaagaacctattactcaaatggaggaggaagcaagctaaagtaaaaatgatccctacaagcatgagcctaataataataccataacggaagaacaataatccacgcgaccacgcaggcaaagaaacgaaaagaaaagaaaaccccaacaaaaaaacaattaaaaaaaaggagtaatagccggaaataagacgaccatgtgttgttgggcgcggtgaggggcccaacccagaaataagcgaggcggacctgggctatatatacccctacccagtctcctctttccggtttcctcttcccttcccccttcctcctcctcctccccctcctccggtgcggtgcggtggagtccccttcctcctcgcgctcctcctcctcctcaaccctactccttctcctcctcctccgaatccaaacctgacacacagaggcggcagcgagaaggtggaggagaaatttgaacggaaaaggttgggggatcgcatcgcaacgaacccagcactgcagcccccccgattccgattgggtggggggtcggatcctcggatccccccgcgccgccgataattcggccccgcccccgcccagatccccgcgattccggcgccggcgccggggatgagagccccgaggacatggtcgccgtggcacgagtgaggcggccccggttgctgcgccaccaggaggaggggaggaggaccgcccgcgcccgcgcccgcggcggcggcggaggaggtgtctgcggtggtggtggtggtggtgacctgaggcggaggagggaggaggtggtgggtgatccggggcccgaggcggccgtgccatgtctcgctgcttcccgtttccgcccccaggatatgagaagaccgcccgccccgacggccagctagcctcgcacctgctcgaaaaggtggaaaccccaaacaatctcacactccccccatgccacccccgtctccgtcctcctcgctccattgatcgctactagtacacatgcatccggggatatcttaacctgacttatgctgttgcagttgcctgtagaatttcagaaccaagccgtaggtcacgttctggtggggagaggggaggggggataagctagccctagatgattagggctgatgtcttaggaattttcagctgctgggctactagggttagatcacagccttgtcggctcgcgggaggcgttatcgctgctcacggggatctcacgagacatccatggaatttagatttgctagaccaatgctttcctaaaagtgtccttgatggcttgagctggataaattaggtctttgactaagcggttaaaggtaggcgtcttcttttggatggatcgacggaagataatgtagtaacgtatagtgtttattcattggtcgcaacttacgtcatgcttatctcaactatattagataggctagtggattgtagcatatttatcttgccactttgctagctgaaacctactcgagtcttcatgaaaaccacgacgtgttgttttgcaccattctgatggctgcgaagatggtgtggtagaaaaaacttcgttggttattttgtttgttagaggttacattcaattttcaattatgtcatggacatgttgatagaagattggacagtcaattactacactccttttatggtcttgacatgcatctttgtggaagttacaaagctagcatgatgcatgttatgctaactttgtctatgttaaaataaagttgtacgttactgaccttagtaattgtctgaccagaatcactatggtggaatgtgtcttttattaattgtcagtctcaatagtggttgttctaaatcaattttagctttcccttctaggctgtagaccatatatgtattccagcatttgtttctatataatgctgatttcaatcctctctcttcttcttttctatataatgctgatttcaatcctctctcttcttctttccatgcctgattatgtattacaacatttcctcactaagtcattattactttaggtaggcggaacttgtgcttctgttatgttgccttcatggttgtgcatatacatgattctaacagatttaactgccttttccctttggtatacctgtcctcagtctgtctttgtctatgtgctgttcctgtggttgcatagatcctcaaatctgtcaatctgcttcgtgcatatttcattctgcttcaatttttttttattacagctaacatgttgttcacttctgttcatgcttctgtttattgtccatattttgagtaagtagaaaatgcatttaacatgaaagttcaaaggggctaagctgaagtggcaacacaaatgcactaaaaatgaaaagatttggactttaagcttatgtctcacaaaagcaaatgccatgtttgtgtgttttttcttttattcttctggctgttggctgtgaaatatgcctgtagtgtctatgcattccatccgtatgataattgctaacattatggatgattttgtatctatgcaagcttacaaagttctgttacattctggcatcagggaactatgtcacacttgagttttactcttaaacaacttttagtggtgtcaaacaagtgaaaacaatggctatgatacagtttatataacatgaatacatgatatgcaacacttagtaaaaatatgctcttatttagtgattcccccactttgttttgtcacccggactcacgcttttgttaatataaaggtgttttctccgctaactatttgtaggctagtagtttaatttcaaaacaaaggtaactcatggttgttgcatatcttttgatctgtaacttgataataattggtacaattctccaaagcaaaatacagtgtgtagcttcatatacagaatcaggcgcacaattagtcttggatattgcagaaacaattagtttgcatttcaataggataaatttgttaccaaaaaatcctgcatttttttgtctcgtttgtttaaaaggcagtagctagccaatcttgcttataattattcaatatttatgtagtactatttcactggttcaaaaataccatttccgatacaacttgataaggatagtacagcggaagccatttatgatgctacttattggcttgtagtgttaatgatttacatctcagtgactgcagcatcggtaacttgttgttcagtagtatgtctttaggcagttccccaggacagtctctcttgtacgtaaaagtcttattatgttaccttggtcatcctgtgaggttaatgattatcagctcagagaaattttcttttgaaaatcatttcaatatgttcattcatgaatggtattgttgacatacatcttcgcgttttttagttatttgttttattctcaaactctacttaactgaaaaaccctccttgtttcaggagaaacacaaggagaagaagcataagaaggacaagaaggacaaagaaagaaaagaaggcaaagacaagaaggataaagaaaggagcaaagacaagcacagagataaaaaggatcggaaagaaaaacacaaagacaagaaaaaggacaagagcaaagataaaagcagggaattagaagaaggaactgaaagacacagcgaggctctccatgggcaaaaagttggagagagcagcaggaagtctgaagaaattaaggatcctaaatccagggaggacttggtcacgaggacacaaaatgagaaagggacgacgaatcaatctgttcagaacttttctgtttcaaatcaacgaggtcgtgaaggctttagtgctgcacctgcactggagaatgaaagaactgcagctaataaaatgcatagtcactctattaatgcttcaaggaaaactgaggtcttgggacagaagagcatcagcatcaaccaacaaaaaaatgggacagcaattcgacgtggagacaacatcaccagttcatctcaaagaacttctgatgtcttcattgcagcacctacagcagaaaaagaaagagttaaagttgcaaggcctctctctaactctactgattctgcaccaaagaaagatgggatgggacagcgaatcaataacattagcatactggttcagaagagaactgatagtccaaacaaagagactgcgaagaaagaagctggcaccaattctccactgcttccaagccctgctaataccatgcataagggaaatggtaaggttggtcggccaatggagattccaacacagaggtttgacagtccatcgacttctagtgcaacagcagggacagatagaggaatgcctaggtcatctatcccaagcccaagtattacaatacgaaggccaaatgggcttgtacgaccacctgagagcatttccatttcttctaagaaacctgatgcaggaggtgcttcccctgctatggggaaggaaaaggaacagggtggaaggatattgcagaataatattatcgatccaaaacagattaattcaaaacctccaactatggagaaaattacagatggaagaactgaaaggatggagaaggtcagagatggggcacctgatgttgcaaaggaggataagaagagtgatcgacacgagaaaaagaaaaggaaagagaaagataaacacaaagagaagaaaagggataaagaggcaaagaaggagaaagacgaacaaaataataacaaagagcatgataagctaagagaaaacagtataaattatcaggtagataatagtcttcacatgaagtcctcaacccctcctttagccccaccagctgatgatgcaaaagctgcccaagctgatgaaaacctgaagaagcgaaagaaccacgagatgaatggctacttgcaaagtgagttcattctttttctgttttttctgcacttatcagtattgtatagtgttgtagaacaccattatatttttctatggtacattatattataagacttctgatgatgtacagaccatcatgatacaatgcggcctacaaagttgccaagaccagcccactccaacactcctgtggagaatggtacagcatctcatgtagccgcgccactctcttctgtgaagccggaggccataaatattgaaaaggctataaggcaacacaagaaggaagagaagatcaatggcaaccaggaaggtcaacgatcttcagttgagccacggcttcatgatcctctagttgcatccgagaatggtgcacctactaagaagttgccacacccagacagcaagtatctcagtcagatatacagcattcctgaagcacctcaaatgatggaatggcatgggcacgatgaccaggactggctgtttgaccatgatggcacacaaccaaagaaaaccgagtcagagactgaggccgatggagcttcccaagtgtgggctcagcctctgaagattgaccaggcagatgtcattgcgttaccatacgtcattccctattaatacaatgcagcccaaactgctgggtgctgagtgaggatcctgtggagtaactgagcatttgaacgccaaactgcaacttgtttctaggtgctgcatttgctacaactagtgtagctcggcacaaatgggtgattcatccatttgcgggtagcacttcctatatcctcatgcaccctgctagattggtgcatgagattcatcactttgtgagagttggcgtagcagctgaagaatatcctgagtgaatgctgcgtgggaagacattgtccaattcattgtcagaacacgccgattatgtaaggggttgatatatcctgctgttaccgctgcacaattttgatctgtaaggtgtaaaagcatttttataaccaaaatgtacattagaaagaggaggatggggagagggaggaggaagactggaggattcatttatacttgagatggttccacatgctgttggctgagagtctgcttctgctttgatttatcccaaagtttggctctctacctttgacgtgccttttgtacatagctgttagttttacaatagatgatgtggtgtccgaggttgtaacttgcttcttgcgcggatttcatgttgagagtcatgccatctcctgtcacatacattttgaggtacctaccatctgaagaggatggatgactgttaatttcagttgactttaccagtttaacttctatcccaaattgctttgtatggtttataagagtagcttgctggcaactgtttgcatggacatgtcgtttttctaatggatttttttcgctctgctgtgctgctgttgcctttattccagtattgtttaccaagcttatgtctccattaaactttacatccaacatctgttccttgccaaattttaaattatcagtacccttccactttgcatttcgtgttctgctaaaggatcatggctattaagtgcatataatgcccatagacattaaatatactgcaaaggaatacctagcttatgctaatttttttaagaagaaatggtgaagtgtccatcaagacaagtatggtaccgggcacgctctctgcatacagatacggctcactaaactcgcctaatggtgcacctaatgtttatcatcagtttgtcattagtcaagtcaatcatcgagcgaacaatctaacaggcagtcaggcaatggcaaaattagacggcacggctaataagaggagagagccccacaaagcggtaagtgcagtgcatgacagcatgagcatgacaagactgtatatgtccagtattgcatacgcagcactggagaagtggtctggaaaatggaggctatccgtgagtaagaacataagaaccaatttggttatttcgtaagtagcaacagcttgtttcgaaatcttcagctcctccaaacaaaatgcatattctcacctacccaaattagttatagaaacaaaaagaaaattaattaaagtcaaaagctgagaaacctaacttaacttttctagctgtttctcgaaatctcaagctcctcatataataccaaaaaaaaataaatttaggattattttagttggttaccgaataaaaattcaaatcttgtattttgatttagatttctgcccaacaaaaactgcctgttaccggatttcccaggacggtaattattgacaaaccggtatttgaaactgtatcagcagcagggcagaggcagaggcaggtgcacttggaaaggcgatagtgaggcgtgtacttggaaaggctgactctgcctatgcaattgcacaaacacacatcacacagtgcaatggcaatgcaactgcaaggcagccaaaaagggaggaggaaacagaggagaagtgatggtggtggccgactggccgtgcgagcgtgcattgtctaacgtgcatctatctatccccaccacaaccaccgctttggtggtgagaatgagaggcattctgctcctgggatgggagtgacattctctgcttccagtcgttgctgctgacgactgcaatgccatagcagcaatgatgcttctcttctcttctcctgtctctcatctcatgtactactactaagatcaatcatattcagacgattcctacgcataagctgctacttccaaatcattatcgccatcagccttgtgttcatctgtactagtgtgccaacacttgtgctaatgtaaatcaatgctttcttggggccactagtaatggatcaattgctactagtagtcattaattcattatgcaccatgacaaattgacaaattgatcatcactagcactgtgattcttccaagtggaacctgacagctcaacacgactacacaataggtaaacaggaaaaaagagagaaaataacaagagatgatcccttaaccaaaatcatttttttaattatgctatgaaatacaaagaagaaaaatctcattctcctaactgattagattttggaaggcatgtagaccgagcaaacaagaagaaggaaaggaccaagaaagaggcatatgctcgtgattccacagccagcgacctgattccttccctttccttccttccagcatgcagtagtacggacgcatgcaggcaggcaaccaccaatctgtatctgtaatcagcatgctccatgcttgcttgtttcggttgcagaaaacaggaggattgtcttgttcgtttgcaagcatggcaaaggccagcaacaaccaatccccccggccatatatgcatgacggactgtagatttgttcatatctacatgcatgatctgattatcctatcattatctgcctctgattttaattatgcagagttgttttcacagggatggcactccatttcttgcttataccgagttctgaattcttttttttgttacacggaaaacacatacgcacgtacaacattacacacgtataacgtatagcgcgctcacacctattattacagtcccccaacatgcgctcaaagagacaaagaccaacgtcaattccttggcctcattaaaatcctattgaaaaggcacccatgtatagcacctgaatttttctattgaccacatgcatgatgcatttgtacaactgttcatcagcagaaaggtgctacggttagtatggacctccagttgactactactactacaactgtacagtgaaggactgaactgatctgatcaccagctatactggtatcaatgtaggtacaggtagtatgcatatgtatgtaggagtgagcaacttagcattccgtatcagtgtagggttggatcgacgtgttcactgcaacaaccataccagcaacaaccttcctccatcttgcactgcactatcacactacctcttttagtcatctcctcttttcaattcgcttgccttttcttttcttagtgctccagaatcgcttgcaccccactccagagatcgatgtcgatctcctcctcttctcctgctgctgctaattctctccaagaactgaactgcacctggttggttgttggctatagctccaattctgcagctgcagatcaactgatgcaacaattcagcatcagcatgtctgaactctcaactctgaagaggccttgcattctggacccatttctgcatggcaagcttggtcttgaaggcaagacaaggattcatgtggccgtttgtttattgtgacaaatgttctgcttctgccaatgcgtgcgtacaagtatttctcctttataatgtctgtctgcttcggcagcatgtgaacaatccctttcttgttttccaaatgggattaaagaagaaccaggtggttgggttggagcagattcagagacttgctaaccttatgcaaatcaatttaaattatactacttgaagttgattcatattgaagattacgaagttgactctggaggagatccagtccagggtagatggataaatcaatccatcacttttaccctttatacctgctagattttgctatggactgtactgtcggctggctgtggtaaggttcattcttgtcaaccttgctacctgcttcaccctgaacattttcctgacctatcaagtaaaaaaaaaacagagaggaaaaaaagacgcaattattagggaatgatctaatatcaaataattagaaggggtgaggcttcgaacccagtcgtctagcccaccaccttgtggagctagctggaaaacccccggatatttctccagagagaatatgtttatctagataaaaagatgctaatactatcttaacatggatgtcacaagtgtcaggtgcacttaaggtttgaatttttttttcaagtgctagcatgagacatccaagagagaatttatgtaactttcaagtgttaggaatgttgtacaccatgaaagagaggaagatacactgttgatcatcatcatgcaccagcactagcaaagcagcaatgacaaaattaacaaatccaaaggcaatcaaagagtacatgatacatgtacaatcccctctagtaggtcctaaacaaagataatctggatcacaaatctcaaactgaggataccataccatactctaccacgtacagatctctgtctgtctctactttctctctgtccttctctctcaccaaacctcaactttccccttctttcaggcctccccctctatataagctgccaatcatgcatccttggcaacaaagccaaaaacccaagaaaggagacactgatcattcttgccatatattctaccatatatacatacatatacacacaatttctgtatatatttcttgctaaccattgttgctgctagttgcttcttcttcttctcctctaccttgtcatcgtccgtagtagaagtaatcaagaattcaagattctcattggctgctgctgccatgaaggaacgccgcggcagcgccggcgtcttccccttctccatcggctgcatgtcgcagtccgccgtcgacgtcgccgacccgcacgacaagaagtcgacgacgacgacgcagaacgacccttcctcctcctccgcctccgccgccgccatggccgccgccgcacagagtgagttcttgatcaccgagtagtactgaagatgataacatcaatcttttcaacgacatcattagagtacgtagtgctaacctgcaattgatcaaaaggcgcgagaagaaggcggcggcgagaaggtgaaaggcgccacggcggcggcggcggcggcggtggcgtcctctggcatcgtggccaccggcgtgcagcggctgatcaaggggatcaagagcctgtcccagattttcgccatgtacgacgacgaggaggaagacgaagaggagagg

SEQ ID NO: 9700 - DNA, 21369 bp, Oryza sativa
gatatatatatatatatatatatatatatatatatatatatatatatatatatatatatatatatatatatatatatagagagagagagagagagagagagacacacacacggtcacgctacgtgacgcgagtcacaggcgatgcacgccagctaagccgtagcgccactcagagcgagagcccgcattcccagcgtacagacccgccacctcatccccatcctgcaggtgcaaacagagtaaaaaaattaccgtggggcaaatcagttacagtggttggtttatgagagaaacacgtgattatcgaccaccctgctcccctcccccgcaacagacaactgagtaaaaaaattactcattacaaaatttgtcttggagcgggcgtaattgaagttaaaaaattactcataggggttgactactgtggtacgtttcaatgaaatatacacgtgacaggcgatccttccagcgaaaaaatcttcttgccgtcggtgaaatttttactaatgggtatttttgttcggtatatgatagtaaatttttaactaatcaatatttcttctataaacgtaatatccagagcaatttattaactcagggattcttgtgctgctcagtttgcgagtaaaattttaactcatattgacatagatgaatattgggcgtccatttttcgatccaacggtagtttctacgtttgcattacatataaggtttgcactacatattttttccctataatacttattagggttagtaatgtttttacttctatatattttaaacatcactctcagtatgttcatagtaatatacttactcaatctgtccgtaaaaaagtgagtgaaaatttttaagccatcaacatactagtatcattatccttttatggggcatattttgacacatacagtcaatattagattatggagtattacgtttaatcatatgcatatcaatcgtacaaaaaatcacccgtgcgtaacaaactacagaaccaacaaagagaaaaaaaggaaacggaacccccgtccacgggaggatagaaacagcagagatacggatgacccgagaagcacgccgtacgtggtggtgctgcatgcgctaggctccctccagatccagcgcagcaaccagcgtctacatcggcctcttgccctatacgcatcgacgctggcctggaagctaatcgccgggcctgaagaccgtcgccgccgcacaaggtggaaagcaaccttcccctccattccagcttgaacgttgtttcagggccaccactgccactggccgcctactcgtgtgctccctgaaccgtgctccctgaaccgaccatgaggcacgccatggacgacgtagccggccgccgccaccctcacgggctccgaagaatgaccaccggcgccggccttcagatcgggcaccttcaagagggaggcagcccgacgccaccaatcgccctctcctacctggatgcatgacgacaccacccctcaccgatggatctcctcgccaccactcggggctcggcctccacgccatcgccccaacgagcagaccggtcacccgtcgccgctctatccccaatttctcagatccgaaaaaaatgaaagaggacgggagtatgaatgggggtttggatacggtgagatggttatggatgatataaatagaattattggcgtgagtaaaaaaattactattgtttgggctggagcgttgacagggtgggttgggggtggctcttggtggtgcgcgagtttattggagtgggggtaggggtacaggggtgggattgagattgatcgtcgatgagttaaattttaactatatatagaactactaagaagttggataacatcaagttaaaaatttactcgaactacgagagtgaggggagggggcgcaggggtgggataagactgatcgtcggtaagttaaattttaactgtgtactacggacctggtgggagcgtggatgggtggggctggaggctgtttcaggtgctgtttaatatgtagcaccttagggtgttgtatagtagttatatatatatatatatataaaagttgttcaatgaaaaaaagcattaattaaagttactttctttttttataacttacttctataatatatgtaaattacttttaggctttactgaatttacttttatatgtctaagaagtaacttagtgaaatctaaaagtaatttgtgatttttcatcaaaatataatcatgtgagatcttgttgtaaagatttaattattacgaatacaacggtgaaatcggatgaataatttaagagaaaattttatttaaagcatagatgatagtaatatttcccttacttgctcaatggattaatagcaaccaaaactcctaaagtactagcgcatgggtgtctctagttaaagactagatttacggttttgtaaacgtatgcttgggatgttttttgaattattataaaaaacgtatgtttggaatgtttttttgaattatagagaaaaacaaagaaaaaacaagaaaaattgtctaagcccaggttcgaactgggacctctaattaggaaacctataaaggctggcgggctggggcgacgctggggtgtgccacgttggattttaccgtgacgaagttaccgtgcacgcggtgaaattttgtaaaaaagccctccagtttgtgcgtaattcaatcgaggtcccccacgaaaagttcatttgaagagtcagttcacggataggcccttaaaaaagtcggatattgcatgcgaaagagagaaaattcacgaattaggaccgcgctctaaaacgtggaagcccaggggttttttcgaaaaacgacgccctaacccactcacccctaaccctagcctataggtgtccaaacgggcggcacggcccggctcggcacgggcacgggtccggcacggcccgtttcggcacggcccgttaggcacggctgatgaaacgggccgtgccgtgccggcccacatgccgagccgccggcccaagcacggcccgtggatggccgggccgtgcccgtgccggcacggcacgcctgcggcccacgggccgttcggggcacggcggcccgtgaaggcaggccggcaggcggcagctgagctgcactggccgccaggccgccagccgccaggccgccagtgcacagtgtttttttttaaaaaaagcaaaggaaatgtataaggaaaaaaaattaaaaatggaaataaaatgtttaaaaaaaagtaatgatttactaatgttaaaaaatgaaaaaatggtatttaaaaaatggaaataaaagtttttaaaaaagtaatgatttgctaatgttaaaaaaaagaaaaaatggtatttttttgttgtgttgaaaaatttaaaaatatagattgtgattcattattttgaaataatttaaagataaatccacacttgcgaaaatattgcaaaagaatttgttaaaaatagtaatgacttttattgatgtttatatcattacaggatacaatgatacatgctgcctcgttaaaaactttgtcatgtaaaaactcataggggaaaatgagaaaaccatgacaaagaaaagagtacaactcaaaggtcagaactacttctaacaaaattctactggggttggtctggatctaggtagagttgctcgaactgggcggccaattcttggttgtccgcagtgtattgggcatgttgtcgagcaagctcccagtctttaacgcttagtagcatttcgacgtggtcgctgcgcagagtcgtcctccggtcttcgatgattcggccgcatagactgaaggccgattcggaggacaccgtcgacacgggcaccgtcaacacatcccgtgctagttttgaaagcacaggatatgttatcttgtggtcattccaccacccgaggacgttgaaatcttgtgcttcgtggtggatggcgtcgctgtccaaataaccggacaactcttcggccacaacatgcgaagaggcgtctccacttgtagccgacgaactgccaccaccttggattgaagacgatccaccccaaatcctaccccactgtatcttcttcttacctgtagtggggataggagggggtctctgctggcgaacttcctgaaactttacttcatatcttccaaaaacctcatataatttacgtctaacctcagtataaaaagaactataatctacacctatagtatctccaacaagtgataaaatagcagacaatccccttaatttacacctaggatctaaaacaaaagcaaaagcatacaacataggtatatttttccaatatttcaaatatttttgtttcatgtgaaagacaggttcagttagaacgtcatcattttcgtattctttaaataaagtagcaatttcaagaaggttgtgcaaaattatattagcagttggataataaacttgtgacaaagttagagtacaatcataaaaagtttctagaaattggtgaaatttttggacaattgcccaaacatgctcgttcagtactgaagacccgtcactgtttcttgggccaccacgtgactgaacaaaatcagaaagtaaactactataaggtaaaacaacttttaacattaaatacgttgcattccaccgatgctctgcatcggtggcaaacttacgagctttcacaccggccgcattgcaaaacctcttccatgcagcaatccgcgggttagaagcagttaaccacgcgattgcttgacgaacagcatcgatgtggtcacctaccctcttcatgccagtcttaacaatcaaattaattatatgacatgcacaacgctgatggagtagaaaagattgagcatacacacaaaataaaggttgcaatatttcaatagccctagaattagcagatgcattatctagggtgacagcaaatattttatcagcaagattaaattcattaattactccctaattctttcagctatgttttctcctgtatgtgagacatctattaacctaagccctaaaactctcttttgtaattgccaatcatcatcaacaaaatgaacaactacgctaagataatcctctctagctctactactccatatatctgaagtaacactaacagagaaagtacatgtactaaacagttccttaagtgcagttgcttccttgtgataaacattctctaaatctctagttgatgtttgcctactcacagctttaaacctagggttatgagattgctgaatgtaatgttcaaaagcaggggactccccaaagttcaggggtaaatcttgcctggcgattaaccggacaagagattcccgagcaaccatgggatcgtactcccaactgcgtaccgtaccgtctgggtttaccataagttgctgctgccggagttgtattccttgcttcttggcacacgactccgcatggcgcttgaggtgacctgtaccaccagaagaacgagcagataaaatttgcctacatattctacaacgggctttcgatacctcccttccgtcggggcatgtttcctttatctcgtcgaagttttgccacacaccggaggttctcaatctcttcgagccggtgtgtgtcgaaacacttccgctcgcggttccggaaaatccttccgaagctgtcgccgcctgaaccggtacctcctcaacgacagccgtatgaaccggtacctcctccacagatggtggagttggagccgatccggaggtatcgtcaaacctcgacatgtagttggggtcgaaatcacccaaggtgaacgacggcgactggtatggaaagttcggatccattctgaaaatttaaaccgacataaacaaattttcgaatatttattgaattcacaaacacaatacaaataatacacaaatttgaatattacttacatctttccaaccgcgagctcttcaaacctctgcgatcaaactgttgaactacgaaactaattttgatttttgacaaaatttgagcaaattttgtcaaaataaaaaaaaaatgcacacttgagaacaaagagagcacttaaaacacttgagagcacaagatgaggagtgtgggatgaggagaaatggctggggttcatgccctatttatagggcgaaatttgagattttttggaattttttcgaaatttttatgaattttttagcctcccaacggttattttcaaatttgaacggtcaaatagccgttagtgccacgtggcgccttcccattcgaccgccgcccgccctgtccctgctttcggcctggcgcgtgcgccgctggcccgctttcggcctgacgggccgccggcgaaacgggccgtgccgtgccgcgggccgtgccgtgccgtgccgctacagtagccgtgccgtgccgtgccggcccgcgggctcggccagcggcccaagcacggcacggctactcgtgccgtgccggcacggcccgttactgtagcaggccgtgccgggccgtgcctgctacaggttcggccgtgccccgggccgcccgtttggcccggcccgtttggccacctctaccctagccgctgctcacgctctttcctctctctcgtcttttcctctccctctccagctcccgctgccgccggctcgtgccgcctccgcctccccctcgtgccgccctcgacgacgcccgtggccctcctcgacgaccatagtaaaaaaacccgtaccggtggtcgacccggtgatctcgttggttcactggttcaccggtcggaccactgggtcagccggttcaatgctgaaccgaaggcatatgactattatatgttttctattagacaggatgagttagctagctaaatggtaagcatgataaggtctcgacgcacaggttatgggttcaaatcccttcccacgcatgttttctctcctattttgcataaaatgtaaatgggccgtggggtaggatgatgggccttacaagtccagccccaagtgttagcccaacttgcaatgaaccacctgttcttatgagcccggttcaccggttttcaacaaaaaccggccagttcacccggttcttaccgggtcaaatgcacgagcggtctttttattgaaccgaccggtgagagacctggttccggtttttgccggttcaaccgccgggcccgtccgcttttttacactatgggttccacctggttcacacgcgcgggggcggcggacggagggagggacggcgccgctcgggagagggagcgggagcgcgtgcgtcgccggtggccgagccgagccgagctgcgtcgcggtggtgctctccgcgggcggcgagattcagccctgacccgaggaaggtgaggggaattcttcctcgggggtgggtttggtgcattccgtggtgtgagatgcgggggatgaacaaggctttcggggtttgggatgtcgcggggatttgggggcggtgggtggttttcggctgggaatttgcggatttcgtggctgctagtggtgttcccgtggctttacgaacagatgtatatgcttgatctcgtgcggctttcccttctatccctctctccatggtttgctcgcgttggggggtttcgaaaaattttccctactgttagtcctcgattctggtcgtcggcatggtggcggtcgcctccgcctccccgctcaccgccgcggcggcgccctccatgtgctgctcgccgcccgccttcctccctctccgtgcgcaccgcaggaggattttccgcgcggaggcgatgaagacgcagcaggagaagaagcagaccgaggtggccgtcgaggagtccttccccttcagggagacggctcctcctgatgagccgctggtcaccgccgaggagagctgggtggttaagctcgaacagtctgtgaacattttcctcacggtgatttccacgagtcaaatcggattaacatcaaatttgaggcagattttgttcaaattcagattttcattgctgtaaccacacacatattcctgttctattcgcaggagtcagtcatcacgatacttgatggattgtaccgtgaccgcaactacgctagatttttcgtcttggagacgattgctagggtgccgtattttggtgaggatctcgtcgtacatgctcgctatagcctgcaggtctctgaatttcacaatatacaagtatggttcctacacagtaatgtttcggttactgtttcactgactgcctgactattgaacagcgtttatctctatgcttcacatgtatgaaacatttggctggtggaggagagctgattatataaaggtgcactttgctgagagctggaatgagttccatcacctcttaatcatggaagtacgtctctagctctttctgtctgcacatcagtgcatttatatatgctgtttcttcctgttttgatgtccttttagattatgttagctgttagcatatcccgttttctttaactgaatataatctttaaaggaattcaacctactgcttattgacacattatctgtttttttttaatattttggttatggtctttgatgttctgactttattcctcatcttggttcatattaggaattgggtggcaactctttatgagttgatcgttttcttgcatggtttgctgcatttttttactacttcatgactgttgcgatgtcacgagccccggcgtaagaacgtatgggatatgaatgtgtgattggcggtggacgagggggtttggtggaacgacgacccgtgatgaacagcaagggatgagcaaatagagaataggagatgagagaactagagattgaatctgcttaattaaacgccaccgaaactgtgcctctaaataggcgtacacgaattaaccaatgtgctaaaaacaagctaacaaactgataaacagactaacaatctgaactcatccaatcgccgcactgtagtcatccggcacgcagcttccgcgcgctactccgccgttccgcccggcgacgcttgcggaaccacacgccctctgcgacgatacgtaatcccgaccatgacatgcgatgtacatggtgagcccaagaatggcatgtaagtgtgcacctatgccaattatgaagtaaaacacttcatttttatttccatgccttttatgtaatgataacgcttggaattgtttatcttatatacataccgcttttctgaatgtgttgagaggcatgcgtactcaacctatgacaagtttattaagctccatgaaggtaataaaacgttgatggatttgacatctctcctgtcgtgcaaaattttatcatgacaactagacatctcaaaatttttgttgctttatctaggttggacagactttgtaaaccaaagtggaaatgaggggaccgggaaaactaagtatttactttttttatagggataagtttatgcctaccttttgtcacagattgcccttgtgtgaataatttgatacatgcgccagtgaacttatgttatatcagctatttacttcaattattggcaatcaggattcaggcatggtgtttattttagttttataggtatcgtgtgcataaattcaaaaacatgtattattcttccatttttgattaagatgtcggctctggtatccttttatgatgtactatatttagattttttttccgtcctacatagtggttacttgaattgtgggagagttgaaacatacctgaaaaaattagcaaagctagatcccctaaggtctgaacaccaaactggtagactctttgcattactatccattcagaagttgatgcattgtacattttaaagggtgcattttaataaaccaaaatgttgaacactgcaaccaataacaccatgtctacccgacctgtccaccaactagaaatttacaggaacatcacactctgtcaattatatttacgtatttcttggcaaaataacatcctgatctgacctttgactgcagaaatgtagctgatgccatgcctgcatgccacccatgagtggcatacctaatatcaatatcaaggaatgacttcctgtagtgctcttcttccttgagagcacacgcaataagctatcaaagagtatacagcttttccaagaaaacgaaaggtagagattttttttatcaaatatatcaacacatgacctatttgttgacttgaaaaggaggattggttatacttcaggtttcttggtccttgaagtgggaattggatatgcaaactgacagctccttttctgtttgtggtgcagggaacgacagagaattgccactctctaacccaagaaatatcacaggtatctgaagcaaatcactctctaacgttactgtttttttattctgttctaattttatctggctaggaagtgggaactatcgggcgctggaatattgctgcttctttgaagctccttttttttctgtcacaaaaactatttcgtcgaagtaaatggatggttaattcgaaatgtgcccatcttgacgaaaggagcctagcactaccaccacatggccatggtaggctgagtccagaatagagattagattccccaatccatgacatgcaattcgcaaaggtgatactcagattgtgtactgtcaagagaatggtttcctgactttaccatccacaacagagtcacactaatgtaatatttttatgtaccattatactacaacatttttattttccatcaagtttttattcctcatgttcttcacatcctctgtgcttctctggtgatttacatggtattacttcatgaatttacagacatttattttctccatgttttttccccatgtatctatattcacactgctgaactttgcattctattttgcagttgcaagatcttggcagcacacttattgagttgtggaacctaatggacacaccaactgctgaacagaaatgctttgaccatgttacgtctttgatttcagtctcaccaaatacaaaaatgccccaaggatgccttgcacgtgaacttattgagaagtttacaattgatcgaccattttatgttcttttgctttatttggattgtcattgaagctaacttaatttttctgtaaaatccggttgaggttaagaggttgaattcttctgatcattgtcaatacaactatagcgattcattgagggtaagagctcacataacttttatgtgctttactaatctttttcgttataccttccatatttgattactatgcagtagtaattatttttctgatcattgtcaacacgactacaaatatattttatagtagaacctctcatgaattacactgaaaaacaaaggccgaatcatcgcctgcacaattgatctttaataaattgaacctgcccacactacctgtatgtgccacagttctatatagaaatttcgtgattagctacgttatgtaatacctacaccaaccatcctataatactatcactataatttcattgtaccaatatctactattaacaccactattcgcttttatcaccggcaccttccacacataaaaatacttatagacaaattttcatacaggtggacattcaacgaattatgtttctgcgcaaaaaatgtacaagccacacctgatctaaaaaattacatcaatgttattaagcgtttcctacagcattcgagcaaattctatgctgagactgttaacaggacattccttatgcagaatagagttgtaagttcgtacacctcctgttcattccttcaaatttataatacatactgctcgttttttctgcgcaccacagaaaactaacataacatcccagttgcagtactttgctaaagaattttcagaggtacatcgaaccactgatgcacaacagaaaaacaatcaacatttaggtccaagtagcaggaggcatttcaaccgagatgattctgaacatgtcaccagacgggcgctgcaacttggtgaaaggatgggcagatttcgcaacaaataagaacatatctcggatcagtctgcatcttccacttctataaaacaacttacttggaagctactatcgatgttctctaaccaacataagaatgctcttagtcatgctggaggcatccttttgttaccagtaaacacggacatcaccatggacatgcaccgctctccgcccctgccactattactatactaattagttctgcgccttatgtgcttatcacatagtttatgctcttctgcagatgtcaggctccatctatatatatctacttattactattagaggccagtacaatgcctgtatcaacactcctgtgctaactggtagatacttttgatgcacctgtttacaagtgtttatatactactctatgaaatgaacttatgcaccgcaagtggttaaattctgaccatgtttcgtcagatctgtttacattgtttctttaccttcacttgctccagctgcttacgtacagaaatcaccactgtttcctgcttcgtttctttgttggccgttcaggcggcgcgcaaaggcgcgccccaggctctagtacctctaatacgtgagactagtgtggtaaccgactacaccacccaaacttgccgatttagacttggcaaagaatttacatatacattttttctactcgtttcttaagtttagtaagggtatctactcatctgccatggcatgttgtttctgcttcttaagctcctgacctaacttaattcgcagagagcaattcagggaaaacatctatgaaacaattcatggcacgtttaatttagattattaccatgaactgtctactagattataaggctacattaaatattttaagaaaaaaaattaacaacaaaaataaaacaaatgatttaagcaaatacaacagaaactttttttaaaatttttttaaagcatgtaacaaataatatgtttcaataaatccaacaataagttgaaagacgggacctaaactatcattccacctatggagtagaggaattatattgaaatttatcagggttatggataccacatacctaatagtagttgactgaatctcggcaggactcatcacataccatgtcttatacagaaacaaccttcagatataggaggagtttcgcacaaggaaggatgaataaagttctacatggaaacgacaaggactactcggattgtatccatattggtttccctagttctacttggacaaggggacacctataggtataaatataaggccccctaggaggagatgggatacggaacaatagatcaagacacaagatcaacataccagccaacacgccgccaaatatcaacatcagagattagcttagacaaaccctatccggtacctgcgggggccggcaagaggggtcaagcactatctctgatctcaacgagttcgtgctcgaggaagaagactaccctgtcgtcgactacgagttgggttatctagccgtcaagtcgacgacagccagatatgttatcccacatattgtatttgtgtgatccaaatgaataaagagcaacaccggcttcagccaacaggatgtagggttattacttgacaatttaggggctcgaacctgtgtaaaaatcctcgtctccgtctcttttacctaagtctcgcgtatatcctagtactaacgatccccatactatgcaaatactagaatcgcgacatcaaacgtcgacagaatttgttcagaagaaaaaaacttaaaaatataagggataaaactactactaagtgcatatttagaaatacaatacttcctccgtttcacaatataagtcattctagtatttcctacattcatattgatattaatgaatctagatatagatcaatataaaagcgaaaaatgctaaaatgacttacattgtgaaacagagaaagtactacttattttcatgaacatgaggagcaagcaacagttgcttatttgttgggccattaagtacgtgataaatgggaaagagatggttgcctgtaaaaggagataatgttctgatttactcctagaacattgtgagtatgtgacataaaaacctagtctacacgaccatccaagcctccaaggtatgtgaattcttaagcattttgaatagttccgtaggatttcataaggtcaatttttttttcaatagttgtattgcaaaactgttctttttctgattatggagtttgaagcttatctgcacacttcacaagctcctaaatgatagtttaaacaaaactccaaaatgataattttttgttaaaaattctatattctaaatcaagctttcaactttatattagttaattcattattttatacttttaaatagctattacacaaccatattatctatcaatccatcagtttcagctatcttaaatagatgcttcaacttatgcaaatgtgtattacatctgactaaaaaccgttcaactgcgctcctatttactgctccctatgttcatattccttttgacttttactctattcaaacttctttagattttactaagtttataaaaaaataataatatctatagcaatatattagttttattaaatattatattgaatatattttgataatatgtttgtcttgtaaaaaaatattactatatttttttataaactgaatcaaaataaaaaacgtttggctagaaaaaaaagttaaaacaatttataatatggaagaagtattattccatacaatagtactattataaaaataaaaccccatgcttattcgatttatttttctatggtcgtgctaataaatatttatagattcatacaaagaaacatttttagatggttaaccagcagtgttgataataaacacaaaacagcagcgtgcaggaagccaggaagaggaaaaccgacggcgacgggacgcaccgggccaaaattttcaaacttgttactagtactgttctcttcccttctctccacttcgcaatggaaaaaaaaaaaccgggaaaaaataaaaatgtttgggcgtaccacggtggttgtacctagcagcaacgcgggagcacgacgccgttaacgcgctcgcccgcgcgaaatgacgctactaccctcgttgctcttatccactcgcgcctcgtaccaccacaaccctcccggtttccctcgtaaatccggaaaccgagcggaggtaggatggtcaattcaccgcgccgtccgacttccccaccgtggcgttggatataatcttctcgtatcgtctcgtccctcttccgttttttcccccaatttctcgtctccccccttcctccaatatatcggcggcgatcccggctcgaggagaggaggctccgccgcgattttttcggtgtcgcatcgaaattatggtgagttggtttcctccctccccctaattcccgatccgcaattcgattgcgatctccattgcttgggttctgccttttttgggggaatattttgggcgatatcggcgaatatatgctgggctctcgcgcgattcctttttgattatggtggttggtgttcggtgcgttttggttgaggaattttggctctaattcggtgccattaggtgggtttgtgtttaatttggggatgtttctgaattgtttccgtgcgtttcagattggggaatgctgtgtttcgccgagattttctcatcttccatatgtgatatcagattataattgtatgtgtttttgtttcgctgcaaattaattatattgatgcgaagtttctctgcatttgattgcagattttcgatgcattttaggctaaaagtgctcgggtctgaaacctacgtgcttttcttgtcgccgaagatggtgtcagcaaatatacatcgacgcacatgaacagcgatgatgcgttgctgaatccgtctgaagctgcaataagcatgacggttttgcaaattatgatactaaaccattcatgctgctacgccctcgtctggaactttcttcttctgatgcaaccgtgcacaagcaaacctagcctcgaagcgattgtgatgagttttagaggtggtgcgggttcgatcacgtggagttctattggtgttcagtgactcttggcaaaagttctcttgtaaaatcgacgacgatggaaaggtcagcagtaattatctcgcgaatcatattatttgttgcgtgcgcactaatttctgacatggcatctaatttcttctcaggtacaaagtgataagggagataggcgatggcacctgtgggaatgtttttagggcttataacactgaaacaaatgaaattgtaagtgcagctcttggcatagtacatatggttacttggatcttttcatgttaattcagttgccttctgctccttatatctactaacctataaaggaacgaacagtattatttgttgcacctaatcacctatgaatttcccacttgagggaaatgctagcaataatcatcttctacatcaccccagatggctacctattcgagcttgcaccttgtttgttggcttattatgttaacatttccccgaatactgtgcaggttgcagttaaaaaaatgaagaggaagtttttccaatgggaagagtgcattagtctgcgagaggtgaaggtaatatatctcatgtgttatcaaatgaatacaaatttgttttcaaatctgtgtgcttaaaaggagaaccatccttctgcaggcacttcaaaaactgaatcatcccaacattgtgaagttaaaggaggtgactatggaaaatcacgagttgttcttcatttttgaaaacatggttggtctcaagtcattcttggcatacttttttactactttctttatgagcaggaaaaaaaagaggaaaggctaaactattactagcccatatcgctatgatcttctagagttttgtggccagttccattaaaaatactggcatgaatattctatcgtctacaaattacgtgtatatcttgcggttctaatgattatagttctatagtttgtatgcctgttgcatttgttgtgacattacattacgtgtatatctgctgaatcttttggttcacacttctctcacctggagctgttaaatatttagcttttcacttactctggtatcattgtttcttttcacaggaatgcaatttgtatgatgtcataagagaaaggcaagctgctttctcagaagaggagatacggaactttatggtgcagatactgcaaggtcttgcatatatgcataacaacggttatttccatcgtgacctgaaacctggtatacctttcgactatattctgttgaagttataggctgtctatataccctagaagttaattagccttctctctttcctctttagaaaatctgttggtgacagatggcactgttaaaattgctgactttgggttggcaagagaagtatcttccagtcctccttatactgactatgtttccaccagatggtgagtttgtgtttcaaatttatctctgtataaccagtgaatatgtatacaccactttatccaaattattgtgaaatggtgaaggtatcgagctccagaggtgctgctacaatcgtcagcttacacacctgctattggtgatgcctattatcccagcccctgcattttactacttccatttttattaatgccagctcaacatgaaatttgagtttgtgcatataaaactcgcattgcatgaaactactgaattatataactgatagatgtgcacttcctcagatatgtgggctgttggtgcaattttggctgagcttttcacactgtctccacttttccctggtggaaggtatgtatgatactgttgtttgggtaccatgattatgttgcctctgtagttggtaatatccataatttactgtattcatgtattgatgcatatatgctgtctgcttacgcatgttttgatttgagcagtcaacagatcacccttttgatttctgttgaagtgaactcttgtttcttcttttggtgattagttgtgttctttttattttgtggatagttggcctgggaattttggggatttcatgccactatctctgagttgcatttattaattccaaggctgtaaaattattgttgttctgaatactgtaacaacaatattttttccctcatgttagtatttttagctcttatgatgcctatgttgttttcttatacgattaagcctatacttctccatactttttcttaagcccagttcatcttgcacagagtagacctagaccatttgtacttatatttccttgtttatggtgattctgctttgcttttaattattttatttgcttacagcgagactgatcagctatacaaaatatgtgctgtgcttgggacaccggatcatactgtctggccagagggaatgaacctgcctcgttcaagcagctttaattttttccaggtgaaattacttctgtctacaaccattaggataagttgcctttgacactgatttccttttcttttgcttgttcaaaagatcccaccaagaaatctatgggagcttattcctaatgctactttggaagctatcgacttgattcaggttagttatgacacatgagtcttgtttcttacatgtttgatttatatattgttatatgaaccccatgtttttttgtccagttgcttatgtaagtactaacatcaagttaattaatataacatcttacttatatattatattgttttaagtaatttaccatgacaattcacaataaattgcactaattactagtttgtaaatagtgtaaggtatgggtttgtaacatgttgatgatatagcttttgttgcttgatgttatttgtctgagaataatgctctatattaacatggtagtatttgtcattctgacagcaactttgttcctgggatccacgaagaaggccaactgctgagcaatcactacagcatccgttctttaatgtactaatttacacattgagttattcatgggaactatacttcgcttttctttatgtacctaagacttttgagttgtctaggtgggcaactgggtaccaaggccactccatgcctctcacacaaagacaattgaaactagtgagtttctcccctttttctttcaggaaatgataatttatgtattctgttttggtgatttgttgttgtttctcctattgaactccttttatttttgtaggaccgaatccaaggttggaactgaacctgtgggattttggtacagaacctgaggacaactaccttgatttaactctgagtctaaagccaagttttcctggaacaggtgcctaacataatttttcctttgaaattccttccggttattatcttttgttttattggcttatatttccttttctgcttgtagatttttctaacaatgttccagagcatacaaaagaggtgagattttatttgcatgacgtgggaacatatatttgcatgagagtggaatgggtgttatcctgaagttcgctatcatatcatgcaggaaattctgctgtacccaggatttgaaaatcctcctgtgcagtcaggtccgttctttgtctctctgccctcctccatttttgacttatagttcaggactgtatttgcttgcttttttgcgccaacagccagatggttatagatttaattgagatgcgtggtgctcaaacatggcttcctttttacattatttagcagggttttggcctctcgttgcatcagaccggccaatgggcgatgttccagccatgtcatcctggccacaggcatatgtggttgacgggtaagcatcagcatgtcctttacgaatgagttaatctcccaaagccagacttttatatccgctaagtgctatcattattctgtacttcagccaagccacacttccagctgttggattctctggttctccattcggtttgtcccccttacaaccaaatctgtttgagaaccgttcgttcgcaacacccatccggcaggtcaatttcttctgaggggatacaattaacagattgagcactgaaactatttttcagtccatacattcaacttgttcctttatacattgaactcaaataaacgggggcggcagatgaaatgtatataatcgtagcttgtttcctttttcttttctccccatctaaattcccctcacggagtaccctataatgtcagattctatatttatctagattgtgaatatgtgactttccaaaacagttttgtacgtcgatttgtcaaatgataacagcaagtatggatgagcgataactgacgatttgtgaagctgtttttgtatgagatgattcctgtgcacagagctggtgtgtgtgtcttgtgctatgaaacttgaaggcgtgtgatatgacctactgttttgattttgctgtcgtggtctagtacctgccatatcctgaactgaattcatgtttgtgaaggctcgcattgatgcggccaacgacaagttatgggcttcctgggcgctggatgaatctgacatggatgtaagggtgtagttcacgccaaaattgaaatgttgattgaaattggaacgatgtgatggaaaagttcaaagtttgtgtgtgtgggaaagtttgatgtgatgaaaaagttggaagtttgaagaaaaaattgggaactaaaccaggcctaacttgttggagcgatggcttgtgtaccgctttgttttgtgggtgtcagctcaatctttgtgcctaggcctagctgccactgtgcaaggaggcatcaaaccaccactctaatctgagagttaactgcacactaaacaggttttagccacgcagaaagcgagaggcagcaagaacatcgcagtcacatggccaagcaggaggcatttgcttgctggcagctggatagatgctgtgcaagtgtagaacgcgcaaacaaaatgagctgcactggtctgcaatggaaagctgtttttgagctggccttgccttgcctgaatgaatgatgcctgagcctgatcatcaaagttgacattggaagttgcctgtcatatcgtaaagttaagttattaatactacagtactacccttcttcatgtcactcgatagtcgatagtgccagtaggagagtatctcgagagtgaagagcactgaccacacgagtaaagaatacaccttccattttccaaagataaaggtatagttgataccggaattttttttatttataattttttttattaaaagttttacaaaaataattttccattttgaaaattaacggaaatagtcgcctaccgccctctgggagggcgatttttaaaaatcgccctcccagagggcggcgaaaatgacgtggcagacggccgttcgctctccggcgacggccgtcaacgaaatttgcaggcggcccccttgccgccctccgcgagggcgattttgtactgtgcggggggccgcctgcaaatggg

SEQ ID NO: 9701 - DNA, 2010 bp, Oryza sativa
gctaacttgtacagctaatcaagatctacaacttttattttggtcacttcttcatccgacaaagtgatagtacgaatgtttacaaaattgacatatctgtgttgatatttataaaccaatgagagaaatgtgatttttgcgaataatataactatcactctatcggatgaagaagtaaccaaaataaaagttgtagatcttgatgagaggataaactttgttgttgaccatatttccatttgaaatcatttagtatttacaaatgttgattatatttgtcatattgtcaaaatcaatttcaagctgttgaaacaaagttatatagataaatgaccaaaataaaagttgtagatcttgatgagaggatcaactttgttgttgaccatatttccatttaaaatcatttagtaattacaaatgttgattatatttgtcatattgtcaaaatcaatttcaagctgttggaaacaaagttatatagacaaatgaccaaaataaaagttgtagatcttgataacctctacaattttgttgttgaccatatttcgatttgaaatcatttactatccgaaaatatgttatgactaataaaatgaattattatacaacagctatatatcttgtactcacaaatataaagacttgcctggaaaatggaaaaatagtcatcggtgatgggccttagttcaagcccgatagagattaatctatctctatcgggcattatcttagggcccgtcacagatgagtcatccgtgacgggcctaaatgcaatctcaatcgggcattagtatggagcccgtcaccgatgagtaatctgtgacgggccctacggcaaagcccgattgagatagattaatctctatcggctgtaaactaaggcccgtcactgatgactcattttccatcttttatttgttgtgagtgcaaaatatatagcctatataatttttattttggtcattattctgtataatttttttcccaacagcttgaaattgatttcgacaatatgacaaatctaattaacagcatttgtaaatactaaatgatttcaaattgaaatatggtcaacaacaaagttgatcctctcatcacgatctacaacttttattttggtcatgtgtaataaaacaaaattagccatattaatgactacacatatcaagtctatgcaataaaacaaaatactttattcattacaatagataagtacaaatgcatcagccacaaggttatgccttcggtatgatctgaacgagcatatgccacaggctcttggggatcatcgtcaaggtcaatgtgaggtcttatatgaagattatggttgttttcttcttcatcgacgacgttgtcaactcctacaattcggcgctttccatccctcacgatgtgcatcttcttgtttgaagggtcttttatgtagaatatctgctcgacctgtttcgcaagtacaaatggttcataggcgtatcccaccttagatagatctactaaagtgaaaccttccttgtcggctttgacaccagtgcgtagattcacccaacggcagcggaacaaaggaaccttgaacttgacgtagtttagctcccagatctcctcaatgtggccgtagtatgtgtttgacccaacttgatcctggaatgcatctatacggatgccgctgttttgcactgtgcttttgtcatcttgtttgacggtgtaaaatgtgtatccatttatatcgtatccttgccatgtgtctatggtccaagacggtcccatccccaacaactgtactgtctcatttgggacaaccatggacattgtcacacgattcttgaaccattcgttgaaccgagaattatgttctctgttaatccatgcatcagatcgccccaagttctcatctcggattttcgctaagtgttcctcaaagtatgggccaacttctgccatatgttggagcatagcgtaatgagcctgcgcgtacgacgcttgatcgggcctaattcttttccttccgattgt

SEQ ID NO: 9702 - DNA, 999 bp, Oryza sativa
acgacgtgattttcgttgcaatacataggggttattgctaccgaagtctaatttagttacgataggggggcatattgccactaattgcgtagtgttgcgattgtaattttttttgttgcaataagtaggaagtatcgcaacgaataaatctgcgttgtaattagggtgacaatattgccacgctttttgttatcgttgcaatagttatccatgtcgcaacaaatttagagcgttgttataagattcatgtatatagcaacgcgaaactactttgttgcaaatgagtctataggtattgcaacgcaaacctaaatcgttgcgaattagtctataggtattgcaacgcaaacatgaatcgttgcaatcattctttgatattgcaacaatgttgatatttcttacgatccagatagaatccgcaagcgcacggatataccgatgtagcacttcccctacggagtattccaagggtatcaaatccaaaggaacgtgtgtgattatctcttcctccggttcatccaaggaaacaaagctaatgtgggcagaggacagagagaatttcctaatgagaaatattgtctagggaaagcttaactttaatcctaatgcaatacttcaggcactggcaacccgctgctcctagatgtcgctctactatgtacccggactgggaggacttaagtgatctcgagggctgtcaccacctctacacctacctcaacgtactgtggaatatgcagcaattactggataataattacctaaataccacatctaagtaattaatatctactttagtgtttataactcaccaaagcaatcactatattttagttgattataatgaacaataatctcgtatgctatttaggaactaaccaagagataattctcacaagataaatctaaattactcaggaagaatattacattgaattcagagtaataaacagaataaaaaaataggagaagattactgacaactctaggattcttccg

SEQ ID NO: 9703 - DNA, 11215 bp, Oryza sativa
ccaatggaggcgcttgtcggcggatatactccgcaccttgccgaaggtcggcaagctgcccaaacccttctaggtacctcatagatgctctagaacccctccccgagccatgtctgactcacatcaccccgatcaccttcacggcttaactatgccatcgccgccctagccgctagctcaaccacataccaaattaacccctccgccgccgcttgccgtcgccggagaaccctagctccctcccctcctcggccgcaacccctttccccctctagcgccgccgtaatcccaaaccctagcgccgccagccacatttggggaacggctggaggttgaagaagagaagagagagagagagagattgataggtgggacccgcacaccgtgccatttcacatttaattgattttcaaactttagaagcacatatcttttaaaatatagatctaattccagtaaaacttggaccaatattcttctaaaatcattctctatcttttgagaccccttttgttatttttctattttattttattttccctatctttcttatttttgaattttatttgaattccttttgaatttgaattttatatgtctaaccctaggtcttgaggattcttctaacacactagataacagcaatcaatttcaggacatcgagcaaggcaagttaccatataccttttgatcatttaagcctatattttacaaattatttatttatagccttctattcaatattctattttatatgcacaattcaaccatagaaacccagataatttagccttgcttacttcgcttataatctggttaaaatatcttatacttagattgggacagtacgttagaattggatgatttccgggtggctagtaccgtctcgatcgatatagttattaccaggtacttatgtcgaacgaacgggtacgaccgctgtttctagaatggggacaaacctagatattatgttaattagcaatatggcacctccgtatagtggttcttatttttaagccctcgcgcaggaggcatttatagccgtgaagagcaacttttaaccattaccaggtacaggtaaatggtttgtgatactcgtgtataaactatatggtatatttctaaaccctgatcgagatgacgtggtgtcatacggtcagttccccttaaatacctcgagaacgccagaactcctcttgctgctgttaacaatacgttcagagcatatgaggatataagttcatggaacaggtgccacagttgttaataacttgatactgggccatgactaaagccgatgattatcagcaagtcgtggactacgggtaaagcgtacatctgctgcagtagaatatctttgaaactattcgaatagccgtactcatggagttgagtattgggactcatatggtacactggttagaaatttaaagtctatatatttataaattcttgctataactcttccagattgattattactttttttttgcaaagaaccctacaatatgccagtgcataacatatttccatgataacttgctgagtattgtgaatactcatccttgctctcataacccctttttcagatatgggtcaagaggaggacccctatgactattactatgatgaccccgataatttagaaaatccctaaaggttatacctccctagttagaatgtatagaaacttccgctatgtattaattctagttgatcaattaggtgagtacctaattgtaaaactcttagtattgtaaaactttaacatatgcaatgaagaaccagttatattgtatgtatcaatatttactgatccatggattgatacattaatcatagtcggatccaagtaattaattttgggacccgacacgatgtcactgcaaacaaagaaaatgtggaccctactataggaaaatctaaagtttccaaagttacaaagagtatgcttactgaaaatgttgggaaagggacagcagcgaaatacatttcctctaaacaactactatctggtgctctaacgtgagcaagcaacaggaaacaactggtaagaaagttaatttttgcattgccatttcacaatccagcccaacctattgctatcatgcagttcaaaccatgtttgtattcagcaggaaactcaaactcgggcggcacattaagactcaaagattggtagacatgggaacaaagaatagaggggttatggaacaatatagggtttatggacattttattgttgaatggatgaatggacaagttacaatgtatcgtcatatttatgtactcgttatttcaatgggctgtaagactaatgatagtttgctacctcaaaaatttcaatatatatgttgcagtaaccaaataaatcattgttatgacatatttcgcttcgttgctatatcctaccgtatgcgacgactcctaattcgttgcgatatggttctatccaatcgttgcgatatggttcaatcctatagcgacgggtttactttgttgcgatatagttgtagcctatagcgacgggatgcatgttgatgccataacctagaagcatatagccacaatccatacttagttgcgatatccttcgagcgtatagccaccggttacatgttgaacttagttgcgatatccttcgagcgtacagccacgggttacatgttgttacgatacacgtttggtgtatggcaacgactctaacttcgttgcgatatccttcaagcgaatagcgacgatttactttgttgtgatatcctttaattgtatagcgacgagtcctacgtcgatgtgatatcctttaagcatattgcaacaccgtacgtgttattgccacttgcaaatatcgttgcaatatacaggattgcaacgaaactgaaacgttgtgataattcttgtttgcaactatctaacgttgttgcgataacaactattgcaatgtcaactcgaacgctaaatatcgttgcttcttcaatctttccccatgcttcgtctcgttgcaacagcccgattttatggcaacgcgtgagcactcgttgcgataccctatcgcatcagaggtacttgcaacgcatgccaatgaaattttttcgttgtgatttctctgtattgcaacgaaaacacccatatcgcaacgatttggcgccgtggtgctaggccgatttccttgtagtgtgtgctcttgctctttctgcagtcatgaagagaagaatcacgggtttgttcaagaagggatcaagctcatgttcaagtcatcaccaagataagtcgagtacacactcttccaccgatgtctccatggaggaggtggacacctcgccaaggcttctcgatgactccaacctcgacctcataggagaccgggagatgcagggctatcacatgctcaaggatcggccatttgctgacaccccagcatacgacctagaacttcttcagaaaataggtacggatgttgattttcgtattgtttggaaggctataggatgggagaaatttgctgtggtagatgagccaggttctcgcttacttacctagaaattttttatgtaccttgctactttgctagaagtagatgatggcatttctttttggtttttctgtaaggagttctatctctcttttaaagaattgagtctgcttttaggttttgacaaaacttgcaaaattaatttttggaaggcagcttccaactctgagaaaaacaagttatgtagaaggcctagatggcatccataatcctactcttagactcatgtataaatggcttggcatgactttatttcctagagctaatcttagacccattcgtgaagataagttgattatcttatttgacatggttagaaagataaaagtttctcttatgtaatacatgattcgccaatggttagaaaatttcaagttttccggtcctattgagtgcacttctttggtttctcgcatagaaaatgcacttggggtaataaggggtgatcaagtcttacttagttgctaaggttattgtgtacattgatcatgctgctctaaaattcctgctcactaagaaagatgcaaaacttcgattaattagatgggttcttccactccaagaatttgattttgaaattaaagatataaaggagtagaaaattctgtagcagattatttgtcgcgtttaaatattttacatttcgcatacgttacttgccttccaccagggcatgtcacagccacctcatcaaaatgttgccaaacggccgaagttcgtgatctctttgagctggtgttcgtcgatggactcctgctcatagttcctgatccatctgaagccaccggtacctcgtccaaaactgacggtgttggaaccgatccggaggcatcatactcgttatttatgtatgacgctgataggtaattagggtcaaagtcacccaaattgaatgacagactgctcggatcgtccatgctgaatattataaccacatggacggaatttcaaaagaaatatacatataacataaaatacgaataataaaaaagggattctccaattctttcttaccttctttacaccttgtgcatgcagttttgctaaaaaaaagtggacttcacaaagtatttttgattttgaacaaattttgtttagataagaaaattgaactagcacacaaaagaacaaaagatagcacaaaatggaaggtttggatgattcaaaatctccatagtgagtgtcctatttgtaaaaaaaatagaacttttctgatatttttcgcattttttatattttttttgtgctccaacgatcttctcagctggattggtgcagacgggcgggcgcctactagcactattggcaggcatggctgtggcgactagcggcttggcgcaggcgggcggtgtgaggagagggcgggaggcaagatgcgcgcatgctgcaattggtgaaggcgggcggcccgcgtgagccgcgaagggaggcggggacgcacgggggtgcgtgcgagcgtgccgcgcgcacacattggcagctgggtgcggcactgtggacatgtacctgcggtgggctggtggcttgggcctttcgtgccgtgctgggccatgcctacccagtacacgccatgccataccaacccatgggctgtggcctcgacccggcacaacccagaagctcgttggccagtgccgtgccgggttggatactgtatgtcacgtccagaaattcactggtaatttcggaacttatttgtgtataaaatcctcatacagaaatcagccgagatacacaaactgacaatttaatatacaaattcatcaaaataactaaagcaataaatacctacataagaggtacttagtccccaccacgaaaaaaactgcagcggaaaaataaaatctagtgaagcttcagctccactcccataggcagctcaactggggtataagccaaacgtcttctccttcacaacttttcttcaaccgaggtttgattgattattgcaaggtgagtacatggaatactctacaagccacacaacaaaaatgcaagtgcacaaggataccaaagaatggcataatatagggctcatttgcaaaagcaacatttagcaaacatttgagaattgtaaaacagtagaataataaatcattaatattaatcaacactgaacagcacacccatgctgcatatgcctaaccaaaactgaacaaccatacccggctgtacagatctatctccaaaccagaaatgtaccattccaaaccaggagctaagcaaattattagcaattatatcatcatttattatggtgagaagtgtgagcctaatcacgaaagacattgttagacccgcccacaaccacgggtatggctatttgttgggtcccaaaactaatgattcggaaaccgacatgtttaactgtatcaagccctggatcagtagattgatacaggttcaacaatctggatcttcattgcatacatttgaataaggctccaaaggagatgttattacaaaatatatgggtatttacaaacttgtggctaactaatacagcagaagctatagaataaaccaactctagtgtattgctatagacttaaaccatctaactaatctagacttgagaactagattgaaatgaaaactaacttatatgattgaactctcggcttcggcaagaactccaaattaactctgaaagaagggggttaaagtaagggtgagtacaacgtactcagcaagctattatattcaagtatgaatgtatgaaataatagtatttgagtagagctagatctatttgcagaaagctgagaaagtagaaggagaaagtctataatgttttgaaatgcaacaatatttaataaaatctggagttatatttctaaccaagatgccatagtgagtcccgatgctcaatatccgtgagcacggctattcgaatagtttcagagatactcatactgcagtagatgtacgctttacccgcaatccatgacatgctaatattcatcagcttagtcatggcaaagcttttcggttactaacatcaacggtacctgttccatgaactataatccccacgcgctctgaacgtaacgttatcagcagcgagaggagttctggcgttcccgaggtctttagagagaactggttgagagacccccgtcatcccaaccaggttttcacaatacacacacagtgcgcaataatcaatatatttacctgcgtctcggtaaatattataatcgctctgctcggcgtaaatttgcctcctgcgcaaggacttaaagaagaaccactgtacagaggtaccacctttgctagataacctactttgctaagtctgtccccattctagaattgcggtcgtactagttcgttcttcacatgtacttggcaatcttatgtcggttggaacagtactagccacccgaaaatcaaccatttctaccatactgttccaatctaagttcattatattttatgcaatctaactaggcatggctaagcaaaatctagcatatatctggtttactatatgttcaagttatgcatttaaaatcatgaatggctaatgcatggaataatagagatatagaatataggataataatgctcaaaggggaggaataataacttgccttgctccaacgcaaacaaatccaagataggcaacctaattatccgatcctcaaaacatcacaagttgccatccaaaagataatagactctactaagaaagacgaagaactaaattcaataaaagccataaaataacaagaaaacgataaatggttaggagggctagggtttggttgtgtgttagtcgatgctagatcataacgactaggtttggtatcttctctagccggtgtcaacagacagcataacggttagagggataggaggtttgtgtgggtttagttgggcggaagtgttactccgacaaccgtgagtggcggcggagcgactaggatcacacagagctcgagagctaactgtgcggcgtgctgtggaggtcgagggaatagtgaagctccgaccgctatacgcatcaaggcgtggggtgccagaagcagcacttcgaccttgggtttaggctttgccgggctttataaccaacggttcgacgttgaggtccgtagaccgcgcaaacgtccccatggaaggcataaagttccaaccggcggctttttagtggctaaaggggtaatttgggacaaaagaaaatatttgaaaaggcaaatataaattcaaacgatatttgaataaattcaaataaaattataaaatacaaaatttggtgtcaaaagatagggtttgaatttatataaatttaggtccaagttttactggaatcggatctacggtttaggaaatatgggcttctaaagattgggttttgaattaaatctagaaaatgagaaaagtcactgtgcaggggacccacctgtcaggcttttctttttcttcttctttttccttctctccttcttcctcccgttcctttcttcttctctttcttgccggcaacagagaagagggagggaggtggggcgccggtgctccggtggctggatggcggcgacgccggcggcgggtggtgttccctagcaccacgcacctggggaggccgttggctggtagaaggagtgagagataaggccggaacggcgacggtaagggctcacctccggccggcatgggtggagacggtggtgacttgattcaaaggggaagagaagggggaaaggggcaaaatggagttgtcggaggtaggcaaagccggaggtgcgaggaaattgataggggagctatagagaaagagatcgaccgacgacggcgacggccggacatggcaggagagagagagagatggagcttggtttgtatgcagagaaggggagggattggcgggctatttataggagggagaggtcggtttggaggaggagggcaagagggtcacggcgccggtggagtggaggagaaggaggcggcgccggctttcgtttcttagcagcgacggaaaaaaattggcggcggcatggagaagacgaacacgtcgcccgttctgtcagttgattggccggggaaggcgcttcggctcggcggctgacatcagaggcgtgaggtggcgctgacgtcgggcggcggttgcttagcgtcgaagacaagacgacggcggcgcaaaacttcgagtggcggcggcaaaagccgtgacggcagcggtggcctgggcgccctgtgcgcccacgggaggagaggcgttggctcagctggccggctgggcttggctgggccgaccctggtcaattgggccaaaaggaagaaaagaggagactttggcccaatagatgattttctaaattttgaatagaatttggaggagattgactaggaaagtttgaaaggaaattatatttgaatataatttccaaaagagatatttctatagttggtttgagtgcaatactttagagatggagtttatttaatgcactcaaatagaaattcaaaatattcaataccataaataatatggctctagatttgaatatttttgagtatgtggagggaatatggagggagtagagtaaatagaattctagcccaaaatatgtggtatgaaatttagagaattagatatgggctaaacgaggttttgaatttggggcggagggataaagtctattctcttagcacaagagcaattattcacaatatttgtaataatattatttttgtgccgaggaggaaatcaagccacggaaattaaattggtggctagattgaaaaaaggaatttggatacttgaaatttggaaagggaactaaggataggtttggaatcaaaggataggttgacaattaattccaacaaatttggaattgcttcggtttaggttcaaggatagtgttggaggatttcttggaccatgattcataaaagattttcaaactaaatttgaataaaaggaattttgtcaaaggaaggtttttaaattaaaacccaaaatcaagaaacaccttaatttaactaaatatatttttaaaggaaagacacaaaagaaattaaataccagaaagagattttatgcaggttaaatttaggaggtctctttaattataatatcctaggtttaggaggttaataaaaacataagaaccggtatgatgcataattagaaaatagctaatttttagtatgttacactattcgaatagttttactctggacagagatataccactgtaaccacaagacatagccccacaacatgtcaccacgcgcctcaataccaccatggtacctcggaaaggagctgtgacagtacccctcgcataacacaatccatcacagcgcaccgttcctggatcataatcacctccttataattcaaggcatggactccccagcgacccccgtgggtttatctccgccacttctcagtatggtgccccgcaatgaactatgttatacaaaaggtaaagccgttgcctacgctggcttgtggttggcacggttaatgtttcaaaaccgaaactcgtgaacaaatttaagccacgatatcattagctttgttaaatttactccacattttttttgttaaatttaaaaaaatactccacatttttgttcaatagaggatggcggatggtggggttagcacctaaaaggaggagcgtcgtagtacggtagtacctttcagagtgtgtgtcataacaaattacagatatgcaccttcacctaaattaagattcaatgtcaaaactttgtccaatcacttttcaaaatgtttacttatggtatcacggcaattcctaaccaaaaaaatcatgttttttcgttcttctaatgtgacttatgctcaacaccagtaggtgaccacattgttggtatttcttaactacattactaaaaatataattcccagtaatggcgcagaaatattcatggtatattatggttatagatcatatccgcaagcgcacgggtataccattgtagtatttcactcgagagtatttcaaggttatcatattagtttaatctcgtggaagattataatagagagaaccatgctaatatcaaaatataagcaggggataatttacttcaagggtagagtgccacaaagcaaaagcactcaatattctcatacatacaaattctaggctaagtggaaaagaataagaaaataatcatttcctatacttctaatatacatacataccacttcagataatattatctactatataattatataatcaataccccctttacaatgccctcctggggtttcgagtgaccacccctaatttccgagttccttacgacaacccatcatggccatccaaccagggctaaatacggaggagtacccccccaagaaagtaacttaggattatatactgtcgtggaggaatactcatactgagctgtcaccatcagcggcccacctctactaactcgtagcctataaccccaaataatgatattcaatagcctaagcacctcacttatgctaccaaatactactgtacaatcatcgtcatgacttagagcaatcatataaatgaatattatacccacaccaatgcatctcccaggtaagctagctagacaattatatcccgaataatatatcggaaagtaatcagagtgaagtaaagtaccataaatatattgagaagagtattctataaatagtacaagtct

SEQ ID NO: 9704 - DNA, 4582 bp, Oryza sativa
taaagaatcctcatagttccgtccgattagtttcacttccttgtgcaagaaccataaccgccttagggtcctcatctctatcatgtttagaaggttggttgtggatgcttttatttatcataaatattgcaaatcttgtatgtgtctgtggcactaatcttgcagcgagatgtctccatggtcgagcttgtgaccataaacaaagcaatgccgggagatatcccggattatcttggtaacttttctttccaataaaagtaagaatcagtttttaggatattatgcaccttcgggtattcttagtcagtaaccatttcaggctgagattaagaatgagggacgtacgatgcctaagaacataggaactacatcaactgctcattttggtgatccttggtgttggtacacaccttataaagatcccagtctcacacacttgatttttgacgtctcataacgcaaaagtccaagtgtgggggaggaatgtcgacgagcttgcatgacaagttccatcaaccaaggccaccttgtttgcagttggcgttagtcttaccttgcagataaaaaaagaaaaaaaagaagaaaaaaagaaaaaaagagagacagaagataaaaaaaagaaatgaaagatgggacaagaggaagagagcaagagggctgacgggctacatctagttcaaagaccgcattatgtgcgagtttttaaaataggccatacacctcgctagtagcgatcatgctacctcgctacaccaagcccctctcttgagctcatgtgccaccttggcttagccttcatccactcctagttgtgcacaacctctcgctcctgcaacacctacacacatacaagcaagaggagatgccctcttctttcctaggtgtttgctgctacactctagttggcacttgcatctttgcctaagaagagatgcatcctacgtctctacaaaattttgccaacggaacacgccttcaaggcacaaggttcttgcacccgagatgtgggcataaccgaaccacttgcttgagttggtgtggtcaaagtaccttccttcgccacaacccacatcaagacggaggagagattgacaatcacatgtgaccatgccaccgctctagagatttcaacatatacatcatgctggcggtaagtgcactcaggtataggacatgaagcaaaagattcaccatttcttttactcatacttatctctagttgagtctagcttgatcatatatggttatgcgtcctcagtccatttttcgtatgctatggtttgggtggtcgtcaacattcataggctttttaaattaagcatgatgcttatgataaatagtctgctttaatcaaagttgatgtggtgtcaagtttgtttaaatgaaccgtagagccagtactttcatggacttcggatgtatatccttcgtagactaacccctgcaggaaccttttcaatttgacgggtgagttctcaagcatgagtcacactggaggtaagtcaagggccaggaacaaatcaattgccataacaggcaaaggagagacatatcacctctcaagttgcacggtacgtatattgccaaatactcctttgctatgcttgtaactttatctcagccatgtatgagttctgcttaaatagaagtttggtgaaccaaaaaaaatgtttttaagaataaaagaaatgtctctcggagaaaaaaaaaagacaaaataaaattatggcaaaattatgggatccatgctcattaagttttcaatccaattcctttatagcatggatgtgaacaacaaattttgaggctatgataaaatcttttcaattttttgtagtccctcgagtatttgttgtccactaaccttttgcatgaaaataaaaagacaactaaggagcagtgtagaataacctcaacattcataccacgctccttggactatgagaagacagatgcacagggaaccaagcagagcaaatgcaatactttgttatagttgattcggttcaaagtttggtaagttcgatctggtaataatctcaaacaccctgtgtatcattgcgtcatatagtcgtcctgctaggatacccaccatgctcattgttgccataaaaaaataaaaaataaataaataaataaaagtgaaataaaataaagtaaatttaggcacttcatccgcctagagttacttaaataaaatttggctcaccggtattttaccccagtagaagtccattttactttccatgtttttgttgaataaagacaaggtacaaaacaagtgtgggggaatcatttccgaacatccgacgcgcaacagcatcaactcaacatgacaacatgatgaacaccaacccacggctgcgcacaaaattcagcagccagaacagagtcctggctgggtcggttgaaccaagtgttcgcccaacccttgcttggtccgattctgtcatccttcgccgtgtggtcaggtttgcgcgtctcctcccttatcctccactatttgtgagttaaacttggcagaaaaattgaatacaaatttagtttgactccaaatgaaaattgaaaacattaactctcaacaaatagaattttcctatgattgatcatgtatactttttattctttgctaacacttgtcacttgtgaacaaacatctatcatagggaaccttgctcatctaagtaattgatgtatgtgatatggttatgacgaaagaaattcctgtccaactgtcatgatacttgggattttgttttgtgaaattaaaactttttcgagcaatactcctcagtgactatataattacctaccaaggccatgtataattatcattgcagaaacctttatatatatgtatatatacatatatgtatatatatatatatatgaatatatgtatatatatatatatacatatatatatatatacatatattcatatatatatatacatatatatatatatatatatatatatatatatatatatatatatatatatatacatacatacatactagcaatagtgcccgtgcgttgcaacgggaaaaacactgtttgatagtgacaccttgaaaaccttaaatcggtaaaaatcaagtctaatttgatatattaacaaataggtagaaccgagtctaatttgatgaattagcgtagaatttatgatttagttttagatttatttttcgagcctacttaggagcttatccgacggattttgattttaaaaatctaagtcacattgtttgatcaaatttgctttcgacccaggtcttcctagtcggcccaaacttgggctggcccatcttcggcgagctaattcaatttgacatcccgcaagccgagcagctgagcgcggcccacatatgcggggacggtccgatgcacttcgacggcccatttggcacagtgtaatcagcggcggcggcggcggttttttaagtagtatttttttcgattcggatctatagtttttttcaccacttaggggaaaaagacttttgttgttgttgtttttctttattttattttttgtgtggcttttctttttctttttatgcactttctgccttcattctcccttttattatttttttaacaaaaacgacctcaagtaccttattgcaagattatagggactcaaatgtaaatataaaaattacatggactcaaatgcaaaagtacaaaccaaaaaattaaaatcatataaaatggaatgctctcgaccgtaggttccgtttttgcaaatatatcttcaattcgacacatcaatttttcaccaatgtagagtcagactttttttttcttttttgaaagggaagtcggacttttttttcttttctaaaagggaatcggatataggtgtcggacttttttattttattttttcgctattatttttttttgacggacgaaggaagcatctctcattttgacttttattgttgttgtttttctttattttattttttgtgcggcttttcttttttctttttatgcacctttctgcatttgttctctctcttttattatttttttaacaaaaacgacctcaagtaccttattacaagattttagggacacaaatgtaaatataaaaattgcagggactcaaatgcaaaagtacaaactcaaaatttaaaattatataaaaatggaatgctctctgtaggtttcgtttttgcaaacagatcttcaattcggcaatcaatttttttcaccaatatagagtcggactttttttcttttctaaaagggaagtcggacttttttttcttttctgaatcggatataggtgtcggactcttttattttatttttttcgttattatttttgttttgacggacgaaggaagcatctcttattttttaagtagtatatatatatatatatatatatatatatatatatatatatatatatatatatatagaactactatagagcaccctaaggtgctacgtattaaacagcacctgatacagcttctaaccccacccctgcaccctcccaccctgctccccaccaggtccatagtacgtagttaaaatttaactcaccaacgaccaatctcga

SEQ ID NO: 9705 - DNA, 165972 bp, Oryza sativa
  unsure (1)..(165972): unsure at all n locations
aactttaatcctaatgcaatacttcaggcactggcaacccgctgctcctagatgtcgctctactatgtacccggactgggaggacttaagtgatctcgagggctgtcaccacctctacacctacctcaacgtactgtggaatatgcagcaattactggataataattacctaaataccacatctaagtaattaatatctactttagtgtttataactcaccaaagcaatcactatattttagttgattataatgaacaataatctcgtatgctatttaggaactaaccaagagataattctcacaagataaatctaaattactcaggaagaatattacattgaattcagagtaataaacagaataaaaaaataggagaagattactgacaactccaggattcttccgacttcttctactctactctcttcctattctaatatacaatatagtacaatagagcctcttataatttagctcaagcttggaagtgtgggagtgaagggagggagtgatgtccttttatagggcagttatgacggttgtgagaaggagaaatgtccgaactgcctcgcaaccgtcactgggagagcatctggagcgtccacaccaaaccccaggatcaacggtgatcaggggcgtttggccgaacctgggctgggccctcctggcctggccttcagttggtggactccctggactctcctctatccatttctcatagttttgggctgatttactgatgttttgatgaaattcacatcccctccttgtatggatacataattctcctcactttagtctaatttcctcccatcttcaaggtttatcatctgcatacaaatagacaccatcacttgtggaatatatgagattaagcacctatctctatgttgaatattttattatctggactttatgcagatgttggtggtatagaatcggcatttaacagccgccaacaatgtggcaatgagaacatagtggtatccatgaatgcacttcaagaatgagccagataagcaaaggacattcctgagttcgtgatgcatatagcaggatgaaggtacttctttgtatctgttaacaacagaattttgcatgagatttggagaagaaggaagaagatcgaagcggatttggtataaggtcgagttgatttccatgtcggactgcgcattggctgagtaccgtatcggctaaaaactggacaaaggcttgacttgccgatatggcaagtcgccaatatggcataacttgggctcggcatgggcctagacaggataaccgcattgccaatcagagatagagctcatgtaaggcaattatatctattaattaggttagttatgtcggtttgttagatattttgtaagagaccgccgtatatggtcttgtttgtatcttatctttagaaaggtttgagtcgtgtctataatggactaagtttgtactcggggtataaatatgaaacccttaacattgtaatatgggagacaatccaataaaacttcctcgcatcgccacccttttcgcttttacttttcaacgagttcacttcacaacaagtaacccgtctcgatggcttgtgctatcggggctattatgtcattttatccttgtatcatgaccattgttatcttatgtctttgttaatctagtcttagcatatcgatttagctctatcgactgcttctcgttttaaagtttctgccggtatcggctaaatcgtcttgctagattagattagcttagacatccaccaccctaaaaattcagtcaatgggttgactgtttagatatcgtgtttcttttcatacttagtgctgcatcagtacattcgacttactaaatcatgtttagaacaataatctctagcctgcttcttgattgttaataggggtagcatcggggtttcagccgatcttacctaatatacatgcttctttacctgtttcatgtatatttgccatctctatagacagatcatctaatattaatatattaagtctaggtcatattggctaggctatcattattgactattgacctctatttggtatattactatagattgatttgcttatatatttttgctctaaatattgttccatcgactactttcataatattgtcttaaacttctttattaaatctgatagacagtattacagctgatgaggcatgtttaggtttaatattcactgatatatccagtccatagccgatttggtctagctaactgcattggctgagaccaccaatgataagctatcggtcgatcggctatcgactgactaactctgcttttgtctttcttgctgattgtaggattaaatctactggcacacccttggtacactcgagcctaggcttagacctacactagagttaagcagatctcctagtgtggagattatggataccccatacctacacggcatgtatagtccgactgggtatggggtaccatgtttagatagaatatctttaagaggactcgggttaggttctaaacttgcatatcaaggaaatatctgagatcctagtcggttacgattgtattttatctgtaactacatattccgttaaggatatggactgtattttgtaataaggaccccttcccctatataaggaggggtccgggtgcctctaggggcacgattttctcccagatcatacgatcaataatacactcggcggattaatcctcggacaggagtagggtattacttcttgattaagaaggcctgaacctgtataaaattccttgtctctaaacccatccacttttccaacttgatagccaccccttttagtattgctgaaatcttgtttcgacagttggcgcgctaggtaggagtagcgtcaagttcttcgccgattggtgcgatgggttccgtcttcggcatcgacgacttcgtcttccctcccgggcaagtgttccggttcggcaacctagacttcatcaccaacgacttcggcaagatttctctcctcgactcagattcgaaccagtcgggaagaggccagatctccgccccgttcggtatcccgaactcggccgaggtctaccccaaggtcatctccgccgagttggtttcaaaccactcggacaagatccaatctactccaacacgaccagatcaagacgatggggcctatccgccaatcttgatgaaactccccgacgatttggctgctgtcttcactacaagggcgtcttctccccgtaggcctaggcgggatccggcttcagccccggtccggcctagctccagcgaagtcggcatcatactccagccactcggcacagtttcgacggaccaactggacggctaccttagctcccccggcgtcgagtcacgaccaaccgagaacgtagagtacgatgacttcggctatcgctacgacaaccgcaacctcgacgacttcgacgagggctttgaagataactacacccctctctacctcggtgttttcatggctgacaacgagacggaagaacagcgccaagcccgagaagcagaagggcgacatgtacaacaggaagccgaacgacgccgattagaagaggagcgctaggcacaatagcgagaacggctgcagcgtgagcaacaggaacgcgaacgggctgcaaaggaggctgaggaccgacgacaatgaggcttggatgccaggcgacgagcgcgagaacttatcgggcagcaagacgtcgagggaacagcagtctttcgcacccctcaacaaaacgcggttgcagcgatcactctcctcgacaccctcctcaaggaagacgcactcaaccatgctgatcacgtcatcaacatcttgaaccagactaagaccatgatcgccgcctcggtcctggttaactccgcaagcgtccgcacgccgactggcagccgagttccccatcttcgatctcaagattatcaccagccaagcctcagtatcgccggcgcgggatccaattgcaggagcaggggccacgaggagcgatctgtccactcgcctcccgaacgacacagggagcgccgagttgaacggccacgctccccacctcgcaggcgccccgtcgatcttcgtgatactatcaaccagcgccgcgcggcacgaggctacgccccccaccattcaccgaatcgctatgacgacgacgtggatggagtcgctgccttttcaagtgacctgcgtcgagtggattggccagctggcttcaagccgactagaatcaagaagtatgacggcaccaccaatccggagtcttggctcaccgtctacggtctcgcgattcgtgcagcaggacgagatagcaaagccatggcaaactacttgcctgtggctctagcggattctgcccgatcctggcttcatgggttaccccatggcacaatcggatcatgggcggaactttgcgaccacttcatcgccaacttccatggcacctttgaatgccctggcacacagtttgatctctacaacgtcattcagaagtctggagaatcccttcgagattatatccgacgcttttctgagcaatgcaacaagatctccgacattaccgatgatgtcatcattgctgctttcaccaagggaattcgtcacgaagatttagtcggcaagttcgggcgcaaaccgcccaggacggtcaagcagatgttcgaaaaagccaacgagtatgccaaagacgaagatgccattatcgcgtccaagcagtcgagcaccacttggaagccgaagaaagatacgccgactacgggagggagtggaagtaccaatcgcaaggaccgtaagcgtaagcccgaggaacttgttgcaactactacacattcctcccgacaacgttcgcgcgtcaacacttttgacaagatcatgaactcccaatgtccgcatcatcccaattccaatcacgcgaccaaagattgcttcgtctacaaacagattgcagaacaatacgccaagaacgcacgaaaggcctccgatggagatcaaagtgcatcgaaaaagaaggacgatgatgacgatgccccgacaggttttcaagaccatcgcaaggagctcaatcacatctttggcggacccttggcttatgaatctaagagaaaacaaaagctgaccgaacgggagatcaacgctgttcagcccgatacgccccaatatcttcggtggtcggagacaacaatcaagtttgaccgctcagatcatccagaccgagtggtccacccggggcggtaccccttggtactagacccagtggttcgtaatgtcaagcttcgcagatccctcatcgatggtggcagtgcactcaacatcctcttcgccaaaaccctagacgacatgcaaatccctcgcacagaattaaaaccgagtaatgcgccctttcacggagtcattccagggctatccgctatgccgctcggccagatcactcttccggttactttcggtactcgggagaacttccgcacagaaaacgtctgcttcgaagttgctgatttcgagaaaccgtatcatgccatacttggacgcccggcgttagccaagtttatggctgtcccgcactatacctatatgatgatgaagatgcctagtccgcgaggagtcatatccctgcggagcgacatcaaacaagctatcacatgcgacaaggaaagctgcgagatggcccaaacccgcgagatcacgatcgcccgagaagatatccgactggctgcaactacggcaagcgaaggagaagtgcctgcaaccaagatgccaaagagtggagaaagcgacgccaagaccaagaaaattcctctagatccctctgattctactaagaaagctgtaataggcgctgagttagattgtaaataggaaagcgtgctcatcacctttcttcaaaataataaagatatctttgcatggaaaccatctaatatgcctggtattcctagaaaggtgattgagcactctttacatgttaaggaagatgctaaaccaatcaagcaacgactccgccgcttcgcacaagataggaaggatgcgatcaaggaggaactgactaagctgttagcagcaggcttcatcaaggaagtccttcatcccgactggctggccaacccaatcctggttcggaagaaaatgggacaatggcgcatgtgtgttgactacaccgacctcaacaagttctgtcccaaagatccttttgggttgcctcgcatttaccaggtagttgactcaaccgccggctgcgagctactcagctttttggattgctactcaggttatcatcaaatccgactgcttaaagacttcattcatcacgcccttcggggcctattgctacatcaccatgcctttccgattaaagaatgcaggagcaacctatcaacgcatgatccagagatgtttttcaactcagatcggtcgcaacgttgaagcttatgtggatgatgtagtcgtcaagaccaagcagaagtatgatttgatcacggatctagaagaaacctttgcaagtatctgcgctttcaggattaaattaaaccctgacaagtgcatcttcggagtaccgtcagggaagctgcttggatttatggtctctcatagaggcatacaagccaacccggagaaaatcaatgccatcctcaacatgaaaccgccaagttcccagaaagatgttcaaaagctaactggttgcatggcggtgctcagccggtttgtttcacgactcggcaagcggggatgccctttttcaagctgttgaagaaaacagacaatttccagtggggacccgaagcccaaaaagcctttgaagacttcaagaaactcctcactactccaccagtcttagcttcaccgcatccgcaagagccgctgttgttatatgtatcgtcaacttcccaggtcgtaagcacagtcctggttgttgagcgtgaagaagaaggccatgttcaaaacgtccaacgaccaatctacttcgttagcgaggttttggctgactccaagacaagatatcctcaggttcaaaagctattatatagcgttttaattaccctcaggaaactatctcactatttccaaggtcactcggttacgttggtcacatcgttcccattcggcgatatacttcataatcgcgaagcaaatgggcggatcacaaaatgggccatagaattgatatccttggatatatcgttcaagccgcgaacttcgatcaagtcccaagctttagctgactttgtcgccgagtggaccgagtgccaagaagatatgcccgaggagaagatggagtattggaccatgcactttgatgggtcgaagaggctttctggcgctggggccggggttgttttaattttcccgactagagaaagactgagctacgtattgtggatacatttttctgcatctcacaacgtagcagaatacgaggcgcttcttcacggactaaggattgcaatctctttgggaattcagcgtctgatagttcgtggagattctcagttggtcgttaatcaagttatgaaagagtggtcctgccttgatgataacatgaccgctaatcggcaagaggtgcgcaagttgaaagacaaattcgatgggctcgaactcacccatgttcttcggcacaataacgaagcagctgacagactggctaattttggttcaaaacgagaagcagctccttctgacgtgtttgttgaacatctttacgaaccaaccgtaccaaggaaagaaacaatcgaagccacggacgctcaaaacgtaggtatgattgaagccgactagagagagcccctcataagatttttgaccaaacaagaactcccccaagataaagatgaagccgagcggatctccaggcgcagcaggctctatatcattcatgaaactgagctgtacaagaaaagtccatcaggaatcctgcaacgctgtgtatctttagaggaggggagacaattgttaaaggatatacattcaggcatctatggcaatcacgctgccgcacgaaccattgttggcaaggcttatcggcaaggttttttctggcccacagctgtgtccgatgccgacaagattgtacggacatgcgagggttgtcaatttttcgccagacaaactcatctacctgctcaagagttgcagaccatccagttgtcttggccgtttgcggtttgggggcttgacatggttggcccgtttaaaaaggcagtcggcggttatactcacctctttgtggctgttgacaaattctccatgtggattgaagctaaaccggtcatcacaatcacggcagacaaggctagagatttcttcatcaacattgttcatcggttcggggtacccaatcggatcattaccgataacggcactcaatttactggcggagtatttaaagacttttgtgaagacttcggcatcaagatttgttacgcctccgtagcacaccccatgagtaatggacaagttgaacgcaccaatggcatggtacttcaagggataaaagcgcgagtcttcgaccgactgcatccctatgccgacaagtgggtggaacagctgccatctgtactttggtccctgcgcaccactcccagtcgagccacgggccagtcaccgtttttcttagtctatggagcggaagcaatgttgcctagtgaggtggaatttgaatctttacgtttccgcaacttcagcgaggagcgctatggagaagaccgagtagatgatcttaaccgattggaaaaagcccgcgaagcagccctaattcagtcggcacggtacttgcaagggttgcgttgttatcataatcgcaacgttcgatcacgagcttttttagtcggtgacctggttctgagaaaaattcaaactacacgagataagcacaagttatcccccttataggaagtaccattcataatctccgaagtcactcggccaggttcctaccgacttaaacatgaagacggtactcctatcgacaattcttggaatattgaacatcttggtcgtttttatgcttagccattacctttgtatttccctattttgactgctaacatcaagttttcccttgagttatcagtcgggggctactataataataatggagtgtgatttttatcaattcaatttgcttacttgatttatcattgccttgcttgatttttttggcttagtcaatgagaattgaaagttttttaataacttttgtgggttttaggctcaataaggtttgacaaaagcttttaagaaattaggagctaagttcgaaatatcaagcacagcataaattcatcagtatagtacaaattgtgccgccatcatcttcatcatcagaatcattgttataatataacatcactcggtgtcagttttttcctcatcggaattatcagatccagtcggccgaaggtcgttgtcctggaatctctcaactacatcaactgctatcttatcggcggttttctgcgcatcgttgatgaggtcaagggcggcttcttcgctcgtcccgtctgcaaagccattaatggcgtcaatgtcgatcttcgggtataaagacttggtcattgccaacgccaggcttgcccccatactcccagcctctttgatattcgtaaagtatgtatccggagcaactctcagcttgtcgaagatttcggaagcatcaaatgtactcggaccattgttattaaagaacatggtttggacgagtagggtagcagtgttggcgacttcatccctagacccttcaagcctcttgattttgttgaccaagacatcgaattgagcttgagacttgattttgcgatctgcataaatagatttatatcaacaaatgggcacaagggaaggcatagtttctagggtattagtcaccagtaccttcgacgtctttcagagccgagtccctttgtctcgccaattcggccttgtcattctccagagcttggatccgtttttctaattcagatatcttagccacttgcactgcattgcttcttgttagttgatattgcaagaatggcagcataagtaagttggatagagattgtattcaccttttgacgaaccgctcatctcaaagttggagtcttgaagctcagcgattcggtcccgtagatcatgctcagtttttctggcaagctccttggcttcgtgcagctgattcctagtggcttcaagggttttgagatggggaaccaacctctcaagagttgcagtcttcgcttcgttcttgagatggattctctgcaatacgaatttgtttgtatttgagcaaagtagtaagcaggatagttgaagccgtgcataaggagacttacatttacgatgcgagtggcttggccgagtgccttttttagcaggcatacttcttcgtcttccttttgcttgtttattataattccctgaggttgcatgtcatcgtcccaccacttgactaaaatgggcgggcgagaatcctcagctgattgtatctggaggatctcctcttcgtcgctgattattgggccttgagcatccatgaataaaggtgaaacaattgaagaaggtctgtcagattaaaacggattttggagaatgtgttaacctgtaataatttctggtcaaggacgagcaggctcttgtactttgacaggagagctgggccctggatctgcactggcatcctttctgggagggctgttcgtttgagtttctacttcaggaatatctttacttggctctgtacccgactggtttccagtcgggggctcttgattagcatcggctccagcttgggccgactggttcccagtcgggggttcgttgctagcttctacattgtcggttgccggttgtttgtcacttgaacaatcctctgcagttggcccggtttcttttgaaggacctgtctccacgttagtcggctccgagtcttttccggaaggatctatatcagatggcttcctacaaatttgagttatgccatcattattatttcaatagtgagtgagcagcactacgaggaagatggtcaaatgattcgtacctggaagatttcctaatctttggcattggacgactggatgttttcttctaaggattggtttgccttggctgttttctagtcacctctttattgccagattttccagcatcatcgccttcatcattactcagaaccaatttcctcttgcgcgagtccaactggatggctgattttgagatgtttgattgagtatcagaccgaatttttggtccaccacttgcctgaccagtctgccggcaaggtgatcggcgttgggcaattggagggtctgatttcatcaaggcgaattcctgggcatgatgattcaagttttctatcaactttgcaggtgataaaagcatgcttagatataggctgggattttaaatacataccggttgagggggattgaaggcattgtatggcaccactggcagcaagtgcgaatagctgactacaattgcatttgagaagattttatacattctctccttcataaccttgaattcaagggattcaggatcttcacggttagggtcatgtttgccgtcgaattcaaaggctgtgcgagatctttctttgattggggccaaccggctcttgatgaaatgtcgggtgatttgttctccttgcagaccttgctcctttagcttcagcatacgatccatcagggcgagctcttgggcggcttcctctcccattggtagtgaattccaagtgtcctgataaactggaggaagacaggagtactcggggagtgccggctcgaggttttgtacataaaaccaatttgcatgccagcctttgtttgaagttttacagggcatggagaaatacttttggctcagagttcctctcagttggaatctagctcccccaactacgcatggcttgcttttgttcggctggggtttgaggaagaagatacgatggaatagggcgaaatttggcctgatgcctaaaaaagcttcacaggcgtgtatgaagttggcaatatgaactatggagtttgggtttaggttatgtaaactaatcccgtagaaatccaaaattccctggaataatcttgaggttggaagagaaaatccgccatagaagaaatgagaaaataccacgacttcatgggtatcaggggttggaaatgcttcgccgcacgccgcacgccgcccaatgatctccttcgccggaagaacgccgtgcgccaccatctccttcaggttttcctctgttacatcagagggcgcccattgactctcgaagctttctctctcttccgccatgacagtgaattagatggtgtgatttggttcgagatatggctaggaatggatgggaacttgatgtggtggctgcgcggaaggtttttgtggagctcaggaggatggatcgaagaggatttgttaaccctagtttccgccggtgtggttttgcactgtagcaagagaatgggggaaaatggcgagagtttcagcagggaagacgaaacgacactgtgcctgcggcgtttatttcgctagggtttcaggagtgctaatgggcctgggcctgtacagtacttcagcccaattctattaccagcgtggctagttgtgatccttagggacttaggcatttttgctcacaacaatatggcccaatgctgtcaaaatcctttttgaagcagttagatgattctttggaattactacgatgcaaataaaaaggtgcccaacagaaaagtgttatactaattttgtaagtctttttaggctgcaaaagttgtttgggtttgttgagataactggtttttgaacagttatgtgctcggcatattatatgcttattcttctggtgtgagtcatagcctaggctattttgacttatcacttgttatgttatcacatttatatcacatttgatggatctttttgagagttcttactcagattcttatcaaatgtgtgaatttatggacctttagagtgtttttcacgcaggcctttccatattttcatttttggtatattaaagctaaaagcagtcggctggatgttttattgaacgccgcatatgctttgctatatgatgcttggttgtaaaaccactcggttcttgactatatgtttagttttatttaactaaccacatagtcgggggcttagacctgtactggagttaagcagatctcctaggctgtcgtgtttttacatctacagtatctgaactggagaattgacatcttttttttttactctgaatatatgtgcttcaagtggagcttaatagttcgttgctttcaaaatgaacaaaccaattcttcatgaggtattctgttcaccacaattgcatttgattctagagggactccatgagggtacaaaaatccccttctactggacttccttgattcccatctatttgtagttacacaagaagctggcaagtttgcatggattggtataagttgcaggttggcatttaagaattttattcactacgcagtacgcacacgattctatatatcaggatctttatttgggtggagcctttcttttttttgtgcttttgctaatagcaggacctgcacagttcttaaccattaagctcagcaactagatttcccatgcgaagatgtacaggatttttagattttccacaatttcttttcctcgtgtttctattgttttttcacagccatcctcaaagagtgatcttctattcaagcgacggttattatttttgaactataaaggatattcatcatttcttgtcacaactgatcgaaacatgaggaaaaacaaaaatttcagaccaatagaggttgatttcaggtagattaccaatctactaactttataaggatggattttatctctgctcagggttaggcattgcaatggtttatcttcttcctcatctgccttttttttttgcataggcacgcggcatcaaccactgctctgccgcacctatgaggtccagggtcacatccagttattgtctttaaatacaatcttcattgagggcatgcttggttgcctggatggcacctagcctgcatccggcgtgcaactagcggatacgcctaatgggcgatcgatcacctcacgacaggggcagcgatcgattcccccctcccccctcttctccacctggttttcttttttggcaccgtattactttcctattttagtaaatttatgcacctaaagtttatacacctcaagtttacacatctaaagtttagaccaaaagtttataagtcaaaagtttatatatccgattcaaatttgaatttgaattcaaatatttttcatatatagtatttctatacatctaaagtttatacacctaaagtttatagacctaaagtttatatatccgattcaaatttgaatttgaattatgtctgattcaaatttgaatttgaattcaaatatccgattcaaatttgaacttgaattcaaatatttttcatatatagtatttctatacatctaaagtttatacacctaaagtttatagacctaaagtttataaacctaaagtttatatacccgattcaaatttgaatttgaattcaaattttttatatatagtatttctatacataattttttttaacttttttgttttttaacaaaaattgtggagatgtgtaaacttgaggtgtacaaactttaggtgcataaatttactaaaataggaaagtaatacggtgcctaaaaaggaaaccaagtggagggagagaatcagaatctgatcgcctcctagcaacccctagcgatcgatcgctaagtagcattctcggcaactagcagcctgtttggttgcctggatggggctcagccaggcccatgtgatgcaaaacacaatgtaatttataacctctactatggattaaccttaccatccataaacagttttctttttggaaaaaaaatcttgctccacaaactttcgggggtaacctcaccatccacaataataggtatacacataagatgtatccatccaaccaaacaacatctcttgtatgcaaccatcccatccgcccgttgctacaaccaaccaaacaacatctcatggtatccaactttatgtcatgcgagcaatcaaacacatgcatgtgtatcccctaagccaggctacactcagtctggataagagagatcgaccatactagggggatacgagcaaccaaacacaccctgagtttcttcacccaactaataacctttgcacatgacagatgtgtgttgacagtcgttatcaattagtctcgcgtgtcaatattactaaaataaagagagaactagttatgcttgcaatgcatatttatgttagaataaactattttccactagcatttggattctaaccttttgcagagaagaagtacaaaatggaggagaatcaatagcaaagtagatgatcaatcaatcaggcgctgatgagattcagacttatggaaatatgggccaagaactcttaaatgacaagatccaacaagcccaaaattcaaaagtctgtggagagaagaagtcaaagaggccgccagccgaaaatgggttgtattgggccagcccatggttcgaccgaaccccacctgcgccgttggatgcagggtttggcgtggacgtccaggattgcatcctaatgacggttggagggtatttctgaccattctaaccgtcacaactgtcattggggagctataaaaggccttcacctcctcacttcttccacacactcaagcaaggagcttctcatactctctcaagtttagatgagtcctctagagctagtggaatagaaatagaatagtttctttagtccttagagtcttcggaagaattcaggtacggctctagtagctcttccttcttttgtgagacttgtactatttatagaatactcttctcaatatatttatggtactttacttcactctgattactttccgatatattattcgggatataattgtctagctagcttacctgggagatgcattggtgtgggtataatattcatttatatgattgctctaagtcatgacgatgattgtacagtagtatttggtagcataagtgaggtgcttaggctattgaatatcattatttggggttataggctacgagttagtagaggtgggccgctgatggtgacagctcagtatgagtattcctccacgacagtatataatcctaagttactttcttgggggggtactcctccgtatttagccctggttggatggccatgatgggttgtcgtaaggaactcggaaattaggggtggtcactcgaaaccccaggagggcattgtaaagggggtattgattatataattatatagtagataatattatctgaagtggtatgtatgtatattagaagtataggaaatgattattttcttattcttttccacttagcctagaatttgtatgtatgagaatattgagtgcttttgctttgtggcactctacccttgaagtaaattatcccctgcttatattttgatattagcatggttctctctattataatcttcccacgagattaaactaatatgataaccttgaaatactctcgagtgaaatactacaatggtatacccgtgcgcttgcggatatgatctataaccataatataccatgaatatttctgcgccattactgggaattatatttttagtaatgtagttaagaaataccaacaatgtggtcacctactggtgttgagcataagtcacattagaagaacgaaaaaacatgatttttttggttaggaattgccgtgataccataagtaaacattttgaaaagtgattggacaaagttttgacattgaatcttaatttaggtgaaggtgcatatctgtaatttgttatgacacacactctgaaaggtactaccgtactacgacgctcctccttttaggtgctaaccccaccatccgccatcctctattgaacaaaaatgtggagtatttttttaaatttaacaaaaaaaatgtggagtaaatttaacaaagctaatgatatcgtggcttaaatttgttcacgagtttcggttttgaaacattaaccgtgccaaccacaagccagcgtaggcaacggctttaccttttgtataacatagttcattgcggggcaccatactgagaagtggcggagataaacccacgggggtcgctggggagtccatgccttgaattataaggaggtgattatgatccaggaacggtgcgctgtgatggattgtgttatgcgaggggtactgtcacagctcctttccgaggtaccatggtggtattgaggcgcgtggtgacatgttgtggggctatgtcttgtggttacagtggtatatctctgtccagagtaaaactattcgaatagtgtaacatactaaaaattagctattttctaattatgcatcataccggttcttatgtttttattaacctcctaaacctaggatattataattaaagagacctcctaaatttaacctgcataaaatctctttctggtatttaatttcttttgtgtctttcctttaaaaatatatttagttaaattaaggtgtttcttgattttgggttttaatttaaaaaccttcctttgacaaaattccttttattcaaatttagtttgaaaatcttttatgaatcatggtccaagaaatcctccaacactatccttgaacctaaaccgaagcaattccaaatttgttggaattaattgtcaacctatcctttgattccaaacctatccttagttccctttccaaatttcaagtatccaaattccttttttcaatctagccaccaatttaatttccgtggcttgatttcctcctcggcacaaaaataatattattacaaatattgtgaataattgctcttgtgctaagagaatagactttatccctccgccccaaattcaaaacctcgtttagcccatatctaattctctaaatttcataccacatattttgggctagaattctatttactctactccctccatattccctccacatactcaaaaatattcaaatctagagccatattatttatggtattgaatattttgaatttctatttgagtgcattaaataaactccatctctaaagtattgcactcaaaccaactatagaaatatctcttttggaaattatattcaaatataatttcctttcaaactttcctagtcaatctcctccaaattctattcaaaatttagaaaatcatctattgggccaaagtctcctcttttcttccttttggcccaattgaccagggtcggcccagccaagcccagccggccagctgagccaacgcctctcctcccgtgggcgcacagggcgcccaggccaccgctgccgtcacggcttttgccgccgccactcgaagttttgcgccgccgtcgtcttgtcttcgacgctaagcaaccgccgcccgacgtcagcgccacctcacgcctctgatgtcagccgccgagccgaagcgccttccccggccaatcaactgacagaacgggcgacgtgttcgtcttctccatgccgccgccaatttttttccgtcgctgctaagaaacgaaagccggcgccgcctccttctcctccactccaccggcgccgtgaccctcttgccctcctcctccaaaccgacctctccctcctataaatagcccgccaatccctccccttctctgcatacaaaccaagctccatctctctctctctcctgccatgtccggccgtcgccgtcgtcggtcgatctctttctctatagctcccctatcaatttcctcgcacctccggctttgcctacctccgacaactccattttgcccctttcccccttctcttcccctttgaatcaagtcaccaccgtctccacccatgccggccggaggtgagcccttaccgtcgccgttccggccttatctctcactccttctaccagccaacggcctccccaggtgcgtggtgctagggaacaccacccgccgccggcgtcgccgccatccagccaccggagcaccggcgccccacctccctccctcttctctgttgccggcaagaaagagaagaagaaaggaacgggaggaagaaggagagaaggaaaaagaagaagaaaaagaaaagcctgacaggtgggtcccctgcacagtgacttttctcattttctagatttaattcaaaacccaatctttagaagcccatatttcctaaaccgtagatccgattccagtaaaacttggacctaaatttatataaattcaaaccctatcttttgacaccaaattttgtattttataattttatttgaatttattcaaatatcgtttgaatttatatttgccttttcaaatattttcttttgtcccaaattacccctttagccactaaaaagccgccggttggaactttatgccttccatggggacgtttgcgcggtctacggacctcaacgtcgaaccgttggttataaagcccggcaaagcctaaacccaaggtcgaagtgctgcttctggcaccccacgccttgatgcgtatagcggtcggagcttcactattccctcgacctccacagcacgccgcacagttagctctcgagctctgtgtgatcctagtcgctccgccgccactcacggttgtcggagtaacacttccgcccaactaaacccacacaaacctcctatccctctaaccgttatgctgtctgttgacaccggctagagaagataccaaacctagtcgttatgatctagcatcgactaacacacaaccaaaccctagccctcctaaccatttatcgttttcttgttattttatggcttttattgaatttagttcttcgtctttcttagtagagtctattatcttttggatggcaacttgtgatgttttgaggatcggataattaggttgcctatcttggatttgtttgcgttggagcaaggcaagttattattcctcccctttgagcattattatcctatattctatatctctattattccatgcattagccattcatgattttaaatgcataacttgaacatatagtaaaccagatatatgctagattttgcttagccatgcctagttagattgcataaaatataatgaacttagattggaacagtatggtagaaatggttgattttcgggtggctagtactgttccaaccgacataagattgccaagtacatgtgaagaacgaactagtacgaccgcaattctagaatggggacagacttagcaaagtaggttatctagcaaaggtggtacctctgtacagtggttcttctttaagtccttgcgcaggaggcaaatttacgccgagcagagcgattataatatttaccgagacgcaggtaaatatattgattattgcgcactgtgtgtgtattgtgaaaacctggttgggatgacgggggtctctcaaccagttctctctaaagacctcgggaacgccagaactcctctcgctgctgataacgttacgttcagagcgcgtggggattatagttcatggaacaggtaccgttgatgttagtaaccgaaaagctttgccatgactaagctgatgaatattagcatgtcatggattgcgggtaaagcgtacatctactgcagtatgagtatctctgaaactattcgaatagccgtgctcacggatattgagcatcgggactcactatggcatcttggttagaaatataactccagattttattaaatattgttgcatttcaaaacattatagactttctccttctactttctcagctttctgcaaatagatctagctctactcaaatactattatttcatacattcatacttgaatataatagcttgctgagtacgttgtactcacccttactttaacccccttctttcagagttaatttggagttcttgccgaagccgagagttcaatcatataagttagttttcatttcaatctagttctcaagtctagattagttagatggtttaagtctatagcaatacactagagttggtttattctatagcttctgctgtattagttagccacaagtttgtaaatacccatatattttgtaataacatctcctttggagccttattcaaatgtatgcaatgaagatccagattgttgaacctgtatcaatctactgatccagggcttgatacagttaaacatgtcggtttccgaatcattagttttgggacccaacaaatagccatacccgtggttgtgggcgggtctaacaatgtctttcgtgattaggctcacacttctcaccataataaatgatgatataattgctaataatttgcttagctcctggtttggaatggtacatttctggtttggagatagatctgtacagccgggtatggttgttcagttttggttaggcatatgcagcatgggtgtgctgttcagtgttgattaatattaatgatttattattctactgttttacaattctcaaatgtttgctaaatgttgcttttgcaaatgagccctatattatgccattctttggtatccttgtgcacttgcatttttgttgtgtggcttgtagagtattccatgtactcaccttgcaataatcaatcaaacctcggttgaagaaaagttgtgaaggagaagacgtttggcttataccccagttgagctgcctatgggagtggagctgaagcttcactagattttatttttccgctgcagtttttttcgtggtggggactaagtacctcttatgtaggtatttattgctttagttattttgatgaatttgtatattaaattgtcagtttgtgtatctcggctgatttctgtatgaggattttatacacaaataagttccgaaattaccagtgaatttctggacgtgacatacagtatccaacccggcacggcactggccaacgagcttctgggttgtgccgggtcgaggccacagcccatgggttggtatggcatggcgtgtactgggtaggcatggcccagcacggcacgaaaggcccaagccaccagcccaccgcaggtacatgtccacagtgccgcacccagctgccaatgtgtgcgcgcggcacgctcgcacgcacccccgtgcgtccccgcctcccttcgcggctcacgcgggccgcccgccttcaccaattgcagcatgcgcgcatcttgcctcccgccctctcctcacaccgcccgcctgcgccaagccgctagtcgccacagccatgcctgccaatagtgctagtaggcgcccgcccgtctgcaccaatccagctgagaagatcgttggagcacaaaaaaaatataaaaaatgcgaaaaatatcagaaaagttctattttttttacaaataggacactcactatggagattttgaatcatccaaaccttccattttgtgctatcttttgttcttttgtgtgctagttcaattttcttatctaaacaaaatttgttcaaaatcaaaaatactttgtgaagtccacttttttttagcaaaactgcatgcacaaggtgtaaagaaggtaagaaagaattggagaatcccttttttattattcgtattttatgttatatgtatatttcttttgaaattccgtccatgtggttataatattcagcatggacgatccgagcagtctgtcattcaatttgggtgactttgaccctaattacctatcagcgtcatacataaataacgagtatgatgcctccggatcggttccaacaccgtcagttttggacgaggtaccggtggcttcagatggatcaggaactatgagcaggagtccatcgacgaacaccagctcaaagagatcacgaacttcggccgtttggcaacattttgatgaggtggctgtgacatgccctggtggaaggcaagtaacgtatgcgaaatgtaaaatatttaaacgcgacaaataatctgctacagaattttctactcctttatatctttaatttcaaaatcaaattcttggagtggaagaacccatctaattaatcgaagttttgcatctttcttagtgagcaggaattttagagcagcatgatcaatgtacacaataaccttagcaactaagtaagacttgatcaccccttattaccccaagtgcattttctatgcgagaaaccaaagaagtgcactcaataggaccggaaaacttgaaattttctaaccattggcgaatcatgtattacataagagaaacttttatctttctaaccatgtcaaataagataatcaacttatcttcacgaatgggtctaagattagctctaggaaataaagtcatgccaagccatttatacatgagtctaagagtaggattatggatgccatctaggccttctacataacttgtttttctcagagttggaagctgccttccaaaaattaattttgcaagttttgtcaaaacctaaaagcagactcaattctttaaaagagagatagaactccttacagaaaaaccaaaaagaaatgccatcatctacttctagcaaagtagcaaggtacataaaaaatttctaggtaagtaagcgagaacctggctcatctaccacagcaaatttctcccatcctatagccttccaaacaatacgaaaatcaacatccgtacctattttctgaagaagttctaggtcgtatgctggggtgtcagcaaatggccgatccttgagcatgtgatagccctgcatctcccggtctcctatgaggtcgaggttggagtcatcgagaagccttggcgaggtgtccacctcctccatggagacatcggtggaagagtgtgtactcgacttatcttggtgatgacttgaacatgagcttgatcccttcttgaacaaacccgtgattcttctcttcatgactgcagaaagagcaagagcacacactacaaggaaatcggcctagcaccacggcgccaaatcgttgcgatatgggtgttttcgttgcaatacagagaaatcacaacgaaaaaatttcattggcatgcgttgcaagtacctctgatgcgatagggtatcgcaacgagtgctcacgcgttgccataaaatcgggctgttgcaacgagacgaagcatggggaaagattgaagaagcaacgatatttagcgttcgagttgacattgcaatagttgttatcgcaacaacgttagatagttgcaaacaagaattatcacaacgtttcagtttcgttgcaatcctgtatattgcaacgatatttgcaagtggcaataacacgtacggtgttgcaatatgcttaaaggatatcacatcgacgtaggactcgtcgctatacaattaaaggatatcacaacaaagtaaatcgtcgctattcgcttgaaggatatcgcaacgaagttagagtcgttgccatacaccaaacgtgtatcgtaacaacatgtaacccgtggctgtacgctcgaaggatatcgcaactaagttcaacatgtaaccggtggctatacgctcgaaggatatcgcaactaagtatggattgtggctatatgcttctaggttatggcatcaacatgcatcccgtcgctataggctacaactatatcgcaacaaagtaaacccgtcgctataggattgaaccatatcgcaacgattggatagaaccatatcgcaacgaattaggagtcgtcgcatacggtaggatatagcaacgaagcgaaatatgtcataacaatgatttatttggttactgcaacatatatattgaaatttttgaggtagcaaactatcattagtcttacagcccattgaaataacgagtacataaatatgacgatacattgtaacttgtccattcatccattcaacaataaaatgtccataaaccctatattgttccataacccctctattctttgttcccatgtctaccaatctttgagtcttaatgtgccgcccgagtttgagtttcctgctgaatacaaacatggtttgaactgcatgatagcaataggttgggctggattgtgaaatggcaatgcaaaaattaactttcttaccagttgtttcctgttgcttgctcacgttagagcaccagatagtagttgtttagaggaaatgtatttcgctgctgtccctttcccaacattttcagtaagcatactctttgtaactttggaaactttagattttcctatagtagggtccacattttctttgtttgcagtgacatcgtgtcgggtcccaaaattaattacttggatccgactatgattaatgtatcaatccatggatcagtaaatattgatacatacaatataactggttcttcattgcatatgttaaagttttacaatactaagagttttacaattaggtactcacctaattgatcaactagaattaatacatagcggaagtttctatacattctaactagggaggtataacctttagggattttctaaattatcggggtcatcatagtaatagtcataggggtcctcctcttgacccatatctgaaaaaggggttatgagagcaaggatgagtattcacaatactcagcaagttatcatggaaatatgttatgcactggcatattgtagggttctttgcaaaaaaaaagtaataatcaatctggaagagttatagcaagaatttataaatatatagactttaaatttctaaccagtgtaccatatgagtcccaatactcaactccatgagtacggctattcgaatagtttcaaagatattctactgcagcagatgtacgctttacccgtagtccacgacttgctgataatcatcggctttagtcatggcccagtatcaagttattaacaactgtggcacctgttccatgaacttatatcctcatatgctctgaacgtattgttaacagcagcaagaggagttctggcgttctcgaggtatttaaggggaactgaccgtatgacaccacgtcatctcgatcagggtttagaaatataccatatagtttatacacgagtatcacaaaccatttacctgtacctggtaatggttaaaagttgctcttcacggctataaatgcctcctgcgcgagggcttaaaaataagaaccactatacggaggtgccatattgctaattaacataatatctaggtttgtccccattctagaaacagcggtcgtacccgttcgttcgacataagtacctggtaataactatatcgatcgagacggtactagccacccggaaatcatccaattctaacgtactgtcccaatctaagtataagatattttaaccagattataagcgaagtaagcaaggctaaattatctgggtttctatggttgaattgtgcatataaaatagaatattgaatagaaggctataaataaataatttgtaaaatataggcttaaatgatcaaaaggtatatggtaacttgccttgctcgatgtcctgaaattgattgctgttatctagtgtgttagaagaatcctcaagacctagggttagacatataaaattcaaattcaaaaggaattcaaataaaattcaaaaataagaaagatagggaaaataaaataaaatagaaaaataacaaaaggggtctcaaaagatagagaatgattttagaagaatattggtccaagtttcactggaattggatctatattttaaaagatatgggcttctaaagtttgaaaatcaattaaatgtgaaatggcactgtgtgcgggtcccacctgtcagtctctctctctctctcttctcttcttcaacctccagccgttccgcaaatgtggctggcagcgctggggtttgggattacggcggagctagaggggggaaggggttgtggctgaggaggggttaatttggtatgtggttgagctagcggctagggtggcggtggcatagttaagccgtgaaggtgatcggggtgatgtgagtcagacatggctcggggaggggttctagagcatctatgaggtacctagaagggtttgggcaacttgccgaccttcgacaaggtgcggagtatatctgccgactagcgcctccattggcggtggtcgagctcacgtcggcagcccagagggtggcatgataatgcaaaccgattgcaaaaatagaccctaggtagtatatagatggttaaaacggaagaactcaccgagatcggttgaaacgacggattgcggccggaaaaacttcgcggcgacgaagaacagagcagagcaggggcgacggtgctcggctcagtacggcgaggtaaaactcgacgcatggcttcggttagggctcactatactagaacatggttgatataaggtgttctaagggttatttagggtgaaggatggatggaggggtgtggagtcgatcgcgcacaaggtgttcgaccgacgggcgagagtggttgatgagatggattggtgaagcagagcttcggagttgtggagctatggttgttgatgatcgatgatgagcaaggaagggattggggtcctatttatagggccaggagaggtggatgagctcggacgccatcatcgccatggattaactcaaggattggatatggcaaaggtggcagaggctgtgagagggtggccaaggtcaatttgagtggcgggaggccacgtttgaatacttaccggcgaaggattggcttgaccgcgggtagaaacggctggcgacgtgttagcgccaatccgggcgcgacgcgcggtggcggcgagggttaaaacggccagcttaagggtgaatggtttgaattgtgagaggggaaaccaccgtctatcttcaattgaaccgtgcagcaagaattggcgcgattcatgctgggtagaataaaaatcggactcggcgacggctttggacgggagcgcacggcgtcaagattggtgcggcggtggtggtctgagggcgtcggacaggcgacgacgcgccaagacgatcgggcacgtgcaagcggccccaaagccgacgcgcggcgacacggcacgcggctaagtcggatgcccaggcatgcatgaatgggaggaagaagcaaagaaagccacggatttgagtgggatgtggtccccaaggatcaaatctagactttgcacaagattgggtagaggttgggctgtgttagttgggctagacattctgtcgagcacctagtgtgaaatgaacagtgaatttcaagaattttgaatatttttcctagagaagatttgaatttaaactatgaattttgaaaagtttcactagggtttggaatatagcaaatccttactaatattagggtaaattagtagggttctaaaggagtaacacttgaaccaattaagaatcaaataaatttttaaagcacactaaattaatcaaaagccagcatgatgcagtcaaattttagtttaaaatttgaggatgttacaaacctacctcccttaaagatatcttgtcccgagatttgcttaggagtcttcgaaaagatacgggaattccaattgtaaataatcttcccgttcccaagttgcctcatcctctgtatgatgattccattgaactttaaacatttttattgccttagtacgagttgttctctgtgtttcattcaaaattctaataggatattgtggataggttaaatctttattcaattcaatagtacttattcctctggaatacgtaaacatttctttaattgtgaaatatggaatgtaggatgtacatcagatagataatttggtaaagccaattgataggctacttctccatgtttagcaattatttgatatggtccaatataacgaggggctagttttccttttactttaaatctttttatccctcgtaaaggtgaaacctttagataaacataatcaccaatgtcaaaagttaactctctccgtctagagtctgcataactcttttgtcgagattgagctactttgagtctgtctctaataagtcgaactttttcttcagcttcctttaaaaggtccgttccaaatatacttctttctccgatttctgtccatatcaatggtgtttgacatttccttccatataaggattcatgtggtgacatttttaaactagcttgataactattgttatatgaaaattctgcgtaaggtaaacatttgtcccaactagcagcaaaatctagagcacaggctcttaacatatcttttaatatctgatttagtctttctgtttgtcctccggtttgcagatgaaatgctatactaaaatccaaataacttcccaattcataatgtagtttctgccaaaagtgtgaagtaaattgggtaccacgatcggaaataattctttttggtactccatgtaaacatactatccttgtcatataaagttctacgagttgtgctccagtataggttgttttcacaggaatgaatcgtgcagtctttgtaaatctatcaatgattacccatatagaatcatatctagtagaagttttgggtagtccagtgataaaatccattcctatttcatcccatttccattcaggtatttgtaaagggtgtaataatcctgtaggcttttggtgttctgctttaacttgttgacaaacataacataatgcaacatattctgcaatatgtcgtttcatatttggccaccagtataagtctttgtactacctgggtgtaaagagtaggctgagtcaggtgcttcttttagtattaccttccttaagattcctgattgtggtacgataattctatttccgtaccataatattccttccaggtcttcggtaatatctgtagcctttcctcgcaccatccgttccttaaaagtttgtattttagaatcctccttctgatgttcttttatttgatccatcaaggtaggttttaactccaaagtgttcaattctccatacttaataatacccagatttagtctaagcatttatgcttgtaattgttctgacattatttcttgttgtaaattgcaataaactttttgacttaaagcatcggcaaccacgttagcttttcctggatggtatagaatttccaaattataatccttaattaattctaaccatcttctttgccgaagattaagatctatctgagtaaaaatatatttcaaactcttatgatcgatgtagattttacaatgatttccaatcaagtagtgtcgccaaatcttcaatgcgtgtactactgctgctaactccaaatcatgagttgggtaattttcttcatgaggtcttagttgtcttgatgcataagctactactttaccttcttgcataaggacacatcctaatccttgtcgagaggcatcacaatagatctcaaaatctttttggatgtctggcaagattaatactggcgtagtagtaagcttatgtttcaatctttgaaaactatttctgacattctggtgtccattcaaatttcctgtccttcttaagtaatctggtcatgggttttgcaatagtagagaaatctttaatacaccttcgataatatccggcaagtcctaagaaactccttatctcaggtactgaggttggtgttttccattccattacagctttaaacttttccggatccacggcaactccttccttagttattatatgtcctagaaatgcaacttgatctagccaaaattcacatttactgaatttggcatataactgatgttgccttaacttctccaatactaatcgtaggtgttgtttatgctcttccttgctccttttaattgatcaaatagaccgtcgattcttggtaagggatatttatttttaatagttacttcatttagagctcggtaatctacacacattcttaaacttccatctttcttctttacgaatagtacaggtgatgaaccctgagttcctctcgacactcaaggctgttgttggttcgatctttcggtgagttgtgataactacgatttgggagaaacgttgacgatccgactacaaccgtacgagacgttgtgttgcgccttagcgatcaatacacctctccgtgggttgttgatcttgccggtgcagatcaaccctattcctgcaagcaaatcgaagaaacaagcaagaacaagataaaagcaatctgatattgcaaataggaatttaatacaaatgataagttggggttccgaagaacaagcagacggacggtctagctgacacgcgcgctgcaagcaagtagcaatggctaaactttaatatatcaaaacccaataaaccctaaaggggtacctagctatatataggggtgggaggacgacctagggatgcctaggggcgtgctctacctggttggggcacaccccacatgggccccacctgggccggggtcccaaatgaagttacaagcccataggcccattataggtgacgcagcaccttgtgcctgtgatttcagccacacgagatggaattcggatatgaggctagatccgttggaaagagggctccgagagtattctatcaagtactcacgggctgaaaatggaggtcgtatgcagattcggcgaccgtttgaagtcagtactatagcaagtggccgaatcggattccagcacttggacgacgtgatctcgatatcttcttgttcatccatgatgtgaacaatggttgcattcgtggtagttatggtcacatcatcctccccttcttcacggaaaaccatcctcggtttttccatatggtgctatttgcgtagtccatttacaacaacctgtttcttccaatcaaaacaaggcaaagttgagacaatttggttagcaataacatttctctctagcttgtatgttttatccacatgtacaggaagttctaaatccgagcagatgtaaactctatgcacaaaatatattccaagatcattatattcgccaaagatgtgaaatataatattggttggatatggcaaatcagacttagcaaataatttctccttcaaattatcgagctcacaaaaatcatcaaactgaacatagcccaaagtatttaaagaagatctcaattcacgcttctctacttcattagcaatgtgaacaacatgcttaaaatcagcgcagtatgaattaacagtaggaatagcatgttcattcactagttgtggcatggatataagtgaagcattatcacataactcttctttatcacaaggaactgcaaacaaatcaacttgtgacaaaggaatctcagcagttggttccactaatggttgctctgctatagtatgaaaagtggacaaattcaattcattaacaacacactcaccttgattaatttcagcaccattaagttttacctttgatgccctcttcagatgatggaggtgcctcgactttgagtgtgaacaatggaactggcggctctttcatgtctctctcctccttttcatgattatgcacttcctgcaaatggttagtattagaagacaaaaacatagcatgttgcttcttcatgtcctcctctattttactttcagcattgcaagcaagttgtaacaaatgagaaagaaatgtatatctttgacaatcaagcatgtcctgaatttctttgttaagcccacgtaaaaacctcaattctttagtttcttcgcattcatctaaaccacaacgtaataaacaaacttgcatatcatgagagtatgaagtaacagttctggtatcttgttttaaacattgcagtttgttgaacaaaatgtcagcataatacatgggaacataaacatctctgaaatatcgtttcaggtctttccatgattgtggtattttgttatgcctacaaagatgtttccaatcattagaagcatgtttaattaaaacactagaggaacacataaccttttgtttatcagacaagacatgcttttgaaattcactatcaaccgctagctcccaattaatgtaagcatgaggatcatagtttccctcgaaataaggcagtgcagatttgatcttacctagaacatcatcacttacctcataatggtcatattgatcactcctcatgtctcgacgaagatgtcgatgttgagcacagctatccccaattatcttgcgtatccctgccattgttagtagaaaacaaaaaacatacacaaaaatatgcgcgttcctattaactactaggtagtggcagctcaaaaatcacacacactcaagcttttaaccaagctcttccaagatcttaccattgaaagtggaatggtgacatacactgactcaaccaagcaccccaatggaagttggatgtatcgatgccttggcaaatacttgcggtacggctgtaatcaaatctgtggagctctgggtaggcttatatatgtagcaaaggaatagcaaatgctcaactcagataatgcaaagttgaataattgttcaaagtcaagtaccgtgctggtcctaggctagaacgtactagagacgcgagcctagacacaaatgatagcacaagatagcactaggaacaactcatgcacaactctgatatatgaagttcaactcaaacataacagtattttctcttttctttctttcttctttcttcttttcttttttttctttccttttcttttctgttttttttggtgcggattttttttcttttcttttttatgcacctttctgcctttttttctcacttttatcttgatttttttaacaaaaactgactcaaggaccttaatgtaaggttacagggactcaaacgtaaatataaaatctatagggactcaaatgtaaaagtctaaacccaaaattaaaattatacaaaaatggaatgctgaatttatgccggttccatttttccaaacagatctcgaaaccgacaccaaacaaaaattcaccaaggtgtttgacacaactcagaaccgtgaaagggagggagggagtcggactcggccaaaggggcgagtgggagtcggccaggaggtggagtggatggcagtcgaatttggtgtatgggataaaaaggaaactgatttttaaccaatccaatctactatatctttccaaaacaaacttgactacttccaaaatcagatatggtaattcaccttcctcctctcatgcacgacacaggcacggccaaaatagaagaacgcccagtcagcaaacccaagatgcaactcaacaactgcaaaaccaaccggtaaaaacttttgaaaactacaaaaatagaatcgtggcagcgagccgattcagttttcgtaggtcccgacgacaacagatacacggaggtgacgacgactgtggtacaaaacgtgaccagaactcgaaactctacacgaactagacgctaacaccagcaactcgactcgacgatgtaacacaaaactcaacaaagcaaaaactgataaaaacaatgcaatggcacaatatggctaggtacaggacaatttttttatggcaattttctggttatgggtagataaaactcaccgagcaacgaaagctctgataccacctgatgaaccctgagttcctctcgacactcaaggctgttgttggcccgatctttcggtgagttgtgacaactacgatttgggagaaacattgacgatccgactacaaccgtacgagacgttgtgttgcgccttagcgatcgatacacctctccgtggattgttgatcttgccggtgcagatcaaccctattcctgcaagcaaatcgaagaaacaagcaagaacaagataaaagcaatctgatgttgcaaataggaatttaatacaaatgataagttggggttccgaagaacaagcagacggacggtctagccgacacgcgcgctgcaagcaagtagcaatggctaaactttaatatatcaaaacccaataaaccctgaaggggtacctagctgtatataggggtgggaggatgacctaggggtgcctacgggcatgctccacctggttggggcgcatcccacatgggccccacctgggccggggtcccaaatgaagttacaagcccataggcccattataggtgacgcagcaccttgtgcctatgatttcggccacacgagatggaattcggagatgaggctgtatccgttggaaagagggctccgagagctttccatcaagtactcacgggccgaaaacggaggtcgtatgcagattcagcgaccgtttgaagtcagtagtgtagtaggtggccgaatcggattccagcacttggatgatgtgatctcgatatcttcttgttcatccatgatgtgagcaatggttacctccgtggtagtcatggtcacatcaacatgagttccccaaagtgaagaactttgtcgaataaagcctttttcttgtagctcagctatctgtttcttcaattcttccaattcattaattggcatcctataaggtctttttgatataggtgccgttccaggaagtaactctataataaattctatttcccgatttggaggtaaggtacttagatcttaaggaaatacatccaaatattcttgcaccactggaacttcttcttttggtataagcatacaaatgtctgtcatatgatattccatagatagattgggtttaactattatctttgtattaattccttgttcatcagtaaggataacctctcttgttgcatgattgattagtccattattcttggctaaccaatccatgcccaaaatgatatctatagtttgggtaggtagtacgatcaaatcaattaaaaatatttgatctcctaatttaatcggaacatttctacaaatagatgatactaatacagttcctctaggtgaatatattatcatagccttgtttaaattatctttaggtaaagactgattccaactggcttttgcagataaaaaggaatgagaggcaccagaatcaaatagaatagtaactggtttagagtttatggtgaacatacccatcaatatattaggatcttgttgagcttgttctgctttaatatgatgtacttgaccacgtccaagattaggtccactcttaataattggaggatttttctttataaaacctgtagtagatggtttctgataagaagtttggccacccatattttgacgattagggcatagtcttgcaaaatgtccaaacttcccacaaacatagcatggagagtcttccatccttaatccaggtcttgatagtattggtggcatgcccggccttgcattggatagagatggcttaaatggataaggcctccgaacttgtagtgaacttctagttggtgattgtcgttgtaaattcattcttctcttacggaatccttccaccattctacgatcattttctagcctaaccactttattgactaggctttgaaaactttcatgatcttgactaatcattggtcctcgaagttcatcacgtaatccttctataaacctttcaatcctctctttctcatcttgaatgtctgaagcaacatatcacatatcgagaaagctgtgtaaatttattcaaatatttttgtactgtcataaaaccttgtcttaatcctcgaaattcattctttttcatcctgatcacagctgtaggtataaaagcatttctgaaagctatggtaaattccatccatgtaatgatatgggtaggatcttctatagaagcttgatatgcttcccaccattcattggctggtccttctagttgatgggttgcaaaggttaccttctcttgttcgtttgttctgaccaaggttagtttcttttcaatagcccttagccagtcttcggcatccataggttctttggattttgagaaaactggtggtttaatcctcagaaattctgcatgtgcactataacctttatttccttgattttttgctatgtcctgtaataattgagtttgtcttgccataacttctaccaaggtagtaggatttggtgaagggatttctcccgtatctccttgacccgtgctgccattacccgtattcatctagaaaatgggtaattgatatcttctcaaaggggagtcaacatccataattaaacatagattttatttatgaacaacattgtacatggtgtatgctacaaaagaacaaaccaagaaaaaccacaaccgcaaaagaaggggtaatcacacatagaagttagagaggagtaggatcactaacaattctacacttaagatctctaactatctataacttctattcatcaagccatccaccactgccttccgcgggattagcaaataacgatgcaggtgcgaagtgtgaaaattcatgaggagatgcagaagttgatgcagtaatattgggggcagagcaggagtaagggtcttcattattttcttgatcatcagcatgtatagaaagatgttcctgtgtctcaagctctcattcttctggatcttcctcttcgtctggagattcagtccaaattggggcagtatttaagtcattgatatcaaatacccgatttggcctgagtacttcaggttcttggctaggttcactgatatcgatagctgaatgcatttcttctgcttcatcatcagaataaataggatacaacggtggtggtgatggtggtaaaccttgtaaaactccttcaccattatcctgaggatgtggttcatcttcacgtactggtgagatatgtccttccataccatcatcatcatcatcgtcatcactacccatatttgggatttggtgaagacagaaggctgctcttgcaacacaaatattgaggatagaattatgtttttctctttcctcatataattcgtgaagtatacgatatttgtgtttgagaacagcttctctgcgttcagcttcctccaaacgtttacgttgtacatccatgtgttctagggcttcttcatacatgtcatctgcagcttccatccagatagacatagttgcttttactggttgttcatgataatccacgtcttgaagagtacagtaatcttcgcccggctttcgcataggatggtaagaatagcgagagtgttgcagcttatcttgatagatatgattaagacgtagaaaagcctccctggacacatcatataatgcagctcatacggtatcccacctatgacgtgttcggaagtaatacatatcacgttcacctcttgggggattgatcttcacagtcatatcacactcccaacgttctccccattgataggcatgtgaatagaattccggcttctcatttatcttcagcttagtcatcaagctgattagttgatcagtgtagtcattatcatggatagtaatcgcaatttctataactttttgctcatgcccttctgccattgtcctaaaatacacagatgacattataatgcatgctcgtggattaaatctaccccccttaaaaaaataaggttgaggtaaattcaaacttaacttagttagtagtccttaaggttcatcctatagtcaaaacatatgctctgataccagtcctctcgggtcccaaaattaattacttggatccgactatgattaatgtatcaatccccggatcagtaaatattgatacatacaatataactgcttcttcattacatacgttaaagtttcacaatactaagggttttacaataataggtactcaccaaattgatcaactagaattaatacatagcggaagtttctatacattctgactagggaggtataacctttagggattttctaaattatcggggtcatcctagtaatagccataggggttctcctcttgactcataactgaaaaaggggttataagagcaaggatgagtattcacaatactcagcaagttatcatggaaatatgttatgcactggcatatagtagggttctttgcaaaaagcagtaataaacaatctggaagagttatagcaagaatttataaatatatagactttaaatttctaaccagtgtaccatatgagtcccggtactcaactccatgagtacggctattcgaatagtttcaaagatattctactgcagcagatgtacgctttacccgcagtccacgacttgctgataatcatcggctttagtcatggcccagtattaagttattaacaattgtggcacctgttccatgaacttatatcctcatatgctctaaacgtattgttaacagcagcaagaggagttctggcgttcgcgaggtatttaaggggaactgatcatatgacaccacgtcatctcgatcaaggtttagaaatataccacatagtttacactcgggtatcacaaaccatttacctgtacatggtaatggttaaaagtagcccttcgcggctataaatgcctcctgcgcgagggcttaaaaataagaaccactatacggaggtgccatattgctaattaacataataactaggtctgtccccattctagaaacagcggtcgtacccgtttgttcgacataagtacctggtaataactatatcaatcgagacggtactagccacccggaaatcatccaattctaacgtactgtcccaatctaagtataagatattttaaccagattataagtgaagtaatcaaggctcaattatctgggtttctatggttgaattgtgcatataaaatagaatattgaatagaaggctataaataaataatttgtaaaatataggcttaaatgatcaaaaggtatatggtaacttgccttgctcgatgtcctgaaattgattgctattatctagtgtgttagaagaatcctcaagacctagggttagacatataaaattcaaattcaaaaggaattcaaataaaatccaaaaataagaaagatagggaaaataaaataaaatagaaaaataacaaaaggggtctcaaaagatagagaatgattttagaagaatattggtccaagttttactggaattagatctatattttaaaagatatgtgcttctaaagtttgaaaatcaattaaatgtgaaatggcacggtgtgcgggtcccacctatcaatctctctctctctctcttctcttcttcaacctccagccgttccccaaatgtggctggcggcgctagggtttgggattacggcggcgctagagggggaaaggggttgcggccgaggaggggagggagctagggttctccggcgacggcaagcggcggcggaggggttaatttggtatgtggttgagctagcggctagggcggcgatggcatagttaagccgtgaaggtgatcggggtgatgtgagtcagacatggctcggggaggggttctagagcatctatgaggtacctagaagggtttgggcagcttgccgaccttcggcaaggtgcggagtatatccgccgacaagcgcctccattggcggcggtcgagctcatgtcggcagcccagaggatggcatgatagtgcaaaccgattgcaaaaatagactttaggtagtatatagatggttaaaacggaagaactcaccgagatcggttgaaacgacggattgcggccggaaaaacattgcggcgacgaagaacagagcagagcaggggcgacggtgctcggctcggtacggcgaggtaaaacttgatgcagggcttcggttagggctcactatactagaacctggtcgatataaggtgttctaagggttatttagggtggatggatggacgggcgtggagtcgatcgcgcacaaggtgttcgaccgacgggcgagagtggttgatgagatagattggtgaagcagagcttcggagttgtggggctatggttgttgatgatcgatgatgaacaaggaagggattagggtcctatttatagggccaggagaggtggatgagctcggacgccatcatcgccatggatgagctcaaggattggatatggcaaaggtggcagaggctgtgatagggtggccaaggtcaatttgagtggcgggaggccacgtttgaatacttaccggcgaaggattggcttgaccccgggtagaaacggctggtgacgtgttagcgccaatccgggcgcgacgcgcggcggcggcgagggttaaaacggccggcttggaggtgaatggtgagaggggaaacgaccgtctatcttcaattcaaccgtgcagcaagaattggcgcgattcaccccgggtagaatcaagatcggactcggtggcggctttggatgggagcgcacggcgtcaagcggcgatttcttgcggcggaggtcgtcccggctttgtcgtcgtcaagattggtgcggcggtggcggtctgagggcgtcggacgagcgactacgcgccaagacgatcgggcacgcgcaagcggccccaaagccgacgcgcggcgacacggcgcgtggctatgttggatgcccgggcggcgcgcgtgaaggggaggaagaagcaaagaaagccacggatttgagtgggatgtggtccccaaggatcaaatctagactttgcacaagattgggtagaggttgggctgtgttagttgggctagacattctgtcgagcacctagtgtgaaatgaacagtgaatttcaagaattttgaatatttttcctagagaagatttgaatttaaactatgaattttgaaaggtttcactagggtttggaatatagcaaatccttactaatattagggtaaattagtaaggttctaaagaagtaacacttgaaccaattaagaatcaaataaatttttagagcacactaaattaatcaaaagccagcatgatgcagtcaaattttgtttaaaatttgaggattctacacatcgcttgttgggatattctgtttcgtaaagtttgttacgcaatatgtaattatatattatgactggaatgattggtctagttcattacctgtttcgtaagtgcacgattttctttctctgttgtgacatcactttttaggtcaatatgtgttatgaattatgctcaatattgttagatgtaatcatgtaattcaatgcacagtgatgggtagaaatcttgttcaaggtcgttacctggattgtaggatgctctttttctttgttcccagcatttcctgtaaacaaactctttgcaactttggaaactgtatctttgcatgtagtagggttcacattttcttgggttgcagtgacatggcttgttgggatattctgttttttaaagtttgttaaacaatgacatatgtaattcaatattatgattggtatgattggtctagttcgttacctgcttcgtagttggccgattttctttctcttatgtgataacactttttgggtcaatctgtgttatgaagtatgttgaacattgttagatgtaatcatgtaattcaatgttagatgtagttaaatgcacaaaaccatgatgactgaattatttgttcaattctttacctcattcgttgtttctggtgcgtgcactggtctctcttgagtgtgcagggctgttgcatcagtataattcacattgctccactctgcttctttgttggaagtgtttgtgtaacaccccaggtaaccacgtaccaagagtgccacaccaaaaaacactcaaaccactaacttccaaaattattagaaatttcggcagagtcttccctgtaaatacggacatccacgacatgcaattataagttaaactaataacaatatcattcccataatacgatccatccttataatccatggggaagaaactattagaaatctaaaagattattataagaccaaaccaggatataattttaagtgtcattatggatctaagcaatatagtttgatagtgagcaagtagatgtgcatataaggatgttacttcccgcccttgcatgccggtctcaatgcgtacctaaaaccaaataaaacacaagagtgagtataaaaatactcagcaagtacaatatggaactagaaaacacatatacacatcgctgacaataaagcatgaacagaagcctttctttctttgataggaaacacatttccaaacaccaagtcaaaaaagatagtagttcccatcccgggcaggcatgaattgaaatagtagttttcatcccggacaatagtaaatacatcctagcatttgccggcaaagccaagtaagcgtgatcagcgcttacccacaggaacttgaataaataaccaaattgcactcccatgactacgcatggtacttgaataattgaaaccggaatcaaagaaccaaatggaaacacgtccatggcaagcagggaacttgaattatttaagcagaactagaatccagaatattaaaacaagaataacatcgtacacataagatcaacttgaaatctaaatagcgtgaacaacaatatgaacataagcaattacttatcacgttgaaatatatcagaaataaatagatagagtaacaatccatgaatcacacaattagttcgtcatgcatttgcctcgaacgaacggttggtatcatgcacgatatgatggaccaccacctaatcataaacaaaaccttagcaaacatattcaaacatgcatataaaacaatgaaaaaggtgaacctactgccccatcccatcaaatctcaataacaaggaacgccgcttggactatacacaagactgctgcttcaaacctttatatcttgaaatatgaaaaggctatgactgaaaatatatacattttgaaaatctacagaacaatacctacaactttcatgtagaaagcatatttttattctgccatttaaatggtctaatttgcgcttgaaagcaggcttcagaatctgtccagaatttcagactgtccacactaaaacaactataactagagttctactcgcccaatcagggtgtactttaccaatatagaaagataagaaaatcctctacaactttgtctataggcggcctggctgattccactgtttaacctctccaaaaacagttcaatctactactatccagattatgacacaaaaacaacagtcatactaaaaaagttatatctcctaaaccacttgagataaaatcgctccctttggtcagaagatatatccaaacattatctacaacaccatagttataaacttttgcataaaataacatttagagccccgaaacatcgaaacactgaagcactgcaaatctacccacatgcagaactgcaacaaaccaaaccgcaactacccaaactccttctctagccttccctaaccatgaattaatgcactaaagccatgctagaacaactgatacaacaaggggataagcctcacctagggtttctttagtgaacttgtgaggagacaatcggggagactccggtctaacccctccttctactcctctcctccttctcgttccgtttttctacttctcttcttgatccaagctatgaaggtggagatctagggagaggaatttgctgtagatgggagagatgcaaacacaggaggaggggaggaatgaggcgccggccagggagaggggtggcggcactatgaggggaggtgggattcggttcccctctctctagcttttatgggagaactaatgggctgggtttatgggccttctcatgttggcccacttctaaagatatttttcttttatttatttctgttaacatctttattttaacaagtcaacccaaactaaaaaacctaaatatcttttaatatacggggtattacagtttgaatcaatggtagccttggtattaaaaaaatgtctggtcagatattagcagtaatatttgtatcatcaatcactaaggatacatcttctccagactctcaagaagcatgacataactattcaattcattaccaattctctatgattttaaaatgtattatgaacagagcatgtacacatattaaaaaatgcagacaatatgaatgtcttacctcctgtgtcaatggttgtttactctgctccgacatcactttttgaatctccttcaccaattcatccttgagataggctttaagttattcctgattttcgtgttccttgcaagttcatcctttaatatctgaacctcacgagcttgttcttcaactatctcatgaagttggtgttttgtttgtttctcaaaatatccgtgtccacgtttctatgttgattttgttcctgttgtttccttgtatgtgttctggaaaacatcgtcttcttgacccccaaatgtgacacttcttgatccttcatcacccgcctcatctgaatctgtcatagccaacttccttgttgtattattctgatgcaaagaaaaaaaatgtaagacatcgatttaggtaatgttgcgactcaaataatatcttgttatgtgcttgaaattacaactcatgtaaatactttcagacatcttatttgaccattttccgtgcctcgtgtgagtagacttccaaagttccagaacacctggctcagcaccagtttcttcatctctctacgaatgaaatattttgcatcattagtattcatttgattattattttgttagttcatctgaatgtaaaacatattcacctgttcccaactacactgagagaatggtttggaacccataagatgcatggttttcatttgttgcctattcgtagagttctgggtgctgaccttctgcacagataagacacgcaacgttcagcaattagcaagtacaatatgcacaaacgcttgtgttattaattgtacaaaaaagtgcctcaccttaaattttttggatccaaagtacatgatcagtcttgaggcttatttttcattctgtcttcataactgtcatatgccctgtacgtagcactaaaagtggatcaccatcctttgtatcgttctttggcaatcttccataccatctgcctagaatcatcattctgcgggatgtcccatgaattatgttggaaacattacattcaattacattgagaacataggtgcaaattgaaaaattcatttgcataacagatagaaaagaataaagatgtggcatatacataccattacacaatctgcaattgaattcttgacatcttgcttcacatctttccactttctaacaccaattagtggagtccttaaccttgtgtacattaccacttcatccacaaatgtacgcctattgtctccacatggaccacccagttttgctgaaaattcaactttaagtttacgagaagatgacttcaacctcttggtaccatggccaacttgcttgccatctacttacaatcacgtgagaaaagttcatacaaaggattaagtgttgattcaattgcagcaatgaaagtaaaaatttaaagaaatatgaactgaatataaccttgtgtatgctttgttattttcctagcatgagatggccattctatttctggcatgtcactgctgccattgatctcgacaccatctgatgtattcttattattggtaatataagctttgtaagccactgccaaaaaatgtacacatgtgcgctttgtagattataaaaagtaattagaaataataagtactccaaagggaaaaatacatactaatttgtttcagaagcccttgatcccttaaccattcagtgtaagttttaatggtttcgtccctgtaatcatcgtatagatctgcgagataccaacaaaattatgtaagtaaataatacaggtacagatatgcacaacttgctactgcaatacaactagcatatataccatgaacagtttcatcatcctcttggattgatgcaagccattctttgtatgcatcaacctcatcatcatcatcattatcatcgtcacactcttgctcccttggtcactttagaggtgtaatgttgacatgtcgttcttttacttgttgtgtagccagtactaacctgactttcttttctgaagctacgtccctaatcatgcattctgcatctcttctgtaatcaattgcctcaaggcttgctatatcatttccacatctcttcttgtagtacaagtagtcgcgcaagccaaaccctagctactcttatcaaagattcaaatcatatgttacccttgtcaacattggctttgacccagcgctctttggaccccttgcagttgatccatacctcccatatctcacctgtcaacttgatgctatttgtgtggaaaacaaccattatgataatatagtaggaatatcaaacattgatttacatgaaaaaaatatattcagtacacttctagtattcttatatagtaacataaacaaacgagaaaaaacaactctgttttataacatcaaaaaatgaaaatgtcaattaggcgcaaaatgcagccctctgtattatcaaatttgctgacctcatttagtacacactagggcaatgtttggcaaatgagaaagggaaataatttcacacccatctttaaatcctaactatacattctcaatcttcaatttaatcctaacccatcattgattttcccaatcccaatccaatcccatatatcccattatctaatcacaccctaggttaatatgaacatacgaagatgagcacatgaaagatgcgcactagttggaaaaaatactcacctttggcttaacgggtcattcaaatcctcttcttcaaaaacgacgtcggcatcctcgactattgccgtacgaccaagtatacagagacggtccacaggtcaacggaagcataccccgtgtgccaaccgaggcgagtggccgacaaacggactccactagacaccatgcgggctgcacacgtggaaacaacgcggctaccgagcgaacaaacaaccacggtcaccacacgcacccacaaacgactaccgacaccggtacacgggtaccggggtcgacaaacacacaacgggcatggggcgacatcgaaaggacgagaacagggcagcgagaggatggatccttaccaccacgcgatgaggcatgggaacgacgatgatgaacggcgcggcggagacggatgggaacgacggagacgaacggacgacacttcggcggcgatccttggatgaaggcaggacgaggccgacgcagggcttgatgacacggagccgatgacgaagacaacgccgaggctgcagcagacttgacgaaacgcgggcgacgaacgaacgcggcttgacgaagggacgaacgccacgacgaccaagaacgatggcaggacgacaaccggaactggcgaggaggcgacgagggcagctggcagcagctgcacggatgcgaggatgacgcggaacacgccgctgcgatgacgacgatggaggcggcaccgcgggatgacgagccggcaaggatgaacggtgaagacgatgacggacaccggcggtggggttcggatggaggggaggtgatgccgaggacgacgctcgctgctgcgatgccactgttgcctgcggggatgcacttctggaggtctccgagggaaacggagagcaggccggggaaggggaggcgactgtgacgccgggggaggcgacggcacggccggccggcgtgctgacgcggtggcaggggcggctggagttggccggcggcgtaggagagagaggaggtcggcgacggtgtggctagggagctcgggaaggtggaaaaccgaaggaaagggggactagggctccgttttataggcaatggaggggagtgccgaccacaggaggggacgggaacgacgccggagaacgtggccagcggcatcaatggcggtcaaagaagagggattaaatcctagtgattgggggcgggattaaaaggggaaagttgggggaaataatgaggaagggatggggattctgtttttgcaatttatttggccggaacttgcgcagtggagcgggatcgaaggatggcggcgctagggttcaggagagggacagagaggagcggccggctggaggttgaagacgaccgggtgggtggacccaccggtcaggcgcgaggcgcgcacgtgcgccgcgcgtgcagaggggcgcgaggggaggagggaggcggcctggggtggctggtcggctgggccggcacagggcaggggtggcccaagcggaagaggagggaagaggtggaccgggaggaggaggggaggcctgggagaaagaggggatgaaaaagagagggggggaagagagacttcggccgcgggccgagggagagaggaaaggaactttgggacggacttggcccaaaggaaaaggaggattatgtttagtttcctttttaataaactttcttaattgttgttgttgcttaataattgttcttgttgcacacaagcaaagctacaaccttataaagaagcaataacaatacataaaaagaaagcacacggttctttaggttataagaaacattaggagacttgaatgggtcaattcagggttcgtatgatcaagatatgatcatccgaagtttaatgctgttattgcaggggcgtgagcagtagggcaaggacaaggcgagtacatacactccgtgcacgacgccatctgcgggactgcccaaagccgtctcttttcgggtgccttcccagctagcgagcaagcgaccagctgcatccggagcttctgcggcaccaaaaccatctccaccatgataagcagagtcaggtaaaaattcttcgcaggtacccgccaagagtgcctcatctgttgcctcgacgggacgcattcagtgccaccgttgccaagggtttgggcatgtgtagaaagattgccctagtcaacaggcatatgttgctacagaagatggctacatcaccacctccaacgtggaagaggaagaggaagaaggagaagttgaggatgaggacggcgaagtctttggtcgtgatgacacaacggcctataggaccatcattgtaaagcgggtgctcagcacgcaggtacagcagcctgagaggttgcaacgccataatttgttccagattttcttcatcatcaacaaccgtcgtgcacgtgtgatcattgatggaggtagctgcaacaacttggtgagttctgatttggtcaagaagcttggcttgaccgcacgtacacatccacatccttaccatattcagtggttaaacgtttccggaagagcaaaggtaacacaggtttgcagggtttcgttttctattggctcatatgcatattctgttgattgtgatgtggttccaatgcaagcttgttcacttttgttgagtcgtccttgggaacatgataattatgctacacacaatggtaggagtaataaatacacttttgtgcataatgaaaagaaaattacttcgctacctttgacccctgctgaaattgtagaagctgataaagagcgagttgctagtttgaaacttgatgaatctgaaaatcagcaagttgttaaatctgtttttccacctaaaacggataagctttcacctagctctaaggttgagggaattaagttgaagggtggtgttatgcttgcaacaaaatgtgacattgctgaaatttcagatgatgatatttgctattccttgatatgcaaacaagccttggtatctctagatgatattggtagttcgatacctcctgttgttactaaccttttgcaggagtatgaggatgtttttccagctgagatacccccgggattgccacctatgagagggatagagcgtcaaattgatttgattccaggagcatcattgccaaaccgtgctgcttatcgaaccaacccaaaggagactaaggaaattcagcggcaagttcaagatcttttggaccgcgggtatgtacgtcaaagccttagtccttgtgcaattcctgtaattttggttcctaggaaagatggttcttggcgaatgtgtgttgattgtagagccattaataatattattattcgatatcgtcatcctatttgaatgtgtgttgaattattccacgtatgataaggaattgtatgctcttgtacgttctttagagacgtggcgtcattatttgtggcctaaagaatttgttattcactccgatcatgaatcgcttaaatatcttcgctcacaaaataatttcaatcgtagacatgctaaatgggttgaatttattgaatcttttccttatgttatcaaacataagaaagggaaagataatgtgattgcagatgctttgtctaggcgctatactttcttgtcccaacttgattgtcagatttttggacttgaatcaattaaagaacaatatgtgcttgatcctgattttaatgaagtgatgttgaattgcaaagagggacgtacttggaacaaatttgtgatcaatggtggatttgtttatagagctaaccatctatgcattccagttggttccattcgtctttcgttgatacaggaagcgcatggaggagggttgatgggacattttggagctaagaagacgaaagatgttttggctttgcatttcttttggccaaggatgagaaaagatgttgagaggttcgtggcatgttgcaccacttgtcagaaagctaagtctcatttgaatccacatggtttgtatatgcctcttcctgtaccttctattccttaggcagatatttctatggactttgttttgggaatgcctagaactaagagggggagggatagcacttttgttgtggtagaccgtttttctaagatggcacatttcataccatgccataaaagtgatgatgttgttcatattgctgatctgtttttccatgagattgttcgcttacatggtatggcttctactattgttttagatcgtgatgcaaaattcttaagtcattttttccgcacaccatggaacaagttgggtacaaagctattgttttctacaacatgtcacccacaaacagatggacaaacagaggtagtcaaccgtactttgggtaccatgttgagggctattttgaagaaaaaattgaagatgtcggaagaatgtttgcctcatgtggagtttgcgtacaatcgggcaacacgttctactaccaaggtaagtccttttcagatagtgtatggtttcaaccctcgtgctcctattgatatcttgcctttacctactagtgagagggttcataatgatgcaaaggcacgtgctgaatttattttgaaaatgcatgagacaaccaagcacacaattgaaaagatgactgaaaagcatagaattgctggtagtaaagataggcaagaagttaagcttgaaccgagtgatttagtttggttgcatttgagaaaggatagatttccagaattgagaaagtctaagttgatgcctcatgctgatggtcctttcaaaattattgagaagattaatgataatgcatataaacttgagttgcctcccgagtttggggttagtcccacgtttaacatttcagatttgaagccatacttgggagaagaggatgagcttgagtccaagacgacttcaattcaagagggggaggatgatgcggacatcactacctcagatacacacaacaatcctccaacggtcattcaagtaccgataacaagagctcatgcgcgataattgaatttagaggtgagctcattcctatgttcttctttgtatgaattcgagagtagattgctacctaatgattatattgtgattagaaacaatggaggagacaaggagacacttggagaaggacttagagccatggaggatcatcgaggacgtccaagttaaagtggaggcccaaaccaagccgacctcgagtgtaattcagagtccaggaccagtctgcactaaaacgggcgcccaggtcgcatacatgctcggattggggcattctttatatggatggaaagctaagaagataacctttccaatggttttcgtcccacatccaaattatatccaagtcaatgggaatcgaccgaacaatttgacgtccagaatatgtcacggtgctgcgtcaccgtatttgggcctttgggccgtgtatcgtgttagaacccattagggttgcgtcgagagggggttgcacgaccctaaactctatatatcagtatccgccgccatctttaggtttttgggttttgcttagattattctgtcgagaacagtttcgccgctagatcggtttgtaagaccccaactcgtgagtttaatcattcatctgcaattttggttgttttctataccgttctcttttgtgttcttcgattggcaaatagggattagccttctcggtgaggtcatccgcgtttcgacacgggtgataaacagaggagacgtggtgctgcgattgcggggctcaagagcgtccgcgttcgagaagccggatcgatttgtgtcgcgactccgcccaaatcgttgtttatcagaacctttcagaagatcgggaaccctagtatttatgtcaggaagggaggaaccttcttttgccgagcctgaacctgagccttcaacatctttgggtctgactagagagtcctccccagagccatcgccggattccaaagaaattcaagctccgggttgtgctcctaaatttagggatgatcctcatagcgattatgagaaaaccttgacgggcatcctccctgataatatgttgatagaggaagtaatgacggttctgcttcatgagtcccctgaatctactctagaaccggatgatcttcatttcattcaaaaagattctggtgagacctttgaattgcactccaaagaaccaccatcacagcttccccatcgagcctgaaccttattcctctggccatcaaaatgttgttcttgacatttgtcaagaaacaaccttgttcttgcacgatgcatctcttgggaaggagaacctgcaagccatggacaagcttgagacaccaactctagaggatgaaagtccacaaatgagcatgaaagattctctttcaaagttcctcagtgttcatgctcacataaagaatcctcatagttccgtccgattagtttcacttccttgtgcaagaaccataaccgccttagggtcctcatctctatcatgtttagaaggttggttgtggatgcttttatttatcataaatattgcaaatcttgtatgtgtctgtggcactaatcttgcagcgagatgtctccatggtcgagcttgtgaccataaacaaagcaatgccgggagatatcccggattatcttggtaacttttctttccaataaaagtaagaatcagtttttaggatattatgcaccttcgggtattcttagtcagtaaccatttcaggctgagattaagaatgagggacgtacgatgcctaagaacataggaactacatcaactgctcattttggtgatccttggtgttggtacacaccttataaagatcccagtctcacacacttgatttttgacgtctcataacgcaaaagtccaagtgtgggggaggaatgtcgacgagcttgcatgacaagttccatcaaccaaggccaccttgtttgcagttggcgttagtcttaccttgcagataaaaaaagaaaaaaaagaagaaaaaaagaaaaaaagagagacagaagataaaaaaaagaaatgaaagatgggacaagaggaagagagcaagagggctgacgggctacatctagttcaaagaccgcattatgtgcgagtttttaaaataggccatacacctcgctagtagcgatcatgctacctcgctacaccaagcccctctcttgagctcatgtgccaccttggcttagccttcatccactcctagttgtgcacaacctctcgctcctgcaacacctacacacatacaagcaagaggagatgccctcttctttcctaggtgtttgctgctacactctagttggcacttgcatctttgcctaagaagagatgcatcctacgtctctacaaaattttgccaacggaacacgccttcaaggcacaaggttcttgcacccgagatgtgggcataaccgaaccacttgcttgagttggtgtggtcaaagtaccttccttcgccacaacccacatcaagacggaggagagattgacaatcacatgtgaccatgccaccgctctagagatttcaacatatacatcatgctggcggtaagtgcactcaggtataggacatgaagcaaaagattcaccatttcttttactcatacttatctctagttgagtctagcttgatcatatatggttatgcgtcctcagtccatttttcgtatgctatggtttgggtggtcgtcaacattcataggctttttaaattaagcatgatgcttatgataaatagtctgctttaatcaaagttgatgtggtgtcaagtttgtttaaatgaaccgtagagccagtactttcatggacttcggatgtatatccttcgtagactaacccctgcaggaaccttttcaatttgacgggtgagttctcaagcatgagtcacactggaggtaagtcaagggccaggaacaaatcaattgccataacaggcaaaggagagacatatcacctctcaagttgcacggtacgtatattgccaaatactcctttgctatgcttgtaactttatctcagccatgtatgagttctgcttaaatagaagtttggtgaaccaaaaaaaatgtttttaagaataaaagaaatgtctctcggagaaaaaaaaaagacaaaataaaattatggcaaaattatgggatccatgctcattaagttttcaatccaattcctttatagcatggatgtgaacaacaaattttgaggctatgataaaatcttttcaattttttgtagtccctcgagtatttgttgtccactaaccttttgcatgaaaataaaaagacaactaaggagcagtgtagaataacctcaacattcataccacgctccttggactatgagaagacagatgcacagggaaccaagcagagcaaatgcaatactttgttatagttgattcggttcaaagtttggtaagttcgatctggtaataatctcaaacaccctgtgtatcattgcgtcatatagtcgtcctgctaggatacccaccatgctcattgttgccataaaaaaataaaaaataaataaataaataaaagtgaaataaaataaagtaaatttaggcacttcatccgcctagagttacttaaataaaatttggctcaccggtattttaccccagtagaagtccattttactttccatgtttttgttgaataaagacaaggtacaaaacaagtgtgggggaatcatttccgaacatccgacgcgcaacagcatcaactcaacatgacaacatgatgaacaccaacccacggctgcgcacaaaattcagcagccagaacagagtcctggctgggtcggttgaaccaagtgttcgcccaacccttgcttggtccgattctgtcatccttcgccgtgtggtcaggtttgcgcgtctcctcccttatcctccactatttgtgagttaaacttggcagaaaaattgaatacaaatttagtttgactccaaatgaaaattgaaaacattaactctcaacaaatagaattttcctatgattgatcatgtatactttttattctttgctaacacttgtcacttgtgaacaaacatctatcatagggaaccttgctcatctaagtaattgatgtatgtgatatggttatgacgaaagaaattcctgtccaactgtcatgatacttgggattttgttttgtgaaattaaaactttttcgagcaatactcctcagtgactatataattacctaccaaggccatgtataattatcattgcagaaacctttatatatatgtatatatacatatatgtatatatatatatatatatacatacatacatactagcaatagtgcccgtgcgttgcaacgggaaaaacactgtttgatagtgacaccttgaaaaccttaaatcggtaaaaatcaagtctaatttgatatattaacaaataggtagaaccgagtctaatttgatgaattagcgtagaatttatgatttagttttagatttatttttcgagcctacttaggagcttatccgacggattttgattttaaaaatctaagtcacattgtttgatcaaatttgctttcgacccaggtcttcctagtcggcccaaacttgggctggcccatcttcggcgagctaattcaatttgacatcccgcaagccgagcagctgagcgcggcccacatatgcggggacggtccgatgcacttcgacggcccatttggcacagtgtaatcagcggcggcggcggcggttttttaagtagtatttttttcgattcggatctatagtttttttcaccacttaggggaaaaagacttttgttgttgttgtttttctttattttattttttgtgtggcttttctttttctttttatgcactttctgccttcattctcccttttattatttttttaacaaaaacgacctcaagtaccttattgcaagattatagggactcaaatgtaaatataaaaattacatggactcaaatgcaaaagtacaaaccaaaaaattaaaatcatataaaatggaatgctctcgaccgtaggttccgtttttgcaaatatatcttcaattcgacacatcaatttttcaccaatgtagagtcagactttttttttcttttttgaaagggaagtcggacttttttttcttttctaaaagggaatcggatataggtgtcggacttttttattttattttttcgctattatttttttttgacggacgaaggaagcatctctcattttgacttttattgttgttgtttttctttattttattttttgtgcggcttttcttttttctttttatgcacctttctgcatttgttctctctcttttattatttttttaacaaaaacgacctcaagtaccttattacaagattttagggacacaaatgtaaatataaaaattgcagggactcaaatgcaaaagtacaaactcaaaatttaaaattatataaaaatggaatgctctctgtaggtttcgtttttgcaaacagatcttcaattcggcaatcaatttttttcaccaatatagagtcggactttttttcttttctaaaagggaagtcggacttttttttcttttctgaatcggatataggtgtcggactcttttattttatttttttcgttattatttttgttttgacggacgaaggaagcatctcttattttttaagtagtatatatatatatatatatatatatatatatatatagatactactatagagcaccctaaggtgctacgtattaaacagcacctgatacagcttctaaccccacccctccaccctcccaccctgctccccaccaggtccatagtacgtagttaaaatttaactcaccaacgaccaatctcgatcccacccctgcgccccctcccttcactcccatagtccgagtaaattttttacttgatgttatccaacttcttagtagttctatatatagttaaaatttaactcatcgatgaccaatctcgatcccacccctgcacctctaccgccactcccatagccgagtaaattttgaactcgcgcaccaccaagagctcccctcaccccaccatgtcaacactcctgcccaaacaataataattttttactcatgccaataattctatttataccatccataaccatcttaccgtatctataaccatccgctggaagtaaaaacattactaaccctaataattattatagggaaaaatatgtagcaaaccctatatgtaatgcaaacgtagaaactaccattggatcgaaaaatggacgcccgatattcgtccacataacatgagttaaaattttacccgcaaattcactcatgagttaaaatttcactaggagtaaaattttaactcatgcagacgtggacaaatctcgggcatccatttttcgatccaatggtagtttccacgcttacactacatataaggtttgtgctatatatttttttctatttatagagcccatgacttgcggggagtcaaaaaattactacctgtagaacaagggcctaatttttactgaccctgaaaatctgcttccgttaagtaaatgttttactggtagtgtgaactgaataaccgagaaaatagggattgggtggccacgtggagatcagcagggggagcgctctggctgagggtgcggggaaaaacgaaaacacgatctgtgggagaaaaaacggaaaaaccggagaaactctgcgctgtgtgagtcgcgccacgatgttgcatagcgcgccatgatccgtgagtcgcttcgtatagcgctaccgtatatatataactactatatggcaccctacgtgtcatatagctaaatagcacgtctcaacgtaagccctcccctccatcctccacatcctccacccaccacatcaagatgttaagtaattttttaactcgcgaacgaaaacataaagcgctaccttattggatgagagacacacgaaggtgcgtagtaaaatatttactcacgcgccatgtgcagctaccctctttcatattgagatgtttagttatatttttacttgattaaaatatgagtatttataccgtaggaaatcctatccaaccattccttcctccgtcaattactccatttttttgggatctacggcacggcagcctcaaccgtgattccagcagaggaaaggatgacgactccttcaccgcgcgcttgccagcgagggcttgatggctgcggccaccggcgacgaagaagatgttgaggaaacacagggctaccggatcggaaggatggcgacgagagaagccaaagatggctatgggcgttgtcgctcccctggtctagccatgggcgacgggcgccggtgtgctttccgagccatctccgccatgggaggaggcgtttgacagtgttgtgggcggtgtcgctcccatggtctagccatgggcgacgggcgccagtgtggtgtcctggccatcgccgccataggaggaggcgtttgtaggcggcgacgttccccttatgttgcggctggaggttggctgtccctgtgctatgcttggattccaggcaaatctggcactgatggctgacattgcccgtgcatggccacacctgctgctcgtcaatttcttccacatctacaagctgggtcctcaccaacaccggtgtcacctctcatgttggtccctagctgtgctctcctttatctcctctctttcaatcaaaggggtgggtaacaacaaccctcttcttaccagtagaacaaatatatgtttcctcttcgatggtgcggtcttaatttgcaacagtatcgccttacatttgctcattgattttgttgtagattgccagcacccaaagacagccgaggacttcctcaagcttagccccagccccaaggttgattgacaaatgaccttgattattcgtgcatacgccaacggttcacaatccacatgatcaacatttgcattttagtaaagaatgtgattaccttcttttgtttagttgccgctgctagcatcctacgagctcattaatctgaactaggggatgtttggtttcgattgtgaattgttgttcaattcttaggattgttatctgaatggaatatctgatggtgattctgtatcagagtatgtactacttttctaaattacatatgactaccacccattatcaaaatccatgcataaaaaacagaatcattttttattggctcagacctgggctgtaggcaggcactagaacggataccctcatctcaatcgggcggtaagccccatctcaatcaggcacagcgtccgtcacaggctagaagtcactgatgtgaagagttatctcaatcgggcaaatggccgtcacgaatgaatatatctcaatcgggccctaagtaaagcccgtcaccgaccagtcaaactatagcccgtcacagatgacctatctctatcgggccacaactagcgcccgtcacagatgactactaacctttatcgggcctaaactagagcccgtcacagatgatactcatctcaatcgggcctaaactataacccgtcatagatgactgatgacctcaatcgggcctaaactagagcccgtcacagatgactgctgacctcaatcgggcataaactagagcccgtcacagatgactagtgacctcaatcgggcctaagctagagcccgtcacagatgacctcatctcaatcgggcatttagttatggcccgtcacagatgactataatccacaaaaaaaataaattttgttttttgtctagcctcaggcctttgctagccatgcccgctgcaaaaatgacagaaacaaacacagatatccaatatcctcagctccccagcatcacccattcatacatatgcattcacatacacagacatcaacatatttcacacaaccacacattcacagccatctcatatttcacatccattcacatatttcacatccatttaaatatttatcatatttcacctgcaaaaccgagttaattggatcaaatatttatttagcaagtcttaacataaacatatgaaatatatacataaatataagcatcacagttacatcatcacagttgcataataagtgttcatcattgcctaaacatagaatttcaacattgttcatcatttcagtttaagcctaaacattcctttggggttaattatttcgcggaggatgaagctggctatctcctcgcgaacctcctcaaagctggtagtcagagacttggttattgtgccctacattgtcataattctagattagttgatcgatcatatataagtactaaaatgtagttagtctatcacaattgagaccaccgacctcaaactcagccaaagtcttcaccttttctctatacagaagtcgtatgttgtggcacacatggaatccgcactggtcacctatttgttgcttcaccgggaagtcttttttgtggatgagggtgtcatgtcctgtcttcctgaggcctcctctttgcacgtattgggcccacgcttcatctatcgctagttgaattgaggtccaatcatatgcgttcttatcaattctggagttcaggtaatgacatgtactccatttaggtgttatgaccagaaggatccaatgggcactgcgacattaatatagtgaaagttaattaagtactcaaggaatgtgtcatgctgttatgtcttactattgattataggcacacataatgtactccttgtctcggcgggaccacaaggtgtcgtagatgtagttgaccattccttgacggtcattctggagatttgtgacagtgaccacttgtagatcaaggaaggcaacttccggtgcatgcttcttacaccattgccaacttaacctacacacaggatcaacgatcttgtaagcaagttaaaccgattgttattaccagaatgagttgggcgacaatacttacaaggagtagcacttaaggagacttgtgtccaccgctcggagcctgtagaggtcgaaaagatccttgaagtcgatcacgacataatttattggaccaaggaatggctttccatcgtgctgtccaagtatatcggtagctttacttggcttcctggcgttagatttctccatgtagtataagtgaaggtccttgcaagcggtgcccattgcggcaagcacgtcatctccaaccaatggcatgcctagttggaactcctgtggagcgacgtatttcttcttgacctctttgcccttagtctcttcctggcccttgcccagatctagctttcttggagctagaagcgaggtctgcacctttcctccccttcctctccccttttcttcgggtttatcgagagtaattctctgaggggaagagtgtgccttcctgctcttcttcatcggtgggggttcatgaatcgccttgctgtcggcctccgttcggtcctccccaaaatccgtgtcgtactgcaactgcacatcgtaagattgtgcatgacgatcttgagcatgaggggctgaaggagcagtggcgggtctctttggtggaggaccgcctggtgcagtggttggcctcgctataaccctgatctcaatgaggtccttaggccattggatgaaggtaccacgggcatttcctagtgagaggacctcgtcgttcggtggatacttcagagggaacagctcgtattcgggcttcaccgagtcgacttgaacttttgcacagtcggccctgagttgcgctccatgcactcttgtctctggggtcggcttgtacgcaagtccctcggttgctagaacagtgaaggtcagcatcaccctaactgtgagggtgcagctcgttggttcctgcgatagattaatcaatttttttagaatattatatatcatatggattcgttacatctttcatgtattgagtaagttcacggttaccgttatgtggtcgacggcgctgtcgaccgatgttggattttctgccaattcagttgatgcgcaactgctgcgtttttcggtgggacttcctaactctttgtgcgcagcagcagcgccggcctgggggatctgttgctcttctcggatctcttgcctaatcttggccctcatcgactcgagcttttcgtcgaattcagatgtcagcttagctcgtatcgactcccggatcttggcttcaagtcgtgcatctttctccgccttgttggaagtccgcttcttgtactgccacgcatagtctggaaatccatacttccagggaacagaagacccaacgccccgtgtccgtccacggtgttccttgttgcccaacgttttcgtgaggaggtcgtcctcgcgtctttgagagcaggcctcttgcgaggcttgttgctcggcaaccaactccttctgcattacaatttagtggggtcaaataaactgcacgatgggaaacaatgcgaacatctagtttgactagacacttactatagcttcgtatactcgttgatcttctgcatttggcatgaagattgtgccatcatcatgtttctggtacctagccctggcccagttcctagcccgagggtgtgggatatcgccaaacacgagcggtgtgtacgattcctctgcttcttcatcctcacgctgccattcctcttccttaccggcatatccggcggtaccaagccggtgcggatgctggttcctggtctggagcaagcgatatgccttgcttctagctctggactcgggggtcgacttcttcgcatggaattcctcccagacctgttccgtgatccaaggaaatttctctcttggatctggatttgccgggttgtaaacgaactcgccgactagcttagtcttgaagttcttccaagcagtgcccataaccttgaaagcagcccgcctgagacggtcctcatgctccgcaggataatcaaagctctccttgaacgttagcgaagcaatgtccttctctgcggccggcacgagcttgaagtcgtcttgcagaatactgaatttctgccttcctatgaccccgcagatagacctaaatcggctcaatattttccttggagatgtcggcaaccctacggcgtccaccgctgttatgcggaaccgttccttaggaattttgttccctgtcctaggagtacgtgcccttgaggacccactagttgtcgtcgacattggttcgccttgctgagacattgtctacttttttccaaaaaaacaaaaaaaacacaattgagtgctacaatctattacaatctattaaccacatttcacaataatttcattaatgcaccacatttcatcccaacataaataaaccacatttcatcccaacacgaataaaccacatttcatcccaacataaataaatctcatttcatcccaacataaataaaccacatttcatcccaacatgaataaaccacatttcatcccaacatgaataaaccacatttcatcccaacataaataaaccacatttcatcccaacatgaaccacattgcatataaataaagttaaatgaaccacatttcatcaatcactacaatcatctatcacaaaattcataaatgcaccacatttcatcccaacatcgacatgtctcactaacagttcaatcacatatcatccacatccacatttcaatgacatgtcattcacagttagcagagggcggcgcaatggaggactcacctgaggatggccggtggggctcggtggcggtggcgcccgggctcggtggagggcggcgccggtcggtggagacaccgatcgggcaggtcggcaccgggcgggcggcgtcgtgctcggtgggggtcggcgacgtgggtcggtgaggacgcgggtggcgactacgaggaaggccaacaccggtccggtcggtgtaaaggctcggtggcggcggcggcgggctcggggggggggggtcgacggtgaggaggctcggcggcggaggtccgaatggagggccgaggaggctcggtggtgacggcggcaggcttgacgagggaggacgactgcggcggcggcgggctcggtggtgacggcggcgggcttggcgagggaggatgacggcggcgctagggttctaaggaggcgggaaactgtagcgggacttagaaaaattttcgatccgctctgagaaaccctagttatattagagtgatgagtcatctcaagcgggctttgccgtagggcccgtcacagatgactcatcggtgacgggctccatactaatgcccgattgagatgacattcaggcccgtcacggatgactcatctgtgacgggccctaagataatgcccgatagagatagattaatctctatcgggcttgaactaaggcccatcaccgatgactatttttccattttccaggcaagtctttatatttgtgagtacaagatatatagctgttgtataataattcattttattagtcataacatattttcggatagtaaatgatttcaaatcgaaatatggtcaacaacaaaattgtagaggttatcaagatctacaacttttattttggtcatttgtctatataactttgtttccaacagcttgaaattgattttgacaatatgacaaatataatcaacatttgtaattactaaatgattttaaatggaaatatggtcaacaacaaagttgatcctctcatcaagatctacaacttttattttggtcatttatctatataactttgtttcaaacagcttgaaattgattttgacaatatgacaaatataatcaacatttgtaaatactaaatgatttcaaatggaaatatggtcaacaacaaagtttatcctctcatcaagatctacaacttttattttggttacttcttcatccgataaagtgatagttatattattcacaaaaatcacatttctctcatctggtttataaatatcaacacagatatgtcaattttgtaaacattggtactatcactttgtcggatgaagaagtgaccaaaataaaagttgtagatcttgattagctgtacaagttagctgtttatggctttcccatttaaagtcatgtaatatttacaaatgttgtttagatttgtcatattgtcaaaatcaatttcaaactgttggaaacaaagttatatagacaaatgaccaaaataaaagttgtagatcttgataacctctacaattttgttgttgaccatatttcgatttgaaatcattgtcacttattccgnaagagattacttgctctactcgcactctacaattagaaaatggaaattatttgatacccagcagctatatagttttgtactcacaaatatacaagacttatctgggcaaatggacaaaatagtcatcggtgacgggccttagttcaagcccgatcgagattaatctatctctatcgggcattatcttagggcccgtcacagatgagtcatccgtgacgggcctaaatgcaatctcaatcgggcattagtatggagcccgtcaccgatgagtaatctgtgacgggccctacggcaaagcccgattgagatagattaatctctatcggctgtaaactaaggcccgtcactgatgactcattttccatcttttatttgttgtgagtgcaaaatatatagcctatataatttttattttggtcattattctgtataatttttttcccaacagcttgaaattgatttcgacaatatgacaaatctaattaacagcatttgtaaatactaaatgatttcaaattgaaatatggtcaacaacaaagttgatcctctcatcacgatctacaacttttattttggtcatgtgtaataaaacaaaattagccatattaatgactacacatatcaagtctatgcaataaaacaaaatactttattcattacaatagataagtacaaatgcatcagccacaaggttatgccttcggtatgatctgaacgagcatatgccacaggctcttggggatcatcgtcaaggtcaatgtgaggtcttatatgaagattatggttgttttcttcttcatcgacgacgttgtcaactcctacaattcggcgctttccatccctcacgatgtgcatcttcttgtttgaagggtcttttatgtagaatatctgctcgacctgtttcgcaagtacaaatggttcataggcgtatcccaccttagatagatctactaaagtgaaaccttccttgtcggctttgacaccagtgcgtagattcacccaacggcagcggaacaaaggaaccttgaacttgacgtagtttagctcccagatctcctcaatgtggccgtagtatgtgtttgacccaacttgatcctggaatgcatctatacggatgccgctgttttgcactgtgcttttgtcatcttgtttgacggtgtaaaatgtgtatccatttatatcgtatccttgccatgtgtctatggtccaagacggtcccatccccaacaactgtactgtctcatttgggacaaccatggacattgtcacacgattcttgaaccattcgttgaaccgagaattatgttctctgttaatccatgcatcagatcgccccaagttctcatctcggattttcgctaagtgttcctcaaagtatgggccaacttctgccatatgttggagcatagcgtaatgagcctgcgcgtacgacgcttgatcgggcctaattcttttccttccgattgtgccaacacctgacaaccttccctcgtgacgagacgctggaactccgataggatcggcatcggacatgtaattgacacagaactcaatagcgtcctcggtcgtgtaaccttcaatgatgctcccctcgggtttagctctgttacgaacgtacgacttcacaactcctatgtacctttcaaacggccacatttcccttagaaaagccgggccacatagttttgtttgcttcaccagatgaacagggagatgaaccattatatcaaagaaagacagtgggaaaaacatctccaggtgacagagggtattcataatatcggtctgcagcccatctagatcttctggatctataaccttctgtccaattgcattgaagaaggcgcacagacgttgaatcgtgtaacgcactttcggtggtaaaatgcctctaatagcaactggcaagatttgtgtgattagcacgtggcaatcgtgagacttcattccaacaagttttagatcgtccaatttaacatacttatcctcgctgaatagcccgatggaactttaatatccttcaagcatgataacattgcgatcttctcatccttcgatagtgtgtggcaggctggagggaggtacactttacctgtctctgcatctcgtatggactggagttcgctgcgaatattcatgtcctgtagatcaaggcgtgcgttcaacccgtcctttgtcttcccgggaatattcaacatcaggccaaccaaactctcacacacattcttttctacatgcatgagatcaatgcaatgatgcacatcaagatctttccagtaaggtagccgccaaaatatggattttttcttccacatacccttctcctttgtctagctacgttttcttttcttcccaaactcattgcttatgtccttgaccatattgtggacctcatctccggacaaatctttgggagcaggctgaagttctctcttaccattaaaaattttcttctttcttctaaatgtgtgacatagcgggagccacctcaggtgacccatgtataccatctttcgtgatttcttcagccaccggcttcgtgtatgttccttgcaatcggagcatgccttctttccttttatagtttgtccggaaagattaccgagtgcagggtagtcattaatggtgcaaaacaatagaactcttagcttgaagttctcctgaccatgtgcatcccaagtttccacaccttctttccaaagaatctccagatcgtcgataacaggctccaggaatacatcgatatcattgccgggttgccttggaccttggattaacaagcacaacataatatatttctgtttaaagcataaccatggcgggaggttatagttcgcaataagaactggccaagtgctgtgagtactactcatgtcaccgaaaggattcatgccatccgtacaaagacatatcctcatgtttctagggtcggcagcaaagtctttgtgttttcgatctatattcctccattcaatcaaatccgctgggtgtctaagcataccatcattccttctttccgtggcgtgccaacgtactaacttcgcttcgttcgggttggcaaagattctcttgaaacgatcaatgataggtagataccacacaacctttgccggaccacccctctttgacttatttccttcgtcagcacttttctttcgcttgtatcgagaagccttgcagacaggacaagcatccaagtccgcatattgcttgtggtacaatatgcagtcgttgggacaagcgtgaattctacagacctctaaccccagtggacacagaacctgctttgcatcgtatatcgtcttgggcaatgtgttctcaacaggaagcatagccttcaaaattcctaaaagatctgtgaaactcttgtctgtctatccactacttgccttcagcttcattaggtccaaggtaactgacaacttagtgtgttttgctttgcatccaacgtacaaaggcgtctcggaatcacttaccaacctgctgaatttcattccatctctctcattctgggctgggtcctcaacgtcacgtaacatgtcttgcagcagatcgtgatccacatcaaccatttcaccgcccaatggagaaggtataaacatttcatgctcattttcatcttcctgattatgcgcaccacttctgtctgctgctgctccacttcctaattcttgctctccatgcttcacccaacatgtatggccctctatgaatcctcgttgtatcagatgaccgtgtacgtcctctccgctatcaaacatattctcgttcttgcaatctgcacatggacaacacatgtaattactgtttcttcttatccgatcctcctccacggcgttcataaattttattacgctctttcggtactccgtagaatgacgtttcaaatttttggcatacatccaacttcgatcaattggtacaaaataaaaaaaataaattagaggcacatattataagatcagtattgcaaaagtaagacgtgataaaattgctcaattaatgatttatattactcacttgattgatccattttgatcacttttgagaatttaatttctgttttccttggaaaaaggacaaaaaatcgcccccaacagcctcccaccaaaatagtgaacagtgggatacagttacactaggtggtggggggtatttatactgtgcaacaaatatctgtaatggccctaaaacaatcaaccgtgacgggcatacaagtaatctctatcgggccttaataaaaggccgtcaaaaaagagtgtcatctgtgacggacaataaacttatctcaatctggcctctagttggagcccgtcagaaatgaccctcatctgtgacgggtttcttttaggcccgattgagatatggaaccctcatctcaatcgggcctcaactatagcccgtcacagataagtgtcatccgtgacgggctttagttttatgccgatataccatggctgtgcgaccatatctcaatcgggcgaaacttcggcccgattgagattacttccttatgacggcccgcaaattccagtcttgttatgggccgtcacagatggaaggatctgtactagtgaggtcagatctatggcgcatggctggtgatgtgcgatggtgatgggtcaaccgatgtgtggactaggagcctgggacgcacggcgtcaaggccgaccacgtcgtcacgtggtgaagcaagccaggatagatgcttactatcgccggctatccaatgctgggccagctgttcttcctcactcctagaagaacatatttcttgtttttgtgggctagcttgatgtgtaatattttttcacccgcatagtgacttctacaatgtttgtattatttactcataatcaaattttcatggttcaaggtaacaaaacgaacggtaacatattgctatttcacatattattctaagataaatgaagcaacaaatgagaattcatgggagtaaaagagaacatgtagtaaaatacatgagtaaaattattactatgaggacatgagtaaaaatattactatgagaacatacgagtaaaaatattactacgaggaaaatatatccgagtaaaaatattactatgacaactcgcaaaatatatgcaagtagaagaattaatgtgagaactatatgggagtaaaaattttactaactttggagagatttttaccaaataagttatgtcacgcccagaaattcacttataatttccgaactaatttgtgcataaaatcctcgtccaggaatcagccgaggtacacaaactgacaatttaatattcaaatccatcataataataataacgttacatacttacaaaagaaaagaaaacagcagcggaattaacggtttagcaatggcttcagctccactcccacaggcagctcaactggggtataagccaaacgtcttctacttctggatccttttttttcaactgaggtttgatgattattgcaaggtgagcatatgacatactcaacaagccacacagcaaatatgcaagtgcacaaggataccaaaggatggcataatataggctcatttgcaaaagcagcatttagcaaagatttaagagtaaaccagtagagtaattaatcagaaatattaatcaacactgaacagcacacccatgctgctcaggcccaaccatccagaacaaccatacccggctgtacagatctaactccaaaccaggagctaaacaaattattaccagttattgcatcaataattatttgtgagaggtatgagactaatcacgaaaaacattgctcaacccgcccatgaccgcgggcacggctattcgaatagttttactctagccagagatgtaccattatacccacaagacacgattccacacatattgccataccccgaagtaccaccacggcactgcaaagggactccacagcgacccccatggacttctcgccgcttctcagtctggcaccccgtaataaactatgctatacaaaaggtaaagccgttgcccacgctggcttgtggttggcacggttaatgtctcacaatagtagctcgcgaaccggtccttaattgccatgagcacgaccttcaaaaccatgtgctcacaacccaccatcgacaagttttaattatcatttaattatcataacacgattaaccatcgtgagctaccattaaatataaccataaataataatgtagtgtgattcatcccattagtaagctaatgtttctaagcatggctaagcaatcatatatatatatatatatatatatatatatatatatatatatatatatatatatatatagcatttagctgaaccaaaccaatatataaggttctagctaatcaaattataacccatagaaaaataaagtcatcttcggccattaattaattgggaaaggctcaccacccgatgacattcgaaaataatgcataaattgaaataaaacattagctttaaacgggttcaacatgctcaaagggttgtttgggatctgtgtgacttgccttgcaataattagtcttcaattagtctttttaacacttccgacgcactcacgaaccttcgcaacgacggaaacgacaagctaacacgcaaaacgaagaaaaagactaataaaaaccaaataaacagtacatataatgtaaacaaacatgtagatcatgattttagatgaatttagagacttgaacggcctcattctgatttcatataaattaattgtgaattttaaaagatttaactctaattaaacctattaaagaaaagactattccaaattaattaaacaatttacaaataatttatatctgagatataagactaaagcatcctccggaaattattgtaatgaatttagtagacgacatatagtaaaaagaactaatatgtcattgaaaagagataacaggatttatattgattttgatggccaagatggcgctgatgtcagcgatgacatggctgccacgcgggatcgacgccggcgagcacgggaacggcggttaccagcgaaccacggtacaatgatgcaaaccgagggcaccgggtgagagaggagatcaaggcgacctttaccaccacttacgcgacgacagacggcgagggagatggccgacggcggcgaagtactgtccacggcggcgacggtgtttcggcgacgagcagcagcaacggaggggtggacgagcttctcctcgcagctgcgaatccaatggaagcgacggcgaccaaaggcgaccatagacgacaacgaacggcgcggctggagatcggaacatgacggcaacccactggttcatggtgagattgacttccggcgaggtttcggcgcaaggggaacggcggccggggtagctctcacccttgcgaagccgagggaggtgacggggctgaccggcgacggccgaggcgacggcgcacggcggctggagaggcgaccggaggtggagagagagggagctcgcggggaggcggctagggctagggaaaaactcgggaaaaagagggaacggaagaggaggtcttgggactgctatttatagccggaaaagggagagatcggctcgggaacggaggaatttggtgtaggaagctaggatttatccgagttcacccgaataaaaacggccaaaattcgtgagatagataacgaatttgatgggggtttcttgtggataagatagaggagatagagaggaatccgtttttgcaatcaattttggaagggaagcaacggagcgaccggattcggcggagattggcgccggtatcgggatgaacacggcctctgtccagccggctggaggtaggagaagcactgtagcgagagggagtataattagactttaggctgggctgaggacagagagaagggatgaaggaatgggccgaaaagggcccaagctgaggaggaggatttttattacttttccaaataaatcaatcaccaaaatgatctttgaattgttaaaaatacttccattgctcaaataatttcagggaaaatcctgaaaatacttggacactcaaagtacttaaaaaaattaaaataagatcatttaatgattaatttaatatttaaataattgctgaactgctctttgtatgattaaaattaagagttgagctccgaaaaatccgagaaaattccagagattataattaaccatggagaatttaataaaaattaaattcatccatgctttatatttaggaaattttatttcccacatttaacttcacttgtaaattaatgaacatttaatataaattctaataataatttattaaataatttataaatcctaaaacgaaaatcaggatgtgacaagttattactaccatctacatttctctgttctcgagctgaataaaaatggcaaacggaagaaaatatactgctaaattataaaaggactggattcagtaaaaattttactacagtaaacttttacgtttactctctagtaaaaaaaattactattgatggaaagttgaaggaaaggaaagcaccatgtacaaactttttactccagtcaaactgtgcatggatggatgggtgggtacgaattgaaaggagcataaaatccggaaacagcaggaggaaataaacctcaagtaaataaattactcctactatggatgaaacagagagagaagatagtgatcctatagtgatttttttacttttgagcgatggatgaatggcgagcaggaagcaagttattttactgaagcagtgatttttctagtggacaattgatacatgcgtaaggactataggaggaaggaaattattttttttttactgaaaccggggaggaccggtcaatgccgcaacttaagaaactaaaacgagaaaactggggaaacgatggatgcatgtggatgcggaaaaaggcaagtaagttttttactactggatgagtgcacgagggatgtgcggcaggaggagaaaaaaacggaaaatacggagggaagagtctatttcctagcgcgtcagagacgccatgtaatatatatatatatatatatatatatatatatatatatatatatatatatatatatatatatatatatatatatatatgctgcttgacattacatcgagctttgtcaaattattgtgacccatgtgagatgcttttcgtactttcatgatcaagattacacgcacactcgacatacacacattatgctaaatttctacactggaagctagcatctctcatccatcatttattttatccattatccacaaaataaatactccacctcatttatgcctcttgcttcgaaattctttcaaagaaaaaaaaagagaggaagagaggtatgactatgcaaaagaaaaaaaaaagataaagtcttgctcatacaagtatggagcgttgataaaaaaatgaataaaaaaaatcttgctcatacaaagtatggggcatgataaaaaaaaaagggaagaaaaaaaggtagccatgcactctctcatatttccaatgaaagaacattggaggaggaggtatatcaaaggagttgttgtcttcaattttccattttccacccataaaacaaccatacacatacatacccatacatatatcacacacatgcacattcttgatcagagagtatgacttgctatctcctttggtccggtattttggctttgtaatatatgtgatgcaggtatgcctggattgatccctaccgagctccacctctatagcctgttagaatagggacaattcggcaaacatgccttggtgaggatcgacaaataaaatcacatgagtgatctgagagaaggtcatttgaggagtacaactactttgcgaaaatataaaaaaaccctaagagattgacaggaggaataagatggacttgagttacgaccgttccattcatcaattgcccaagatggtaagtttgacactgcaaaagttcacaggtacatgtgtggcttaacatattttgtatacttgtattatatcttgggaaattttattcctcattaatccttaacctttactcgggacgagtaaagagctaagtgtggggggtttgttgacggctgttaagtgccaaaataacaccgtcaatacctgtataaaatcataaatgtgaaacatctaacatagtggtaggatgtatttctaacaatttccacgagtgttggtgtatattcgtatgcaggtgatagagagtgacatgggagagagtgagcataaagaatggaaatatattttgcactaacggactcacatggttttgagctacaatatataaaatgtgcaatcatttggagtcaaatcatggagtatcataaaaatagggcccacatgtcagcatcctgaaaaggatgtgggccaggggaactagcagctagcccaatccagcccaacttcggtatgacggttgtcctcctcatcctatgacagttacgagcgttaatactggtagaaaccgtcatcaaaaggacacatggcaagaggagaaggaagatgctctttggattctatggagaatattgcgggcatctccactctctcaagttacctccacactataaatacccctctcttctccctcattcacacaaaccaaagcatgagctgaattacaagaggctctagtgtattttattgtatattagaatagggagagtgtaagatagaaggaattggaggaatcccggagttgtcggtaatctcctcctatttttgtatcttgttaattactctgctttaatagaaatatcatcctgagtatttaagattttcttagtgagaattacttcttggttagttcctaattagcatacaggatcattgttcactatagtccatttatttataatgattgctttagtgtttgatcggcactagagtagttattaattgcgtagacgcggtgtctgggtaattaatctccagtggttgctgcgtatcgcacagtacatttgaggtgggtgtagaggtggtgacagccctcaagagcactcaaatcctccctgtccgggtacgtagtagagcgatatctaggaatagcgggttgccagtgcctgaagtattgcgttaggattaaagttaagctttccctagacaatatttctcattaggaaattctctctgtcctctgcccacattagctttgtttccttggatgaaccggaggaagagataatcacacacgttcctttggatttgatacccttggaatactccgtaggggaagtgctacatcggtatatccgtgcgcttgcggattctatctggatcgtaagaaatatcaacattgttgcaatatcaaagaatgattgcaacgattcatgtttgcgttgcaatacctatagactaattcgcaacgatttaggtttgcgttgcaatacctatagactcatttgcaacaaagtagtttcgcgttgctatatacatgaatcttataacaacgctctaaatttgttgcgacatggataactattgcaacgataacaaaaagcgtggcaatattgtcaccctaattacaacgcagatttattcgttgcgatacttcctacttattgcaacaaaaaaaattacaatcgcaacactacgcaattagtggcaatatgcccccctatcgtaactaaattagacttcggtagcaataacccctatgtattgcaacgaaaatcacgtcgttgcctaaaatttcgtggcattagcccgaaaaccttgtagtgactaggcaaactctaacgggagataagctagtaacacaaaaattaattctacccgcctgttagccttgcaccaaagcaacttgtatatgctaaaaattgaagcaattgcagaaagtgaacttgaggccagcacttaaaagcttgaaatgaatttgagagcaagagaggttgcgaaggggagtggaaaatgtgttcaaatggggtgaacttccctccgccggccattctcctcttatagaggtcccataggctataactgccatatggggtgtggggacctgttaacgaccaaatttggtaagatgtgaaccaggttcaacattaggatcgaggcgaattcgatgaagagatcgattcgaagaacagagtatgcatcggctgtgaaggtatcggctggagtgtacattggctgggatggatcggacagaggatagtcgatacagccgatggaggcaatgcaaccgattacgatgaagacagcttcgaggctgtttttagaatcgttcaaagtgcttcacaaggattgccacgatagagataaagctctcggtttgggcaattgtttcaattaattaggatattttatgtaatttccttagagatatgtttgggcaaaagtctatcgcaaagacttattgtatcttagagtttgttagagataagtgtcgtgtccggcaaggacatattttgtatctcgggtataaatagagcccgaacccatgtaagcaaacaacacacgttcaatacaatctcagcgcatcgccacccttttactttcgtttactttcgacgagttcttgctttcgggttgagctgcatcggtttcgatcttcaactagaggtaaagcttgttatggcggcttgcgttctcgggattagtgcttttatctttatgatactctaatattgtttatgtaattcgtcaagttatcatatatcctatataatctcttgcaatattgttatttaaccttcaattggctgacatctatcattggaaagcagccgattaggttaaatactaatgttgacttagactatataagatatccaccaccctatgaaacattcaatggcttgattgtctagatattgtccttcttttcatatttatagctgcatcagttgagtttgatcttataagtcgtcattagaatctcaatctctagcctgcttttggttgccgattagggcagtatcggagtttccgccgatcttacctgatttaactcttttatatctcatatgcttgattgagatattaaatccgccctttatgttaagatcttgttgcgtttaggtatattaagctttccgtttgatatattttgcttgctttaatatcttaatatagagtggtatcggagtactagccgatacatgctagatctatctgatcggctatgctatgaatgcttataatctccttgttaatatatatttcgatctaagtgatttatactatctcggcatggcgatgatctatcccaatcacttgatttaaacatatatcgacgaaagcattatataccattgatatctacagccgattgaatagattaagttctttcttgcctatttataactgccgatcgactcaaatatgacatcggctcaaagataaatgatacgtcatcgacgactggctgatcggctatcgtttatagatttaaccgctattttcctgtctttatttcttgttaattgcaggatcaaatcaactggcacgctcacaaacttaaaggcaagattttttggacctgcactggagttaagcagatctcccaggcctcgtgtttttcgcatcaacaagacccccagtttaatacaccggaaaccccatgtgtcttgcaataccactccctgaatcaataggtggtacacatgtagcacaattgaatatcacaagctgacattgtttacaggtatttctacattaataatactagggtagcccaaacaggtcccaaaatagaccaagcatggtcatatacattacaagataccaaaagaaatagatagggtagcggaagcgaagcagcggcgatccatcgtactccacaggcaacgactggtgaacctagggtctcaaatccattgtcttcgacatgcactcgacagcattgcataaatataatcgactccaattcctttctaaaagatttaaattaagcaagggtgagtacatacgtactcagcaaaccaccactacaaaatgcatctggtgctcacaggggaccaccactacaaaatgcatctggtgctcacaggggttcaaggatggcttggtttagttgcataaagctagttttcacaattcatttcataatcctatgacttagcagttttaactgaaaaacaatgttaatgttgaagttgtcattaatcgagggttcatccaccttcccacgcctcgcattccattttacaccaactctaccatattcccgcacatcgggcaaggttactcatgtcttctcttctctaaactaagcaatgttaaaatctactagtagcatacccgtgctaacgctacggtgacaactaatattgcaaatgaaacaaccaaatgacagcgacacaatatatgcttcatgaatggtacatagaacagatagttaggctaaaaaagcgatagagttattagaaaaaaaattaatcaacatatctatccacaataccatctaggaacaagccatcccttgcaatgctataaagtacaggtattactcctctcaaatacacaatataataaatatctaaaattagcttgacttaagccatccatttcgcttgatgtggtcctgattatctggacaaggttacaaaacaaccaaaacgtatattgtcactctagttatttgtatttacacaaaaaagaatattggtcatttcataacttgaagataaactactgtgataagcaaggtggactcgcttggatgactaacaaatgaacctctgaactaaaattgacgctcatttaatacatctgtaatcaaagtcagttgatcgatgttttcatctatgtgtagaaataaacaacggcaaacaaccgatatagctaaattttgcccaaaaaattacatgtcttgtcatatcactaacaagtatatgcatatgactaaagtttctgcatatcattagaaatatatagctgcattcaacattttgaaaaatatatattgtaatttatgaaccaatgaatcactaggggtaaaattaaaatgttatatattttatacattttacatttttaaaatgtggttaatgatcaaactatcatgactctccaatatctcaaatcaaagctgtagctatatatatacaaaacacattgtggtttgaggcacttttctgttgcactggaaaataaaatagataccaatcaaatcgagaatactgaaaaaaataagaattaactatttatagtctatagtaaaaccttcacttttgaaacctactacagactcatacatacttgagtctagttgaaggttcaggctttcagctcactagtacagatccttccatctgtgacggcccctaataagactggaatttgcgggccgtcataaggaagtaatctcaatcgagccgaagtttcgcccgattgagatatggtcgcacggccatggtatatcggcataaaactaaagcccgtcacggatgacacttatctgtgacgggacatagttgaggcccgattgagatgagggttccatatctcaatcggaccctaaaagaagcccgtcacagatgtcatctgtgacgggcaccaactagaggcccgattgagataagtttaatgctcgtcacagatgacactcttatttgacgggcttttattaaggcccggtagagattacttgtatgcccatcacggttgattgttttagggctgttacagatatttgttgcacaatataaataccccccaccacctagtgtaattgtatcccactgttcactattttggtgggaggctgtagagggcgattttttgtcttttttacgaggaaaacagaaattaaattcccaaaagtgatcaaaatggatcaatcaagtgagcaatattaatcattaattgagcaatttcatcacgtcttacttttgcaatactgatcttataatatgtgtctctaatttgttttttattttgtagcaattgatcgaagttggatgtttgcgaaaaatttgaaacgtcattctacggagtacagaaagggcgtaataaattttatgaacgccgcggaggaggatcggaaaagaagaaacaatgattacatgtgttgtccatgtgcagattgcaagaataagaatatgtttgataacggagaggacgtacacggttatctgatacaacgaggattcatgaagggctatacatattgggagaagcatggagagcaagaatcaggaagtggagaagcagcagacagaagtggtgcgcataattaggaagatgaagatgagcatgacatatttataccttctctattgggcggtgaaatggttgatgtggatcacgatctgctgcaaatgttacatgacgttgaggacccagccaagaatgagagagatggaatgaagttcagcaggttggtcagtgattccgagacgcctctgtacgctggatgcaaagcaaaacacactaagttgttggatagacaagagtttcacagatcttttaggaattttgaaggctatgcttcctgctgagaacacatttcccaagacgacatacgaagcaaagcaggttctgtgtccactggggttagaggtccgtagaattcacgcttatccaaacgactgcatattgtaccacaagcaatatgcggacttggatgcttgtcctgtctgcaaggcttctcgatacaagcgaaagaaaagtgctgacgaaggaaataagtcaaagaggggtggtccggcaaaggttgtgtggtatctacctatcattgatcatttcaagagaatctttgccaacccgaacgaagcgaagttagtacgttggcacgccacagagagaaggaatgacggtatgcttagacacccaggggattcgattgaatggaggaatatcgatcgaaaacacaaagactttgctgttgaccctagaaatatgaggatatgtctgtgtacggatggcatgaatcctttcggtgacatgagtagtactcacagcacttggccagttcttattgcgaactataacctcccgccatggttatgctttaaatggaaatatattatgttgtgcttgttaatccaaggtccgaggcaacccgacaatgatatcgatgtattggacgaggataagtaagtatgttaaattggacgatctaaaacttcttggaatgaagtctcacgattgccacgtgctaatcacacaaatcatgctagttgctatcagatgcattctaccaccgaaagtgcgtcacacgatccaacgtctgtgcgccttcttcaatgcgattggacagaaggttatagatccagaagatctagatgggttgcagaccgatattgtgaataccctctgtctttctttgataaaatggttcatctccctgttcatctggtgaagcaaacaaaactatgtgtcccggcttttctaagggaaatgtggccgtttgaaaggtacatgggagatctaaagtcgtacgttcgtaacagagctaaacccgaggggagcatcattgaaggttacacgaccgaggaggctattgtgttatgtgtcaattgcatgtccgatgccaatcctatcggagttcctgcgtctcgtcacgagggaaggttgtcaggtgttggcacaatcggaaggaaaagaattaggcccgatcaagcgtcctacgcgcaggctcattacgctgtgctccaacatatggcagaagtagacggatagtcaaacgttagacacagaaacctaggaattgagtctttttggaacagagggagtagatgcaagggcacaaaactcggtaagggtgaaaaaaggcattatattagttagcactaacctccaggctttccaatattgacaagattaacaaagaagcatgaatatggtctggtctttaatttgtcatattcctttttcatataagattttttttatgactcgaggaagtaaataataatacaattatttcttgaacatgcataatttatcatgaaactaatttcgcactgtagtttatcttatcaaaagaagtaacacatagcatgagagacgcactgctaattgtgcctcctgcaaggaagaaagttagtagagctaatcgtttgatagtagtgttagttccaaaggctactgcaagaaagagagaagcagattactcttatcttttagagaattttcttactatgtatgtaattctatactaagtaattctgcaatatttttcatgcacaaatcctccttcacttcagtttctcatatactcaatcctcaaacaaggagggcagagatacctgcctcaatcacaagagctgaaagctttcaaaaatttgatgaagctacattgaaacttcagtctgaagacctgaaacaccaaaaacaattgatagtttgactccgaattgatttgtgaaactattctaaactcaattgcgtaaattactaaattggattgaatacaggattggttatagggcattgagtaaaacttctgaaacatttgcaaaatcaaaattgtaatcttaaaacctaaacagatgcataaaccaatcagtaaagaacgcaaggcaagcttaattaacctttgcccgtgctgtcgcagtagttgttgcacgcacattagtattgatccagtccaaaccagttctccatgtactcatctaggcttgcatgctctgtggcaaccggagagaaattccacttgttagaactcttaacccacaaaatagagagctaaagactaaaaccacagtttcatctataagaacactcaatcctcgatggagagctaataactgaaaatgcagttaggattgatgtgtttcaccttcactttcctgcacatgcaggatgacacctcagaaaaagaacaaaatgctgatccatcgtgcttgcccattgcagggagtcggcgtcgtcgcacgcgaaggaggggtgtcggaatctacggcgcccggcggctgctgtgatgcagttggagcggcgactactgttgggttaggcggcggccagcgttgcgtgtgagaggatgccgggcgtcggtggcgccgcgcgcgaatgcggggtgtccgaaccgacggcgggcagatatccggcatcggcggcggagatcacggcatagattctgtgtgagattggtggctcgacatcggcagcgaccgcaggcctggactggtttgccgcaaagatcgtttttgagccgttttctcgcccgcgccgcctgtgtcagctgccacaacgccagcccagaccgtcgaagaaccaccgccaccgccgtcgtagtcttcaccagctgtcgcacctgattgtatcaaacacatttagccacaccacacacatgacgttcgtttcggcaggcgggcggagccggtcagcggctgccgcggaggagatcgtcgctggctcggcgatcttcggcttcagaaattcctgcacgaataataagaaaatctttcacaatggaagtcatcataaatcttgggcaggaaaacaagactgaatccccaaggcaacgcaatacacgtgaatccccaaggcaacgcaatacaggagaacaagacagaatccccaaggcagaaacaacacatggatttttttcattcagaggtaaactaacaatcattcagagttggcgatcggtgcggtggtagctcgtcgttgcgttgtagctcccaaatcctgcggtggcggtgtcgagaagcagcggggtgaggagacgaagcgacgcggggcaatgggctgatgggtaggaggagcacgcgaacggcggcagccacggcgactgtggcgatctggaggattagtcgtcggcggcggctggtggtaggaggaggcaggtgggcagcacgcgtggctagtgggcgaagtagtaggcgtcggcaacggtggcgtccacggcggttgcgggtgggtgacggcggcgtcgacggctggggtggatgggcagaggaggcaagcgggcagcgcgcgtggtgagtgggcggaggagtaagagtcggcggcggggaggaggaggagtaagactctgcccggcgggggatctggagcggaggcggcggtggttgtgggtgggtggcggcgtcggcgaggaagaatcgttcgtgggggtggattggcggaggagtcggcggcagttgcgggtgggcggcggtggcgagtggcgattggagtggagaaaccgtctggcagtctactgcgatggcccgtttgatatgacgatccgatggttgatattacacgtatctgtccgatgtctctgctaggaatcaagaccaccattacaaattttctaagtagtagagatgagtttagttaagagtagtataagtcttggcgctcattaaatgtgagtacggctattcgaatagattggtttactcacattgtaatagatgtacgcttttaatttaatggagatctttagtacacaacctaaacacacgcaaataaataacaaattctattatacaaactgggctaggccttccctagaggaaaaccagactttatctgagaatgctatttcttttaaataaacttctaggaattatacttcgcaaatagagtttttagtaaatactttactggtagctattatttgcaatatagttgccaaaagacttaaccctttacagggactcatagaaaataatcaaaacaatatttcttttgtaaaatagtatttgttttaatgactatcccaccgagggtgtccatccataatagtaatatataattttatttacagagcaaatataccagaggggctctattatatagagaagggtttttaggaagataactagtattagggcctgttcactttgataaaaaaaaaccttattaaaatttggcattgccaaaattttggcaactatgccaaaattttggcaacttatcaaaatttttgcagaatttcttatatagttaccaaaatttaacagcaaactaaatatagccacttttttagcaactttaccaaaatttggtaaggttgaaaatggcatcaaagtgaacaggcccttaatatatttcataatcatggttctttaattaaataatatttgaaatcaaaatacacgcatattcttagaagttcctcatttagcccatacataaccggaaaacgaaaaataaaatcaaataaattctagcatgcaagggagggcctcatcggttgccctatagcttataaaccaaagccaaaatttgaattttaaaacttgattttgaatttgattttaatattttttcaacattgtttttttttcaactttggcttttcaatcactaagaacatacatacaaaagttttactcgcatattatttttttaatcgctaataaaccgttatggcttataataagaagtgggcaaccgatggggaccggagttcaaaagatttttggttattccgaatttttaattccatattttagagtcaaaatttttagggtgttacatggggcccacaagttgtttgaaagtggcacagctgaccgttgctttgccggttcagccgaaccccttgtgggctgtaacatacccaaaatttaaaatttaaaattttgcacctaaagaattagaatgactttttcctatctaggaatcctagaatttttgcatcagacatctaaatgagcccatcatagctagaactcaaataacaatttaggacaatttaaaacttttccattctaatttaatttgacacgtaatatatttcatgtttgcattagcacaaagtgtggtgtgtgatttgagtccttttaagtgtttttggaatttaattgcattgcataataggtatcatggcattaattaaaaactggaggcaactaattttgtagaatgacttaataactttattccctaaaggtcattcaacttaaatattccagcctaatcagtggcaaactctaatatattaaattggacacacttccctggacattgtcatgagcataaagttttataaacacaataactccttaccctgaagagaactaataatttgtatagttaagtgatcaccacacacgtaatccaacttctagaattcataggaaatttatattagctttaaatattatgaactcggttttgttagattaataaaatatttttcttcatttgtatagacagcaagtaacacatcatgtacagataaacatctaaaactatatatataggaaactactaacatagaacgcattataatttgtagaatgcataagaaattcattttagctccaaaaatgatgaatccaattatgttgaacttagtatatcatgacctttcctgttaaaaaaatgaaattgtacagaacatggttagaaactacctttaaattcgaataaagcctaaatgacataattgtagcctaggacttgtaaaattcctatctcccaaaataaatgagataaaatagaaattcttttacctaaattcatataaggacagaaccttcccactgcgcacaaaacattcattttagagaattttgtatttttcgcataatttggtatttatttgcatgtcgtgttatttgtctagataatttgcattcacgttaaaggagtgacttaggaattgtccaagttgcacaagatcaaggcaagtttttcctcccccttcgtttgatcacattgaaacccatgttttgggagatgaaatgtgttgtttgcaaagttgcatttatattttattaaaccaatatttgaaaacttgggatatggtagttatccctaacttgctgcataaactcccttgaattattgtacacctctccatttgtatacttaggaatggttagagtacaacacttgtgttcatttggggctacaaatgcttaatatgctactatgtgcttagccatgcttagaattatgcaaataatatttatggtcactttataaatgaaattttgggtattattttgctgctgtacagatatgaaaattatgattatttctgaactaaaaatgaagttaaacttattttaggcttgggcgacaagtggtgtgcatatggtggtagttgcacaccaatagggggagtgttcgcccgggtcgattaaggaacgaacttcgtgtcaccctctaatgtttaccgtgcatcgatatgagttattatggggtaaccttggcctattaagttaagtatgtctctaaccttgtactcgggaggctgttctagtaaagatggcggtcacggtttgtggagctatctttaggaactacctatgtgtgtgtgtttgtttgtaggatgactagttccctatgtatgtgttctatgggggacagatgttccacctcacagcatgggcgtctaagtccgtccaatacaatgatagcatgcctcgtgggggaacggatgtgttcgccgccacagcattaggttaaggcgtgggccctccacctaacggctctaggacttaagcctagggtggattcacacttatcgtgctcatgcaaggttaggtacttcttaatgtaaaagctcgttgtgtcctctagaccacactcaatgtgtagagagtggtggtaccgacgggtaccggacaaactagagcgattcatatcatgtgggtaaagctatacaaactctgcagagtctaaacctaatcgattagcaatgctcatggtcatgagcgacatagtgagtggtatgggtatagttttatgatttatgttttcaaattgtgattgtgaaatataggttggaaaatggtaactagtgtagaattgtattgattatggtacatagatgaataatgtgagacttgatgccggtttaggtatcaagaatgattataatatgatatatgataaatattatgatatatctatgttcgtgttttgtcaattgaattgtcaactctctttacaaatgattgtgaactaaaatttgtctttatgctaaaatttgagctaaagaaagccttcctttgaattatggccttacatgtagtatgttaggcttgttttgtagttgtcagtacattaatttgattaatgtactgactcttgccaattgtttatgatcttgttttgcaggtagtaggtttaaattatgtttagtgattcgggtttcgactacttcttctaggacttgattcattaggggtctaccactagtcggctgcttatgggaacgggtatacaagcttccgcagatcaatatatattaggccggttggcctgctatgatgatattaagtgcaagttccatattggtcaggattttgtgtagaccttgccgttatttttggtcattaggattgcaagaatgtcttttgcatttgtgttcttggctaagctattgtgctatagaccatactacagaaatttttttcatcccatattgctattaaaggatcagaaacataggcattgaatctttaaatcaatataacgcctgccaattgcttgcataatcattaatttgattgctagctgtgagcataaacttttatagaacatgcttgatttaatttttatttttgacaccagacctgatttaattttcattttaaaatgaaactcctgtacaattagagtattaaatgtagactaaaacaaaaatcaattacacagttcgctaggaaattgcgagacgaatcttttaagcttaattgtgccataatttgacaatgtggtgctgcagtaaacattcgctaatgagggattaattatgcttaataaatttgtctcacagtttcttggtggaatatgtaatttgttttgttattagactatgtttagtactttaaatatgtgtttgtatatccgacgatgtgacatgcagaggcaaaaaattttgctacctaaacaagccctaagcctgcctatgttctgatccgtatataaaagttgactttattgtgggatagagagagtaacaggacggtatctacttgtagggatgctaatataggctgtgtttgctgctcagggttcctaaccattctttgtcgttttccgcgcatactttttgaactgcggtgtattttttgtaaaaattttctatacaaaagttgtttaaaaaaatcaaattaatctattttcgaaaaaaattaactaatacttaattaatcacgtgttaatggaccgctctattttttttacggagagaaagagttcctatacaagatctccgaacgcagctatagtactgtttagctgaccattcgccataagtaaattgggcgatgctccggtgctctctgtattatactacaagtagaaaagatttgtaccgttcattattaaagataaattagtaatttattaatataataagggtaacttagccattttccatttttccacctcatggatcggcaggtcgatggcatcaagcccatgcaccttgacttgctagttggctgtgagcctgtggctagctcggcacatcgtccagatcgattccatccagaaattaaattggatcgcaagttatggcggcggcgagtggcaagtcctccgcccggcggcgcgtgttgatcctgccggcgatgacgcactccggtggcgtttgaatcttataaatatgaagatgaaaattaagtgtttcatataaaataaggtggtaataacatgtgattaattaagttataattattacaaactaaaaaaaatagattaattttatattttagagtaactttcatatagaaagttttcacacgaaacatttttttagcagtttaaaaagcgtgccacaaatattcaaaattttattctctcttcacagaggattcgagcggggcctccaccgtgcccctttcttctcgtccacccatccccggcaacccatctgtgccaattttgcacgcatgagcatctctccgatccgttccacgcggcagcggcgcatgggctactaggattagtgagtgtaaatgacaactatacccttccacaaataatttttcctgaacaataatacccctccacgattctactaccgttaagtgaggtggtagtagaaataaatttaaaccctttgatcaagcagtccattagcgcgtgatcaactaagtattagttttgtatcaaactgcgcacggaaaaaggattaatttgatttttaagcaactttgtatcgaaatttttttttaaaaaaggcaccgtttagcagtttgaaaaacgtgcgcgtgaaaaatgagggagaggggttggtaacagcatgaaacgaacgcatctgccctgttcagtcaactgatggatgaagattatatacataaaacgagaacactattaacatattgattaatttttaattattttatacataaaaaagaaataatttatctaatattttgttaaaaagttttcgcataaaatacaccgttcaaaaatatgctaaaaaaatcaaaataaaatacgtttctttggctgtgtttagatctaggaataaaaatttttgccgtgtcacatcagatatacggaaacacattggaagtattaaacgtagtctaataacaaaaaaaattacagaatccgcatataaactgcgagacgaatttattaagcctaattaatccgttattaacaaatgtttaatgtagcaccacattgtcaaatcatggagcaattaggctcaaaagattcgtctcgcaaatttggtcgtaatctgtgtaattagttattttttagtctacatttaatattacatgcaggtgttcaaatgttcaatgtgatagggtgtaatttttttgtgtggaactaaacaccccctttataagaaaagaaaagaacagggctagcactgctcaatgctagcagtacccacaatggtcagcaacaacgataacgaaaaatggatgagcaagagacattgagagaccccatgtatccttcggggtcgaacggacatgctacgaaacccctatcctcttgtcaaaggatcattgaagtctggcctgcggcctgcccgtacttgtgatccgcctgcacgacgacggcacagtgcaatggatacaggaaacagtgcacgcctcactgctacacgttcccctccctacgcacgctaaaaaaaatttctctcccacagtgcaagggtcttcatgcgtagctttggttttttcgtttcagcccctcgcattttctatttcagtcccttgctatctttctattaacaaagaaatccaaattttacactttgtatctcgaaagtcagataatacgtatagatttctccccaatcagataagcctgaagctgccgtttcttctcccctcacaacgtcccatccccatccccatcgccggcgcccctccctccccatcgtcggcgccctctctcccatccccatccctgtcgccagcgccccttccctccctgtcgtcggcgcgacgagccgcgatcttgaggttagtttcttgggttgctttgctgcagagactgatctcctgttttttctttcttcttggactgctctttcagatagaattttttagatcggttttctgttgaggaaggcaagttctttcgagggtgatttgttgtttgttctcgatgtcttttttattgattagtactaaagcatctattctagattggtcttgtgttcatgaatacgcttaaggtgttgaagccatcaatcagttcagtgtgtgctaacctgttccaggttctcatctgggttcatgatttgaattggtttagttttttttggtctttgcgattatgaaatttcagtagttagatgttgattttctaatagatgaacagtcgtgcagtgcagtatgtcaatcggtcaatgactaatgcagctgttcatgtcttgtgcttgattcaggagagcgcgggaggagaagaaacacgcgcgcagagagggcgatttggggatgaagcgcgccgggaggaaccgcgcggcgaagacacgcctcagcaatgcgtcgtgccctcgtttctccacgccgccccacctcgatagcattgaagaacgggtgaccaaatttggtcacatgcgctcacgatttgtgggccaacactaggacgtggcggcgatttttggctgctcaactacgtggaccgctcgggctgaatgccagcagggtgcactgtgaatggcctgccagccgcgcccctgcacgttatggccagctgcagtcagctcgtagtaatggcgagctgaagtcagctcgtagcaagggcatgtttgggagttttattccgaaaagcagcatgctggtaacgagtttatgagaatcttttctagctttggtcttctagttcatttttttattctatataactataagttcttagaatctgaataaaaaatgaactctttggaagagcttttgattctgcgagaagtcacagcagctataaactatccaaacaggctctaagacatacttcctctctctctctcttataatgtgttcttatttatagaaaaattaaactctactaaaaatccattaaacttcctagattctcatcctaccatatggcacttctataaacccttctaagccgtcacatgaccttttaataaattgatggacccatagttaagtagatttacatttgcaatgaacccgacattatagggcatatattagatatgttttttaagaaaagttcatgtgcctaggtacgtgcttacgtgaaaaccacgttcggtgcgtgtagctcaccctttctattcctttcgtattctatttcaatgctatattaggggctatttgggataggaggaacttattttagtccctctcgcaaaagtttcagtccctaagtcccttccatccaaacaccaccttattaacataaaaaatcattggtatttacaacaataaataaattttaaattactaaaactgaatctcctgtcctatacacctacgtatgaacgtatgtacgccctccttcctgttctgcggccagtgttccccttctattgtttcttgtttctgtattagttttttttcaatagtggaatataatatttcggcctttgctcaagaaaagctacaactaattattacaaagtagcactcgagataatagtatagttcaaataaaatagaacacatttaaataggaaaagccaaaataaggagaacacatttattctagcttatttgtgaatctctatccatagtttgcataaagttgcataaccattgtctccaacttgcgacatgcaactttcaaaaactctccatcttcatcacacctttgtaattgtgcccaaaaccggagccaatgagttgccctgaaaattacctgcatatagaaaatagatggtgatttatcaaaaaccatatcatttctactcaaccatagagcccaacaaatggccgaagctctgacaagtatcagtttactctttttcttgtcaacccccaaaagccacctatcaaaaatatgagatatactaattggaaggttaaaaccaaaagaaaactaaactgctctccatatgaattttgcataatgacaatccataaagagatgttgaatagactcattattcatacaaaagcaacacctcaagctgccgttccaattccgtctcgccaaattgtccttagttaacacaacccctttaagcaagtaccacataaagatcttaatcttaagtggcatcttaagcttccaaatacacttatttctctcaacatagccattattaattaaagctaggtacgttgatcttaccgagaacctaccgttcttatggtagttccatctaaaacaatcagaagaacgattcaactggatatgcacaatagaagcacacaactcatgccaatatacaagattttgaccaactaaagctcttctgaaagcaacattaagcggaacagaacccatgacagtggcaatagaagacgatctccttcggacaatagcatataaatatggatatttatccttcaaggccaagttgcctagctatttatcttcccaaaatctaatttgttccccatcattaacaatacaagaacccatatctaaaaaagtactcttgactttcatgagccctgacaaaaatgataatcaccttgtttctgtattagttagaggaacaaaatagaaaacccaaaaataatactgctaatttaaattattacaactaaatttatgactcgagagccaagttaattactcttaagtatattttaacataaattcaaacggttagtagagtattgaccattttgcaagagatgtgtgcattaattatatcaaggtccttttattgtggtttttttaatagaactatctcatgatgagttgcacttaatgatgttttactacagtagtatttggtgaaaacatattatattgatttttccatgtcatgtttggagaaggactaacagaaaccttaataaggcaccaagatttattaccacgtcgtaaatttatactataatgattaatattacgaagtatcattggattagggaaatttgaccaacaccgtgtaaaatcctgccggccaaaccatttaacactctagctctaaaatctacattaacatgaactctatatgttgattgagcgttcatatgcatactccacttacacttctatcctcacttcatataaaaatgattaaatataggtattatatttaaagcgtcaagactgatttataaacagacttttatccatgtacaaaaccactaattataacaacctatggcatatatgggcctcaactacaccatcctgtaggcttcagacaagctagggagttgaatcaagggtcaccggcctgtaaggtggtgttcttctctcgtgaagatgaacgtaaattttttttacgtaaaatgaggtggtattaacgtataattgattgagtgttaattattacaaacttgaaaaatagattaatatgatattttggagcaacttttatgtaaaaagttttcacacgaaacgtaccatttagcagtttgaaaagtgtgcaacaaaattcttaatcttcatccaactcttgttggagaaaagaacatgacataagtatgaaaattctaccacatcaatgtctaaatttcatattaatcaatgtcaccacatttaagtaaatttaacaataattacaataaaaattgtggatgaccaatttggaatcactatatatcatgagaaaaagctcacgagtcattaaggaaaatagaaattcaggaaaatagaggtatatctcaaaattcatagaataattagttcaatattatctgtagatctcagctatagttttattgctcaatgtatatacatgcaatcaaaggcgtcaaattctttacgtgtaagcaagctttgaaggaccaatgactgcatgatggggggactgctatatacattgatattttacagaaactttatgtatagataaaagatattagtcatcataaaagattctaacattaatggaaaaaaagcccatggtatcgtgtgggctacctttctaatttgacttaaataattacagtagtattaactattatacatattatatcatttgacttatatttaaaaatacatttatgtgtgatactaattttaattttatagttgttagattatatataatatgaaataaattacagaaaacctacactacggcatcccgtggagacgggatcccctcctcctacctcactcctctccccaaaatcatccgaatcctgtcctcctacctaactctcctctcccaaatcacacagcactgcagccctctctctccctctcccctttctctctctctctctaaagaaggccgagcggagacgaagccggccgggaggaaggggtcgtctccggcggccgaggaggacgacgacggcactgcgtcggcgaggtcggccaaccctcggcagggtcaccctcgagctcgcctcccctcgctgcgccgctctagctcgccgccctcgtcggtcgggtgtgtgccggggagttgtcgccccgaggagggcagaagcgggagctcccctcgtccttgccctcggcctcggcgtcaccgtcgtccctgctgcggcctgtcgcttttgcgccttcggtatggacgccggcagcccgcgtcgacctgcaacaggtatggccatcaaactcctcctcggctcctcctcgagacttctcgcgctctctggctcaggcctcgctcctcacctcgctgtgcctcctcgacgccatcctccgccgttgtggccctccctctcccacgtctcctcctccttttgacagtaccctccgatacctcacaagtatcatgcttgataccttggtaccaaggtctgatacctagatatcacccggtaccttaggcaccgggcatcaggtatcggtcgatacctagttggtaccaaaggtaccaggtaccaggtaccaaccggtacctaaggtaccaggtactaggggagcacatgtccctcacctcgccgtgcctcctcgacgccatcctccgccgttgcggcgctccctctcccacgtctccctcatcgttaccctctgataccccacaagtatcatgcttgataccttggtaccaaggtctgatacctaggtaccacccggtatcttgggcaccgggcatcagttatcggtcgatacctagttggtataggttccaaccgatacctaaggtaccaggtattatgtaccaggtactaggggagcacagaggaaagaaaaagagagagtcacttaaaatattccgttgcaacggtatccgccctcaataaattaatagtcacgtacttagaatttgggcgagcagtcagcaccaatcacgctgtttctgttgacttctactcctaccagatgctacagtacctcccgtgggcccccacactcctactgcttcccagtgggcccccaaccagtccaccatctgctctgttcctgtgcaagtctgtaaccaacgctactgaccaccatggacacttggacatatcacagcacaaaacattcctcgctccatcttccgctccagtctccattccccagctcgtagtagtagctgccttcctttacactataaattcccctaccttacacacagatgtgtccaagtgctcatcaacaccgcctgactcatccagtgtgaggccgtgagggtgagtgaaccctgtagcggcagtcatgaaggtaagccagcgagcgagctagctattctactccacaggacgcatgctgcgttgtcgtcgtcttgttctactaatagtttcttgttccgttttttcttcatgataatggattgatgctgtggatgtgcacgcgtgcgtacgtgcaggagagggtgaggcggcggcgcatcccggcgttcggggagtggaactacgacggcgacggcgaccttggcggtggcggcggctgctatggctacggctaccgcgacggcgactggccggtcacacagtacttcgactccgccatgcaggcccgcggcctggtcatctccctgccgccctcaccaaaaccacccaagaaggtataaacttgtctccgcatcatcgttcattggcaacacttgcaaagaaggtaaacgtaagtgttgttctgaggcggatatacatcatgtttttttttttataaaaaacaagatttggacaaaaatcgtgcttagtttcatttaatggctatcatggatctctgacagggtaaagaagtttttcaaaaagcacgatacatggcgtttgcatgttgcaacctgacagtttttcttacggtcaaactcacgcggtaaacagatgattggacggttgtcgctgttgatctctttttttaccaggcggtgaagtggattgacagcggcgcacttggggaggaggaggtggtggacgagaagcagaggcagaggcagcacaaggtggtggtggggctggcggtggcaggaggagagcacggggcggcgaggaagcaggggaagcagagcagagtggctgacggcggggcccatgcggcgatgggctacaaggggtgcaggccggcggtggtcaaggccgtggaccgggacctctacgagatcccacccgacatgctctgcaacaagccaagggtaacgcacctagtactccgtatctcttgatctctctctcgatggtggttagtagtactccgtaggggtcgcgttgcaccagcaccactccatttgcgagcctgcactgacatttgtgcttgtctcaaaccacaacctcgctgactcgtgtgataccattacatgaatcttttctactagtagtctatccatttcacagtgctgattttgttattcctaatttttttgggcctatttagttcgcgaaaaaaaaatttttatgtgtcacattggatgtttgatcggatgtcggaagggctttttgaacacgaataaaaaaaaataatttcataacttacatgggaaccgtgagacgaatcttttgaatctaattaatccgtcattggtacacgtgggttactgtagtacttatagctaattatggactaattaggctcaatagattcatctctcattttcctccttaactgtgtaattagtttttttatttatctatatttaatatttcatatctgtatttaaagatttgatgtgatgtttttgggaaaaaaaattagtactatcattatgctgaaaaaaaaatcatgttcagtaaaaaaagtttttttatggacaacccaacacggatgcttgtgcaattatacttaatgaagagtagttcactgatgcttgtgcttttcttcgtttcatgtggtttcagaagagggtgaccaggagcctgtggatggggtgcctgggactcagctgcgttgcctagggatctcaccagatagatcgatcgatcacacataccaaacctgccttgttttgcgtgtcgttgtaaagtgaagcagaaacccatggacggaccccatcgtgatcgatgcatgctgtcaccacggtcgcacggcccaaactttcccattcatctatctccctcacctgtctcagcagcactagtgtttggttggtgtctctctgtgcgttttaggagtagtagtaaaatgagatggacatggacatgatgtgtccggcagcgtcatttcctcgtgccaaagaccactcgagtgctgcctctctctctctctctctctccccttttgatctttttccgatgtgttttttttttgtagcctctgcttggttggtgtcccatgaaattacggaggcagctcggtgaaatgtggttatatgggttggtgccttggtggacactcgacactgatgagtagcagtggaaaaaggttgatgtaatggaacgctgtagtctcagctcaggggacttgtgccgcccgtggtgaaaagaaagaaaggaagaaagctttctgttgatccatgtcttgctagtactactacaaatatgtgtttatataggccgagtttagttttaaattttttcttcaaacttttaattttttcatcacatcaaaatttttctacacacataaacttataatttttcatcacatcattccaatttcagctaaacttttaattttggcgtgaactaaacgcaccgatattccggcactgtgctgatagcacctttttctgtcattgatgtgacagtgtgattgtgcgattattatcctgggtgttaggactacttcagtgataaaggctgtgtttagtttcacctcaaaattggaagtttgactaaaattggaagtttgaagaaaaaattaaaagtttatgtgtgtagaaaagttttgatgtgatagaaaagttagagtttgaagaaaaagttgagaactaaactcagccataatcatatcttccaagttatacttctgctttcggccgtgtatttgcaagggcttcttttccctactcacttttgatttgtaacgtgcacatttaattgctatactaagtagtattgtcaagctcaaaagcaattaataccaatgctgaatacttgaaaggaaaggggtgtggcctatcagagttttccgtttaaaaaactaattcctcgctataggtggactgggatgatcgctgatatggctataaagtcgcgtcccgtatcagatacggccacggatactgatacgtatcccacatattcacgattgtaaaaaaacaaaataaaatataactgacatcggcatactgcattggttcgggatggaaggaaaaacacatgtgcatgacgtgagatacgccaacgatacgcccatggtctgtctccgtcttcgctcgcatcagggatacgccgcctgacgcgctcccaacctgatggctgatgtcttttgcctgtacccggttgttggtgatatgggccccgcggtacacaagatagagggaaagaatccttcgatccggccacgtggccgcgcggcctgtccccccgcctcccccggggagaacgagcgctcgtgaagcggccaaggggcctcggggtgccctgtcgcacccctcgggcccttggagcatgctgccccgaggccctcactcggcttccacgtggtggctgagtgggcggagggagaggcgctgccaaacgtcttaaatgagcggtgccccaaccgtccctcgtcgcgtttaatgtgacgtgggcgggcgtgaggcgccgcccgattgacgtgcgtcaatcgggcttgattggtctgtgaccggtcataggcagatgggtggcagcgcacccacgtcctgccccctgtcaggcagagtgggggtaggtatgcctgtcccatcggcacgtagccgagcgtgtccctcgtacacgaatccagaaaagtctccatggaattaagagggaatgataaggatgtctcccgtgtcagccggaggacggcgttgggacccacctgggggcgaacgaccgccttgctttcggtcgaaggcaaggacgacggcttgacccaggacatgtgggccccatccaatgatggactatgtaagacggtgcatgtggtatccccttaaactataaaaggatgaccttgtccacttaaagaaaggacgccacttgagaagcttgagcctagggttagaactcccttgtaacagcacaagcctaataccacgcacaggagtagggtgatacgcttcctagcggctcgaacatatataatcccttgtctctcattctcttgcaaacgacctggtaagctagatccatagcggagatacgctcttgattatcgcgccttatctcccggccgaactcacaaagggcctcgcgacctcccgcttgagaggatcactcctcgacaccggcgttgccgccagacgctggtagtagccgcgcgtgttgctgccgtgcgcggggccacaatgtcccctccgcgagaaggcagagccgctactgagcagaggcgtacctccttcgccgccaacctcataggccaggaccattgccgcgtgagccatttcctctgacaccgggcatagcggtggccagtggcaggctggcagcatggaagcacggaacagctttttctttgttcgcttgactgcgtggccgggtaaatccatgctcttcgaacttttcatgcttgaatgtgggatcccatgctgtttgaatagggactgcaagcttagcagttttagaccttcagtgccgttagatcaaaggatccaacgatcaggatatacgtaggccctgtttggtaggactccaaactccaaggagctggaggttatgtgaaaagtgtttggcaagcttggtctgctccagaactctagaaacagaggatatgagggaggttaacaaaagtacccttgtggttttttctgtttttgtgatgtatgactgataactgtttatttttctttacaatttcagcaacaaaatgcaaggttaaaaattaatccacaaaataattgacataattagtgaaagcaccaagtgttttcttggtttagatctgaaatttgtatagtctaccattttgttctcacttcaatttgtataaacacataatttttcacttctacatagttcttataaaacaagaatcacccatgacatacatgcaaaatcacctattgttcttttggtctagatttcaaattggaaaaaaaatgaaaaaatggtagaggggattagctcctcacagccctagccgccggccgtgcgccgccgtcggccagctggtcgcgtccgctgagccgccgccggagagccgcgacctgctgcccgcctgaacatcttgatcttgcggcgctccttctcgagctgatgcacgcctccacccccgtcgcctccttggccgccgccgctgccatccttacagcgctcttccttggccgagccgccgccagagcaccgccgtcgccctgctacccggctgtcaagccgccgccggagcaccgcggcttgctgcccgcctacgcgtcgccgagcagccgccagagcgctgcggccttctgcccgcccgcgccaagccaccgccgaagcgccctcgtcgccttgttgctcggccgcgcgctacggttggcccgccactgccgcctattcgcccgccgctgccgcctcgctcgatgggtgggacttggagagttacgggagggaggtgaggaggtgggggtaggttagtggcagtttcacgtaaatatgtcaaataattaaagggtagtgggtcctttggggttgagtggagctgtggagcagaaaaacccagctccacccccttagttcattttttaggagcaactctacaaactccactctagaaaacttaggatctggaccgtttggcacagctccggctctatataagttggagttgggagctagagctgtgccaaaccggcccagagtataccgtttgctagcatttgctacaggattaatctgctacagtaatctactccctccatcccaaaataaatctgcttctggaattcaaattttgtcctaaaataaatcaacttctacattctaatccactatcaggtcataaatcaaaaaaatttattccttcaatatcccttacctacctatcaattaacagtgaaatttggcaagccccgaagacgtcatcggcctaaaatcattatcggcttcatagtcctggaatcggccgatgggaattatcaagtcgccaatagtcagattattgctgtatttggttaaggaaattaatctactaaaggaagtttatccagaagtgactgagttcaaggaggatgcaacatgacagtttatctattagttacgaagagtctttttgtttccttttatctttaggaaggtgtgtttagtgtcccataaggactttatgtttcctttttatctttagaaaggtttctttcttggcctaaccggtttggccgaaccagggtttcggccgaacccctagtgggcctaaccggccccacttttggccgttgggttccaatggtcagtgtggtcgtggcacaataaattttcattgaaaattttatttttgtttgaaaaatcatttgaaagaatttcctcaaaaatcaatcttaaatgcaaaaatttgaaattcaaacatgcattgatgcaaaagttcaaattgttgaaaataaatatgcggatacataccaatttaccttttggcgaatatcgcgtaattttgggtccaacgtgcaagaccgtacctcccttcagttcagatcgcggattttctgcccgtctgccgagtggtggagcgggtgtctttggctcttgcttccacaccttctttagttttcgtgcgggagacggcttcttctgagccggcttctctagcttcttagccggtgtattgagttttactagcgtcttccaataacggttcctgggaatcgttgtttccttttcctagatattctgcataaattttaccagaatattcatcttgggtggctccacttcgaccacttgaatattctgcgggtttgcccgtacttaatccggaccatggagcattgttcggttctcggctagaactcaaatttctcttctttctcgttgatatggaaacggatgctatccgttcccacgtcaatgttggcttctgtggtgctaaggaatggacgccccagaatgagcggcgtttcctttttagtgtccatgtccagcaccacgaagtccaccgggatgaagaaatcccgtatcttgaccggaacatcctccgctatcctagatgtgtaatggaccgacgaatcagccaactacaggctggtgttggttccaatatcgtgaagttgagcttatcgaagacgtctttaggcacgatgctcacgcttgctcctaagtcacagagggcttggtcgaattgctgtgtcccgattgagcaggtgatcgtgggacacccggatccttcttttctaggagcttctggagtatggcattgctgcactgctccatcagcttgaccaccttagttgtcggaagcgaccttttgttattgaggatatcctcgagataacacgcgtatgttggcacttgcatagcatccaacaatggcacgttgatatggatcttctgaattacttcaacaaaatgagtgaactgctcgtccactgacggtttcctgcttctttcaggaaacggcagcaaccgggtgtcgtagtactcctgcggcatagtcttctcttgctgaacctcttcgtcagtcgtattaccggatggtgcttctctggtgatactgctagtccttgtaaggttaggatatggcggatcacgagtagacttacctcccctcgttatgatcaccttaacatttctacggaagattcgggctgccccggaatcctcgcagactcatttgcaggtactaacacagctaattgtgccagctaagtttcaatcatcttattaaagctcagctgattttggaatgcagaagcaaagccatctagcttaacatttatattctctaagtccttgtcattagcagctagctttttgctaagagcatatgttgttttagcttgcgcaaagacgagatcttcgaaggagggctggttagaaaagttaccgttgttgttacctccttggtaatatgggcatggctggttccacccctgacctccttgtggacgatacccattattgttgttgcccatgtacatcgcctcttcatgggtctccgggcagtcattcctagggtgacccgtgctgccgcggacctcacacgtgacgtgtgagtccaaggccttgacggtgccttgtggcctcttgtcatggtcgtccaagcgtttcatgaggaagtccagcttggcagcaagaatctccatctccttgatggtgtgcactcctcgctgacgggtctggagtcgttcctcgctccaacccatattggagaccattttctctattaaatcgatggcttctcgaaccgtcttagagaaaaatgctcctccagctaccatgttcaggtggtcgcgagacatgggagtgaatccaatataaaaattttgcaggataagccagtcgtccattccatgatgaggacaggcggccacatattcctgaagtcgttcccatgccttaggaatggactcgtccgtcgtctgctggaagcttgaaattcttccacgaagggcgttggatttgcccctcgggaagaacattaataagaatgccgtagagcatttgtcacaggtgttgattgtagcacagttggcataaaaccactgcttcgcgttccaaaggagggaaactggaaacagccgtagcctgatggcgtcaggactgacttccttcatagtgtacgtgttgtagatctccaggaattgttgcaggtaagcattggcatcctcgttaggcttgccgcagtacgggctagcctgcgccattgtgataaggctagacttcagatcaaaatccacgtctcccatgttgatttgcgagccaatggccacgttgtcagcagagggagcaacgaattcacggagggtcttgtcagccatagtcttgaaggttagtggcattgttatggctggtttctttatcgggagagttttttgtggagcgacgactctcggcttgacgctccgaaagaaagcttctggattttccttaaaagtttttcggcaagttgaaaccagtcatgcactaccctgtttccacaacaaaagtgataacaaccaaggttagcctacaaaggacagtgattatacagaggtaaatagaaagtattagtattggtaatctcttctataaatcttccccggcaacagcaccagaaatgcttgttggtatttcttaacgacattactagaaatataattcccagcaatggcgcagaaatactcctggtatattatggttatagagttcatccacaagcgcatggatataccattgtagcatttcacccgagagtattccaagggtatcgtatttatttaatcccgtgggaagattatagtagacagaaccttactaataattcatatgttacttgtaataatcatagtctaagcaggggttaatataattcaaagggtagcatggcacataagcataagacctctcattctcctattaagttatctaagctaagtgggaagaaaatagaaaagaatatattcctatacttctagtatacatattgttgtcgaatcaacaactgcgtcacgtcgaaggacgtggttcttttaacagtggttggaagtaaagacaattgtattgcttagtaaatttttttcaaatccccctgttacatggcggtttaggctttacagggaaatttacatggttgcccttttaatagggacatctttatgggtatacagtgtcttttgctcgtatgggttcctaatgggccaagtgacatggccttgtccctggcgaagcctctggaaggcgtgtcggcccgctgggccttctcctggcaatgttcaataattggcgaaacccatgccctttgtggcaaggctctcgcctcgcggccttcaaccattcgcccctccaacagggtccatctttggcgaagcttgtcaaattgatgctgcggctttcgcctatgttgtcccttcgaccttcgccgcttgcctccgtcccatgcctttgcctatctcctcggttttggtaggcctggtcgaaggtcctcgtggtatacctccaacaagcccctcacggcaagggtgagtagggagcttcggccgaggctgtgcaaatcgtgtggtataccatgaggcgcctccttccggccgatgttcctgccgaaacctatattttgtacttgcgaaaaagtctggcgttttgcattagcagatctggtgatcaatgttctttcctttcctcgcttattattggtgaaatggttgaatatgttgggattctcgtgaacagtaatgggctagatgagccggtctgccgttactttcggcctttcactgttcggcctgccttaacgtggcagtcccttactgggtggtaggcgaaccgtcgcacgggtgggttatatatatacttccctcccggcgtcactttcacttttacctctagtcactttttccatctcctctgtggctggtatcgctttgtttctccttgcgttcacgggcttttgtcacctacttcggccagcgtgaccttggctcttacatcgggctttccggacttttcgcccatggcccctcataaacctgctcttgctttggccattggtcctgatctggggaagattggcagagatcacaccggatatctcggcgcttcacttatcaatgagacggagttgacgaagctggttttggctagggtcgtggccgaaggacaagccttcgctcctggcaaggtggtggtgaagcttggggacaaccaaaccgtggtctttgctgcattttcgatgcggggcttcgatttctgtgcaacatcttgctgcttgagatacttcggctcttcgagatcgaattgccccaacttagcccgtgcgctctggttcgggtcgccatcttcgactgggcatgtcgaaccgcgggtttcgagccgaccgctgagctttttggggcgatcttttatgttattgtcaactcgaagacggtggtcaccctggccggcacctggaggacggtcttcgggagcacaaactttaatttccgccctgagctctccgatttgtggcccgtgaatgcatcgatgcctaagtgggatcgccattggatgccgaaaaggttttacaacagcattccttttgaggccgcatcggatgcagccaaggccatgaagtggcagcgtagggccatcgtgcgtattcggaagcccaaagtggcgatcgacagtgcaatggaggctcacttcgccccacttcggaagactgctctttggcttagctgtcgtgtcttggtggaagagttttgtatgctttagattcttcccctttcatggacatggcaagtcgaagttgacaaggaggaggaggcggatggcttgccgaggctggtgctccctgagggggtgaactgtgagttttctatttaactcgtgatatcgttattttttgatgttgttgcttttgcctatgcttccaccttgtactatgctcattccttttcccttacttcgacagtgctttcactgcctcaggctgaaatcgaggcccaaataatgatcgaggagctcatcataaacaagtttagccagctgctcacccgtcagacaggcggcaaaccgtattttttctggcgagctgccgagccgtgcaaaccctatcaaggtcgtcgtcatcgacgcagatgatgccgaaccatctaggaagggcaagcgggcaagagggaaagctgcaccgcggaaacacagaccggcatcctttgctgactctgatgctgacgaggaggaggccgaaggcgaagaagagggggaggaggatgccgtggatgagacgggtgaatatctgttctcccccagacacgacccaggccatgagcacgtcgaggcgggggcagcttcgagctcgtcccctcttcgcagaaggagctggagtgggcgaaggctttggccgcaattgcggggattgctccgttaaatgtcggagcgggtgcgaagagggctacgagggtggttgtctaagttggcaacgcgtttagagacagtgactcatcacaggacacccccacttcgccagccgggtgaagcccgagtctgccggccgccgccaccgcagctggttctgccggtgaggtgggtgggagctccgggcaggtgcttctgcttctgccgaaggcgtcgtggaagcggcctttgtggcattcgaaccccctcttcccggcccccgcctttcgccacttgaacccccatggggaaaacaggcagcgactgagaccttgggttcggacaactcgctgtccgccccccgctttgtctcgtctaacttcgagacccgggcggagcttgttccttttgtgaagggggtgttgcaccttatttcgccggtgggcggcctcgttccttttacggagctgaacgagtttgatgaaggatgcactgcggcaaaagcctgctcgttcgggtacgaacgttgattgctctgtttcctttttgttatacgtggtcccatttatcaaactacttggttgtttaagcaggctctttcggctcaatgctcaatagagtagatggcgagggtctacctggatagctacaagtcccagcttcgttcgttggagggagagctgggccgaaaagaccttgaaaaggaggcgcttgtgagttcactaaaggatgcgaacgccaagatcaaaagacttaggcttgagctcaagaggaaaaaaaagggaaactcagggccttgtggactactataatgattccgagagcaagatgaaggctcctcgccaggaattggagtcagagaggaccgccactaaggatgttaccgacgaggcgaagaccgcctgccataccctccggttggcgctaactgatttgggggccaaggttagtgaagttcctaccggggacgcctccgtccttgccttcatggagtggacccaacaggcgggcagcgccatggctgagactgccgtcgcttatggcgattgctacgctcgggtgtcggccaccttcgctttgggccttttggagcaacatagctgcgatcacattgttgacttcccaagacttgccaaaggggattggtcgatgagctctcaagacgtttcgacacctctacgttaaggctgaggttaaacgtttctatgatgctggttttattcggccttgccgatatgctgagtgggttttcaacatagttccagttatcaagaaaaacagcaaagtcagggtgtgcattgatttccgagacttaaacaaggctacacaaaaggatgagcatccaatgccggttgccaatcaattggttgatgctgcttcagggcacaagatattaagttttatggacggtaatgctggttataatcagatttttatggcagaagaagacattcataagatagcttttagatgtcctggtgcaatcggcttgtttgagtgggttatgatgacttttggcctaaaaagtgttggagctacatatcaacgggctatgaactacatatatcatgatctaatcggctggctagttgaagtctatattgatgatgtggttgttaagtcaaaggaaatagaggaccgcatagccgatttgaggaaggtttttgagagaactaggaagtatagcctgaagatgaaaccgacaaagtgtgcttttggcgtatcggctggccagtttttgggatttcttgtttatgaaagggggattgagataactcagaggaatgttaatgcaataaaaaagattcaacctccggaggacaagacagaattgcaggagatgatcggcaagataaattttgttagaaggtttatctctaatttgtctggaagattagaaccttttacaccattgttcagattgaaagccgaccaaaaatttacttggggggcagagcagcagaaggctttggataatataagaatgtcttagctctcctccagttttaatccctccacaaaaaggaataccttttagattatatttatcggccggtgagaagtcaatcggctcggtcttgattcaagagcttgaggggaaagaaaaagttgtgttctatttgagtcgtcggcttttggatgtagaaacaaagtattctcctgtggaaaagttgtgtttgtgcttatatttctcctgcacgaagttaaggcattatctattgtccaatgaatgcactgtaatatgcaaagccgatgtggttaagtacatgttatcggctctgaatctgaaaggaagggttggaaagtggatatttgctttgacgaaatttgatcttcggcatgagtcatcgaaggcgattaaggggcaggctatagccgattttattgttgatcatcgtgatgactcaatcggctcggtcgaaattgtgccttggactttgttttttgatggatcggtatgcactcatgggtgtggtatcggcttggttataatttctcctcgtggggcaagttttgagtttgcctatactgtcaagccctatgcaactaataatcaggctgagtatgaagcggtcctcaaggggttacaattgcttaaggaggttgaagccgatgctgttgaaattatgggtgattctttgttggtaatcagtcaattggccggggaatatgagtgcaagaatgatacattaatggtttacaatgaaaagtgccgagaattgatgggtgaatttctgctagtaactttgaagcatgtatctcgagaacaaaatgtcgaagctaatgatttggcccaagaggcatggggatataggccgatgataaaggatgtcaaagtagaagttgccgcaataagagccgataattggaggtatgaggtgcatcattatttacagaatccatctcaatcggcttctcggaaattacgctatgaggctttgaagtataccttattggatgatgaactatattatcggacgattgattgggtgttgcttaaatgtttgagtgccgatcaagctaaggttgcaataggcgaggtacatgaaggaatttgtggaactcatcaatcggctcataagatgaagtggttgcttcggcgggcaggatatttttagccgacaatgttggacgattgtttcaaatattacaaaggatgtcaagattgtcagaagtttggagcaattccaagagcaccagcatcggctatgaatcctatcattaagccatggccatttagaggttggggaattgatatgatcggtatgattaatccaccatcgagtaaaggacacaagtttatattggtggcaaccgattactttaccaagtgggtagaggtgattcctttgaaaaaagttgatttgggggatgctatataatttgttcaagagcatattatttatcgatttggtattcctcaaactattacaactgatcaagtctcgatttttgtgtctgaggagtttgttcaatttgccgataacatgggtatcaaattgctgaattcttcgccatattatgcacaagccaatgggcaagccgaggcatctaacaagaatttgattatactaattaagaggaagatttccgattatccttggcaatggcatactagattggccgaagcattgtggtcctatcggatggcttgtcatagttcgacccaagttcctccttataagcttgtttatggacatgaggctgtttaacatgggaagttagaatcggctgaagaagaacggagttgcaaaatgagttgatagccgatgagtattataatctcatggccgatgaaagggaagacttggttcaatcaagattgagagcccttgtaaaagttactaaggataaggaacgcgttgctcgacattacaacaagaaagtagtgcccaagtctttttctaaaggtgaacttgtttggaaattaattttgccgatagggactcgagatatcaaactcggcaagtggtcaccgaattgggaaggaccgtttcaaatccataaagtcgtatctaaaggagcttacatgttgcaaggacttgatggagaagtttatgaacgagcgttaaatggcaaatatttgaagaaatattacccaagcgtttaggttaatgcatgatgggctggtgttgccaatacatgacaaccgatgtgtttacatcgcctttagatggccgatatggttatatcgcccttagttgtttttatattgtaatcggttgtgttttgccgatgtacaattgccgatatagatatatttcccttagttgttttttattgtaatcggttgtgttttgccgatatacaattgctgatattgttatatcgccctcagttcaatttataattttgtcaatgccttcgtcattgtaaaattaggggggcacatatatacaaaagttgcaaattttttgagcaatattaatcggcatagtaattcagtcacaaaatgagtatcttagccgattacaaaatgagctatcctattacaagaccaatcatccagacaagtaacactggatagccgacacagtcccttgtctaatttgatctacttctttgatagcttgaatgtcttcggcatcggttccagagatgactttgagggacttggtcatgtcagccacatttttgatagccgatctcaatctagacttctgttcttcaatagcacttgggagattggctagcttctgccctacttgatacaactcggcattgcattcttcaagttgagctataagatcaatcttgcgagcttcaagccgatctatgttcgattgaatcggcctgacagagagctgatctaacttagctttctcttcgtgcacgagttgccgattggcttggatagtgtcttcgatatctttccggtcccgccgatcggctatccgttgcttagccttcttcaggttgaattgatgttgctcgaggtatatagctggagtaatggtgtttgccagatcgtctgggatttgggcttggatttctgcaaaccgtgcctgaaatgaaccacagtccgccaccagattatccaatgatgactctagccgaagggatatgtcttcaagtattttcttgacagtttcatccagaggggctagagccttgctggtggattcatcttctgcttcttcatcaaagtaatctttgatgtcaaaagaaaatagatcggctaaggcctgcaaaaagagaaatttgaagatagttaggtatcaattagttttagccgatctaagatcttatgtcaatgaaagacttaccgggatggcaggagcggctggttgttcttcttcttcaacatggtggcttcctgtagtcgatggggtacagtcacttgacatctgttgcacaggtggtgaaggaggaggaggttgcaaaaagacaaagtgttaagtaaatatcggctgtgataggataagtgaaaggatttatatatgacaatcttactggtggagccggtttaagcgttgttgctgctgatttcttcttttcagcgatcttctttttcggcaaatgggaaattgataagtaatcggctatgaataaaatgattgcaagaggaaattaatgtgagtgatttacccttgataagtgagccgggacagcaggagttggaggagtttgttgggcgaagccgacggtgttttttctcctgtatcactcaattcggctgctgcctgatcaacgtcctcttcaatttcttcttcatccagagcttgctgaatggatggatctaaggtgggcaagtcatcggctagcttgggtttgtgcttcttggccttcttcatgggagccaaagccgatggatcgattgccggtgccttggtctttctcttcctgccaacatcggctggttctctcatctgcccttgaagcaaacttgaggtcttgggggcatggtagccgatgacaggaggagttaatccaccaccatttcgcaaaaggcccggagcatattctatgtctttgccactgttgctcttgcgtggaggagaagattctgttgtctgtaaggtatagagagaaattagtcaagattcaagtcggctaacaatcatttaaggaaaattgacaaagtaaagatgtacctgagggactacatcgggaaataggtctgtcatatacatagaggccaattgatggaatatgtgttgcttccattctccccagcatctgtcaaagtttttgctcctaaactttgccagctctatgttatcaatgctgcccaaaggaggtcctgggatgttgagtagccaatccatcatcagggttgatgaaatctctcctcggcattggattttatcggcaaagaacaagccgattggtcgctgtcccattccaaactgtctggcagagctcatcgggtggtaaaactcataagaaacctgtatgtttcttccttgatgaatgccgacaggaaggatgcatgggtaatagcagctgagaagacttctctggatttgtcaaatttttcggagttgatatcttcaaatctgaagtcggctgggagatccaaattgactaaatcttcatatgggaaccaaacccgagcatctttctggaagccttcgtaaaagctgcagaaccaatcgttgagtaattcagccaataactttgctccagcatcggctggtgtggatgcatattcctcataggacatacacctgcggtgggtgcgctcttctccatcaccatctgtaatcggctctaatcttggaaattcagcttctgttacggctggccgattgacagctttcatggctacaaagtttatccaagtttgcagcaaccaccatggcccgcctgcactaacaactgagccaacagcaatcttagccgatgcgttgttcaacatttggtacaaatagccgagaagaattttggccaaaaggaactgcctctttgtctcaagggcttcggctaagaactgccagttggtggtagggccacaacttgatccgcagaagaggaatttctcaagccacatcagaagaaaagctgtgtgctccctaggggtaacaggtcctttgcccatgtatgctgctacataaccagaccagccacctatgctcttggttttgaagtcaaactggttcttggtgtttaaactcatggggttggctgatgaagttacatctaatccagtaatcatggtgatgtcatgcagagttggggtcatcggcccttgattgaacaaaaaggcattggaccagaaataggcagcagatgccatcaggggttcgtcattatccaaatttgccaaagtaagagcaagcgcttggctgattcctagctcatcccaatgaacatgcttgctagccgaaacacgtttataccacacagccccacttttctcaagagcggttttctcgagagaaggccaagacttgaaggtgttcttctagtgacctagattcaggttggctaatctgaaagggatcctattggtttcggcaataatgaattcagtggggttgagattgccgatcagcccaagaaaataatgatgctcgtgtgacaaactcgggattgcaaccagattggacaggtgctacatatgtgaacaagaagagagaagaataaaacaagatgaggcaaggaaaaaccaatctattgcgaaaggaggggatctagccgatgaatacttacctccgcgtattcagccgatggtgcgactgacgggctggcgtagtacgacatctctgtgggcggaagatttgaccggaaaggaaatcgctttgagatcgccttgtgcgccgaggggttcgctggagagagaaaagacaaagttggcttaagcggtgaaaacggagttaacggtgtgaaatttgtcgggatgacggttagtatttaaagcgatgcggtaacggtcggaaaaatggcaagtgcgatatcctctcggagttgagatatggaaaatccgaaacattatcaaatattccggacttggggggcatgttttaacgaccaaatttggtaatccaagtatcggagatgaagatgctatcgaggcggagtttgagatggaaatcattccgggaacagagtaaggatcggttacgactaagatcggcatagttcgagtcgggctaggttagctgattgaaccgaatccgacaatgtgacacggtacacgttgtcaggttgagttaatgtgcttcatgaggattgccacgcacggattgagtcctgagaaggcaattgtatctattaattaggatatgtttggagatatgtttgggcaaaagtcttccgcaagacttatggtgtcttagagttagttagagataagagtcgtgtccgacacggacatattttgtaatctcgggtataaatagaccccgagccttatgtaatcaatctaacactcgttcaatacatcgcccgactcccttttactttcattttgtttcaacgagttcttgctttcgggttgagctgcatcgatttcgatcttcaattagaggtaaaacttgttatggtggcttgcgttctcgggattagtgcttccatctttatgatactctaatctcatttatgtaattcgtcgagttatcatatatcctatatagtctctggcaatatcgttatctaacccccaatcggctaacatctgtcactagaaggcagccgattaggttaaatactgatgttgactttgattatataagatatttaccactgtatgaaacatccaacggcttgattgtctagatattgtccttcttttcatacttatagctgcatcagttgagtttgatcttatacgtcgtgattagaatctcaatctttagcctgcttttggttgccgattacggtagtatcagggtttcagccgatcttacctaatttaactacttcgtactctatatgcttgattgacatgttaaatctgccctttatattacgatcttgttgcatttaagtatattaggcttttgtttagtatattcaacttgctttaatatcttaatatagagtagtatcagagtattagccgatacatgctagatctatctgatcggctatgttatgaacatatatagtcttgttgtgaatatatatttcgatctaagtgatttatactgtctcggcatggcgaccgatctatcccaatcacttgatttaagtatatatcgacataagaattatatattgtaaatgtctatagccgatcgagtagatttagttctttcttacttattcatgattgccgatcgatctacatatgacatcggttcagagataaatgatacgtcatcggcaactagccgatcggctatcatttatggatttaaccgcggtttctttgtctttatttcttgttgattgtaggatcaaatcagctggcatgctcacacacctaaaggcaagcttttggacctacactggagttaagcagatctcccaggcctcgtgtttttacatcaacaccttgtagaagaaacgggagaaaggtgggatcagccctgccatggtgaaggacagaaggtgcacggaccgatccaggtaccgcggccgcggctgcggttcccttgccctcacgacggagccgtccggcatgatcttgcggatgaggctcaagtgtcgctcttccgtgatgtgcgaagacgggagaacaacattcccggcgtgttgagccatggcggccggtgagtatgagcgagaaactgagtaagcgaagcgcggtggtcggaggttgcaacgatagggcgctgaggagcgcgagtgtgagagaaagaatggcgaaaggatgtagatgaattctcctcctccctcactttttattctcgcgtcggccgcgcccgcctcctcgtttttcgtgcccactcgtcctgcttcccctactaaatccacgtcccgtgtttaatgcgcctgtcagcggcaaaatcgatgtgggacgtgcaatgattacggttgcggttgggcgggcccaccattagttccgtcccctcgcgtgcctgatagtcaggcagtcgaggtgatggcaagtaatgattccgagcgcggtctagcagacccctcggttttcctgccctacgcgtccccgtgtgtggcgcagttattagcggtcaagtcatcatcatggtaggtgctcaagctaggcaaaccgatgacggccgtttggactccccatgggacccaccatcacaaaacaggaagttatgagacaccgcgccagaccgccctggtagggttacggtcagatgtagtgctaggggctactgtcggtgatatgggcccggtggtacgcaagatagagggaaagaatcctttcatttggccacgtggctgcatggcctgttcctaccccctcaggggagaacgagcgctcgtgaagcggccaaagggcctcggggtgccctgttgcacccctcgggcccttggagcgcactgccccaaggccctcacttagctaccacgtggcggccgagtgggcagagggagaggcactgccaaacgccttaaatgagcggtgccccaaccgtccctcaccgcgtttaatgtggcgtgggcggacgtgaggcgccgcccgattgacgtgcgtcaatcgggtttgactggtctatgaccggtcacaggcgcatgggatgggtggcagcgcacccacgtcccgccccctgtcaggcggagtgggggcaggtatgccccgtcccatcggcacgcagtcgagcgtgccccccatacacgaatccacaaaagtctccatggaattaagagggaatgacagggatgtcccccgtgtcagccggaggatggcactgggacccacctgggggcgaacgaccgccttgcttccggtcgaaggcatggacggcgtcttgacctaagacatgtgggcgcccatccaatgatggactgtgtaagacggtgcatgtggtattcccttgaatttattcaaagtgcctcggccgaagatggcgttgtagttgtacgggatgtcaacaacatcgaagagtatctcttcttctctcttgttttcttgtgtgccgaaggcgactttcaagagggcttgacccaaaacttgcactgcttcgcctccgaacacccaagcgaatttggtacttgagacaacgccagggtcggtagtcccatcttggcatacgttctggcgaaaatgacatcagctgagctacccccatcgatcaagatacgccaaacttcaaaaccgcccatttgtaccgataccaccagctggtctttgtgtgggaacagaactacttcggcatcctctggtccgaaagatatctactgcgtcaagtaccttggaaccccttcgcctgccgaagcaatgttgtgcattgctcggagttgcatctttttctagcatttcgacgcctacgaagggcgatcagatcttgtgatgacttggatcactcttcattgtgcatcttggcgctgttcggcctggggtgcttggacatgaacagcttcgcgaggcacctcttcggctctgactgtctgcttccttggagcttgagtgttgccttgctatcggatatttggacattgctcaattgtgtgtgaagagcaaccgtgaaaggcattgtacaaatctttcttgactttcttgcgaaaaggttgttgctggcagactacttgctgtgcgtctaactccttgcggagggcttgcacttctttgacagccatcactacctttccggcgcgatctattctgaactttttctaggtcatcggaacttggttcagccttggaggctgcccttgattcgccggaggtgaagggcgaaccatcacaggtgtcgaactaatggcttgcttgagcttgggcctaagcttgagcttgtgcggtggcggttgcggtggcagctgccttgtcgtatttggcttggatttcttgccgccacttggtatcttcttcacctcgagcataaccatcgattatgcgaaagatgtgttcgatcgtccttgtttccttgcgagcgatttttcttgtgagttcacccttaagcaagctggccaaagctgcgttgatgacagatgcttccgttatatcttgcacttggcaacgcgcctgcgagaaccggcgcatgtaatccctcgtcgatttccctggcctttggtgaatgccaaggtcttgttgggtcttcggctcctcacaggtaccacgaaaattaaggacaaagacatcgcacaattgctcccatgagcaagtgctattaacaagcaagttaaagtaccaagatttggctatgccgtcgagcgcgagttgaattacctttgccttgatattctcatcaccatgagcagattcaattgcggattcgtagatggaaaggaactcttttgggtccgtttctcccgagtaacttgggacgggagggtacttgaattgggtggggaaatgggatgactcttgattccccagcttagtggcaaacccttttcgccacacggctttatcactgcacgatactgggaggaccagcttatctgttggtatggaagtgcgaatggcgaagttacggcttgcacatggggttggctgcgggtgttgattgatgccccgtgccgaacaccaacgcctgggtctgctgaaccgtcgaagcggcttgcgccgccatagttgggtcgatcatggctcggttccaggcttggttcggcggtggaactgttccaaacccgggaggcacgacatgcatgaaggtcatgggtgcttgaatcgtggcgctggggttgaactgtggtagttggcttcgaggcgtagcaccttgagctagctggttcgcctgacttggcatggtgaactggcctaacagttgcccggccggagcaccctgacttggacttccctcgacttggaccggaggcaaagttcttggtacattgttgttgggttgattgagctgctgtagaaaatgcttgaaactaggcttgcaaggccaaagctgcctccatcattgcttggggcgtatgagtaggcttcaagtactgtacttgaggtgctaccaggcgaaccggcaccgaagtcatgtgaggggtagggcgcgcggccatagccagagcggtcttggcgaagtacattggagcctgtacaacttgtgcaacatgcggagggaaagcttggggctgtgtgtagactgtcgaaaactgctaggcattagccttggcttgtcttgccgcttcgtacgcctgctgctgatcttgcatttggcgaagcgtgtcctacaacttggccatgttctgccgcatagcccccatgtcggcttcggcttgggcttcaaggttagcgttggcttgtgaggcggtgagtgcggtcgaagtggtagcatgctgcgacgaggcggcggcttgagacgcccctagcacttgagatgaaaggattacgtccctaatctggagcgccttcgccgcggccgctgctttcaccgtctcctggtctgtcgaagtggtcggcgccgaagatgggagagaaggcgctgccaccggaagcagcgcagctcctgcttcggcgtccgaagccgaaggctctgctccctcttcgccaaccatctccccctcgctgtttccttcctttcgcttggctactctctccttagcgatcttcttcggtggcatcagtggtttcgctcttactctcaatggttgtgctcggaggtccccacggacggcgccagctgttgtcgaatcgacaactgcctcatgtcgaaggacgtggttcgtttaacagttgttggaagtaaagacaattgtattgctttgtaaaaattactcagatccccctgttatatggccctagggggctacttatagccctattacagactctccctttagggtttaggctttacaggagaatttacatggttgcctttatgatagggacatcttcatgggcgtacagtgtcttttgctcgaagggctcctaatgggccaagtgactcggcccagtccttggttaagcctctgaaaggcgtgtcggctcgctgggccttcacctggcaaggttcgatacttggcgaaacccatgcccttcgtggcaaggctttcgcctcatggcctttgaccgtacgcccctccggcagggtccttctttggcaaagcttgtcaacttgatgccacggcttttttcatttggctttctcctatgttgtcccttcgaccttcacctcttgcctccagcaagtgcctttgcctatgtccttggcttcggtaggcctggccgaaggtgtcacgcccagaaattcccaaatagaatttcaagcagaatgtgcattaaacccctgtccaggactggccagggtacacaaacgacaaagttaacatatagatccacgtcttacaaacattataaaagtcttacataaatgcagcggaaattaaaagataactggagctaagccttgacttggatagtagcaggaacaccactccacaggcatcctcgacgggacggacgaagcctactccttggagaaaccaccatcggacgcatactcgaactctaagggttgggagatagagcaacactgagtactacacactgtactcagcaagtcataccggaaaggagggtatgatgcaatatataaccaaaggaaggcttaaggggatcatgtgcataaagctagcatttataaacggtagttgaaagcagaaaaacaattgtaattattaatcaatattaaatcaatcactgctcaatgctagaccacgttgagacaggcccacaccaccacctgcactaatcagttccattaactaactagggatgagactaatcacggtgaatctggttgaccgcccataaccgcgggcacggctattcgaatagttttactttgatcagaggtgtacaactgtacccacaagacacatccccacgacacgttctcgtgcgcccacatgccaccacgacataccggaaaaaggccatgacaggacccttcgcataaccccctctaaccaaaaacaccacacctcaggtttcaccaccactcctcgcaaggcagcgggcagtcccctctcgtgcctaggtgaattcggaagcgacaaaggccatcgcagggcccatcccgctccatcacgcccacccttgcctggatgcgtcagctagaggaaagctacactacaagcccagccgttgcccacgctggcttgtggtaagttagaggaattcttccatggtttcccgcgaacctgtccttaattgccatgggtgcgccatcaaaactatgcacccacaacccaccatttaatatattttaattagccaacaccagagcggtggcactaatccaacatcagtacaagaatctgaagtctatgcattaatgtaaatcccccattgtgtactagtagaactaagcatcgctaagcaacccctaatccaacatctagtcatgttacatccccaagctaacaacggaacatgataacgaatgataaggctgagacagtaggtaaacaacccatagtaacattataaaacaatgcaatatttaaaggaaaacaatagagcatttgcaatatgggatcaacatgttcaagagacaagcatgacttgccttgctttgcagctggagggacctcggcgactatctcaaagtacaccggagcgtcgggagattcgaaatctatgcgacatacaaagcaaacaatgcaaacaggctataagactattgaaacagagaacaaaacaatttttaatggactctttgcatttttcagatgcgctggtccatggtggaccgagtccacgggaccggggatgggagtaccacgcggcgtcgacgtggcaccgacgtggcggccacgcgggcgtcggatggacggccccgatctacctgagaacggcaaagacggcgtgcggccgggtgcacacgcgggcagcttaagccggcccggtggcctggcgcgcggcggcgcggcgccgatggaggcggcgcaaggcggcagccgacggcggcgagcggcggcagcgcggctaggcggggacactaggcggcgatgcgggagagagagaagaaggagggaggcctaacagacgatgacgagcgacaacgagtggcggataacggcggcgacgatgggacgggctccaggacgacctgaggaacgaaccggaagggattagagagggagaaacggagtgagacgggcagagacgccggtcgaaggcggcgacaatgtcgagctcaccggcgcgcgatttaaggagggctccggcggcgaaattggacaggggaggggtggacggcgtggcccttgggctcgtgaacccgacggaggcaatggcgtcgcttggcggcggctctaatggcggcgagcggtggccggaggcagttaaaccggcggcggcgggtggtgcgtggcgctaggacggagaagagctcgggagcgggcgattgcaatgcgaaaaagagagaggaggggccggggatggtttataggctcgggggggcgagtcgtggccgggaggcgtgggaatcggccggcgacgtgggggaggtggggaggagagaggcgggattcgaaaatcgaatcccggccgtctcgagcgcgggcgcgggtgcgggcggggaagtggggcagtggttgcggggcatgtgggaggtggcgtgggaggcgggcgacgtgggcggggatgcgcaggagaggtgggagcggcggttatgggcgcggacggcgccggccgaaggtaggggacgggtccaacaggtgggccccacctgtcggtgacccggagaggggaggggcgtgggcggctgctggatgggcctcggcctcgggctagcccagctggcgcgcgggagggggaggggatgtgggccggtggcccaaaaggaaaaaggagggggaaaaagaaaaggaaactgaaaaagggttttttccagggatttaaataatgcttgttctcgatgttaattggttaaatttatttctagagctctgaaaattccactaaaaatcctgttagcatattttgacgctaagaacccaagaaaatttccacatgccatttccgattattatttgtgttaattaaattaaggtttgtctcttgcttttacacaggtaatttcttcagaccatttattactttgatttaggcttgggaaaagaacttcagggtgtgacaaacctaccctccttaaacgggatctcgacccatagattgggaggagctggcgaagaggtacggatgggcggcctttaactcatcttccctttccgatgttgctttttcctcggagtggtggctccactgaaccctgcagaacctgatcaccttgtttctagatctcctctcgctggtttcaagaatgcgaactggcttcaccacataagtcggatcttcttgaatatcgatgtgctccgaattggcttgctcttctggtacccttaacacttttttaaccgcgatacatggaacacgtggtggatgccagccatgttgagtggaagctcttgctgatatgcgacttttcctcttcgttctaagatcttgtatgttgcacgaagcgtggtgccaacttacctttcgtctggaacacgaagatacacataatcccttgcttcaaaggtgagctcccttcagcggttattagcggcactttcgaccatacaatacttcaaacggtgccatttgcaaattgttctgatagctgttgttgtaagagaattcagcataaggcagacttttgtcccaggctccgccaaaatcaagtgcacaagctcttagcatatcttccaaaatttgattgaccctctcggtctggccatctgtctatggatggtaggctgtgctgaaattcaaatgggtccccaattctacttgcagcttctgccaaaactttgaagtgaactaacttcctcgatcagatacaatcttcttaggtaccccatgcagacacatgattcttcctaagtacagctctgccaatttcttccccgtatacgtggtgttaactgggatgaagtgagcaaccttggtgaggcgatcaaccaccacccatattgaatcgtgtcctgacgatgtcctaggcaaaccagtgatgaaatccattccgatttcttcccatttccattccggaatctgaaggggctgaagcagtccatcgggtctctaatgttctgccttaactcgctgacaaacatcacagactgcgacgaactccgccatttccctcctcatgctggcccaccaaaatttttctttgagatcctggtacatcttggtactgccgggatgaatggagtattgggtctgatgagcctcggtgagtatcaggtctttcaactccttgtcttcaggtacgcaaaatctttctcccaaccagattgtgccatgctcatcctcatggaaatcacgggcttttccgaacctcatattctttttcagttcagctatttcaggatcatttacctgaggtgctcggacttgatccacgagcgtgggtcgtgcttttagggcagccacgtacctatgttccacgattcccaaattgagatgttcaagctcttgttgcaatttgacgctcatgtcttcaaacccaaggcgttgcagtagttcttcctgctcaaagcgtctgctaccacattagctttgcctagatggtagtgtatccccatgtcataatcttttatcaactctaaccatcttcgttgtctgagattcatgtcaggctgggtgaagatatactgcaaactcttgtggtccgtgtaaacttcacaacggttaccgatgaggtaatgccgccagatttttagagcgtgaaccactgctaccaactctagatcatgagtaggataattgctttcatgtggacgcacctgctgcgaggcgtgtgcgaccacttggccttcttgcatcagaacacatcctagcccttggcggaatgcatcacagtagacttagaaatctttcgattgatcgggcagaatcagaacttgagcagacactaatttcctcttgagttcctcaaaactcttatcacactcagctgtccacttaaatttctcatctttcttaagcaactgagtcataggcctggcaatcctggagaaattctcaatgaaccgacggtaataacccataagtccatggaaacttcgaatctgggtcactgtcttaggtggggtccactttgtaactggctccacattcgatgggtccactgccactccttgagcagtaatgacgtgaccaagaaatttgacttccgacaaccagaagtcacacttactgaacttggcatagagctggtactcttgcaacttctcgagtaccagacgaagatgttgctcatgctcttctcccgacttggaataaataagaatgtcgtcaatgaataccacaacaaacttgtctaaaaattccgtgaacactttgttcatcaggttcatgaagaaagtcggtgcattggtaagtccaaaggacataacagtgcactcaaacaaccttgggaatatcctcttcccggattctcaactggtgatagcctgatcgcaggtctatcttggaaaacactttagctcctttcaactgatcgaataggtcatcaattctcggcaacggatacttgttcttgatcgtgacctcattaagtgcgcgataatcgacgaacatcctcttcgtcatgtccttcttctccacaaaaatgatcggagcaccccaaggtgaagtactcggtcggatgtatcgtttctgctgctgttcgtcgacttggttcttcacctctgctagctcattggctgccattctatacggcctcttgtagattggagcagttcccagtgcaaaatcaatccggaactcaatctctctcttgggtggcatggtagtgaggtcctcggggaacacttctggatattgatagacgataggaatatcttccaatttcgtcgaactcttctcctctgcggtcacagaacttttcgcctcaaccagattcaatgaggctccttgcttgggtgaggctggagacttgtacaccactgtttctcctttctcattgaccaaggtgaccgtgcgattcacacaatcaatgacgcccttgaacatggtcagccaatccatcccacgaatgacatctaggtctttggattaaaaaagaatgaagttggctagaaattgtgatctctggatttctattaccacggaggggctataatagacagaggttgaactatttcccggggtatgaaccctcattggtgtactaagttcttcccttcttatcccattcaccccaacaaacttcttggaaatgaatgagtgggttgcaccagaatcggaaagtactgtagcagggattgagttaacaggaaacgtacctagtacaacctctggtgctgtttgtgcctcctctgcagacgcatggttgacgcgggctagaacaaaccttggcccggcacggcacggctttgggcacttgtcagcaaagtggccatgctcgccacagttgtagcagggccctggctttgccccggtctcctttgcttgagctggtggagctggctgtgctggtgccattagcgggcgcggagctatgctgcggttaagctgacctccctggtggttctggctgccactggcgccttggtggaagttgtcgaaagggtaggggtggtgttgtcaaacaatcatggtggtgggtccaccttgctgtccggaagtgaaacgcggcctctggtgacttccctgatgtgccctgaactaagcggccttcctattcctgtccatcttgttgagctgatcctcctggcagattgccttgtccaccagcttctcgaagtcagcgtaatccttggagatcagctggttggttagctcgtcatccaggcctgccaggaatttctcctgtttccccgcgtcggtgcggacatcttccggtgcgtatcacgctaggtggttgaactcatgcaggtactcagtcacggtcttgcttccctggttgagtgccgggaattccctctttttctgtgccacgaccccgtctggcacctgcgccttcctgaagctgcgacagaattccgcccaagtgacttctatgcctggtggacgggtagccatgtggttgtcccaccaagctgacgcaggaccctggagctggtgtgtggcaaaggcaaccttcccctgatcattgcactgcagaaggttgagtttcttctctatggcatggagctagtcttttgcctccaaggggttggtggtgctagagaatataggtggcctgactcgtagaaactctagcagcttggactgaggggtagggggaccaaactgctgctgctgatcggcctgctgttgcatcctctggtgcatctgctggtgccgctgctgcatcatggccgccatcatctgggtctgatgggccatcacttgtgcaagcgtcgggttctcggggagcggtggcggaccattgctagaggggctgttggggtgcccaccatcggtgcgttctttgctgctgctgccctcacctgctgcacgactgccattcctggtgttgaccatctgaaggaagaacagacggagcggatggaaaagaagaaaaataggggctcaggaactaagctttattatataggaatttaaattgcaattgctcggaatgcagtcgacaaacaactactaaggcgtcctcctgcttgtcgcctggtccctctgagtggctcctggagtactctagctggtaggtgtcgccgctgcatgcctctgagctagaactgctgatgcacgaccaccactgggagaagctagcagccatactccactgccacctactggacccctgtaagctgaagctggcacaaaggagagggcatatgctggagttggcgctggagcaggagcttggactggagctggagctgcgggaggaggtggaggcgggttcctgggcgcgagctggatgcgcacgggagctgtggccaacttccttggcatggtgcggatgcgggctcctcctggcggtgggcacccctgcagcctggctacctgcttcttgaggcaactgttctcatcctgcagctcggcgatcctcacaagcttcttgtcgttgagcctcttggtcgcccggtgaagcatagcgtgcagcttgttgtagccttccatcacctcactcatgtggccgaaggtgacgtcgttctctcgccaagctgacttgaaggtgccggtgttggagctggaaccgcgacaagggtggaagcagtaggcggtggtgttcagggtgtcgtcgtgcagctccctcaaatgggccatcatcctgagggcggcctcctcacaagcatgctcaaatgtgccccggcaagctgtcacctccatgttgggtaggtaggaggggatgccgtgaagctccaagcggacctggtgtgggaactcgccactgagagggtggatgctgctgtgctgcggctcccatggaaaaccgatcacaaacgccatgcgggacagctctgcgatgaatcctcccatagtctgaccttggtgtgttaggggacagccggccatctatagaagacaaaggatggagagtcaatgcatgctcaaacccaattataaaattaacggtaaaggactcaaataaaataagcgaataagagcggaattttgtgcatagatcatttttgcatgagagcaaataaataagactgacatacatagcaacaaaataatgaggaattagatacataataataataatagtaataataataataataataataataataataataataataataataataataataataataataataataataataataataataataataataataacaagagcataaataacctgcaacccatattccttagttaggacctaaggcatacctcccattaaatcccgatatgtcccagataattttactaaaaccataggctgacctcatttgaacaaatttcaatgaaacgagcgatcatgaatttttccatgaacccaaggaacaaatccaaattttcccgaaacaaatccaattgcaaagaacatatgccaatgaaaaggattgggagggctcttagggtttctatttggcttatcctactgtaaaggtcggctctgataccaacttgtcatgcccagaaattcccaaatagaatttcaagcagaatgtgcattaaacacctgttcaggaccggccagggtacacaaacgacaaagttgatatacagatccacgtcttacaaacattataaaagtcttacataaatgcagcggaaattaaaagataactggagctaagccttgacttggatagcagcgggaacaacactccacaggcatcctcgacggcacagacgaagcctactccttggagaaaccaccatcgaacacatactcgaactctgagggttgggagatacagcaagactgagtactacccactatactcagcaagtcataccggaacagagggtatgatgtaatatataaccaaaggaaggctaaaggggatcatttggataaagctagcatttataaacggtagttgaaagcagaaaaaaaagttgtaataattaatcaatattaaaccaatcactgctcaacgctagaccacgttgagacaggcccaaaccaccacttgcactaatcagttccattaactaactaggggtgagactaatcaaggtgaatctggttgaccgaccataaccgcgggcacggctattcgaatagttttactctgatcagaggtgtacaactatagccacaagacacagccccaccacatgttcccgtgcgccgacatgccaccacgacataccggatagaggctgtgacaggacccttggcataaccccctctaaccaaacacaccacaccttaggtttcacccccactcctcgcaaggcagcgggaagtcccctctcgtgcctaggtgaatccagaagcgacaaaggccgtcgcagggcccatcccgctccatcacgcccacccttgcctggatgtgtcagctagaggaaagctacactacaagcccagccgttgcccacgatggcttgtggtaaatacgaggaattcttccagggtttcccgcgaaccggtccttaattgccatgggtgtgaccatcaaaaccatacacccacagcccaccatttaatatattttaattaaccaacactagagcggtggcactaatccaacatcaatactagaatctgaagtctatgcattaatgtaaatcccccattgtgtactagtagaactaagcatggctaagcaacccctaatctaacaaatgataaggctaacatgttacatccccaagctaacaacggaacaggataacaaatgataaggctgagacagtaggtaaacatcccatagtaacattataaaacagtgcaacatttaaaggaaaacaatagagcatttgcaatatgggatcaacatgttcaagagacaagcatgacttgccttgctctgcggattatctcaaagtacaccggagcgtcgggagagccgaattctgtgcgacatacaaagcaaacaatgcaaacaggctataagactactgaaacagagaacaaaaccatttctaatggattctttgcatttttctggatttactgagacttgaatgggcttaaacggagcacagatgaattttctatgaattttagaagattcactttgtttttacaataaaagaaaaaaccttaattggattattgcgcattaattaaccccggatgacgtcagcgaaggggggggggggggggcggcgccggcatgcgggccgcacatgtcatcggctcggatgtgccggtccatggtggactgagtcgacgggacaggggatgggagtaccacgcggcgctgacgtggcaccgacgtgccggccacgcgggcggtggatggacggccccgatctaccctcacgtagttcggacagcagaggcggcgcgcggcatgcagcggtgcggctctagcagcggcggcgctagcggtggcgcaaggcggcagctgacgatggtgaccggcggcaacgcgacggcgacgcggctaggcggcggcgctaggcggcagctgacgatggtgaccggcggcaacgcgacggcgacgcggctaggcggcggcgctaggcggtggcacaggacacagagagagagagaaagagagaggaaggagggaggccgcaccgacaacgacgagcggcggcaagtggcggataacggaggcgacggcgtggctcggcggcggctctaacggcggcgagcggcggccggaggtagttaaagcggcggcggtgggtggtgcgtggcgctagggcagatgagagcttgggagcgggcgattgcaatgcgaaaaagagagaggagggtccggggatggtttatataggctcgaggggccggtgactgttggcggctgctaaatgtcaattctataccgccaacatctgcataaaattcagataataaaacatccaacacagtgataaggtcttaaatctcacatattccacattattggtgtatatttatatgggaggaaacctagacttaaagtgaggagtatcatgtatccatataaggatgggttgtggacttcataggaacaccagagaaccagcccaaaacaccgaagaatggatagaggaggaccaggagaggagccaggccaaaggccaggcaaggggggccagcccaggttcggctaaaccccctggttcagctgaaccctgatgatcaccgttgatcccaggttttggcatggacactccagatgcattgctgatggcggttaaggtgcacttcggactatatcccttcctataactgtcatacatgtcctataaatagacctcacttcattcactctcacacacactttcaagctttagctgaattataagaggctctattgtactatattgtatactagaataggaaaagagtatagtagaagaagtcggaagaattctagagttgtcggtaatcttcttatatttcttttattctgtttattactctgaattcaatataatattcttgttgagtattttagatttatcttgtgagaattatctcttggttagttcctaagtagcatacgggattattgttcactataatcaactaaaatatagtgattgctttcgtgttttataaacactaaagtagatattaatttcatagacgtggtgtttaggtagttgttatccagtaattgctgcatatcccacagtacgtttgaggtaggtgtagacgtggtgacagccctcaagatcacttaagtcctccctgtccgggtacgtagtagagcgacatctgggaacagcgggttgccagtgcctgaagtattgcattaggattaaagttaagctttccctagacactatttctcactagtaaatcctctctatcctggcctatcattcgcttggtgtccttggatgaaccggaggatgatctgatcacacacgttcccttggatttgacacatttggaatactccgtaggggaagtgctaaatcgcggtatatccgtgcacttgcggattttatctatgatcgtaagattaccaacagcgacatgggggaggtggggaggagagaggcgtgattcgaaaatcgaatcccggccgtctccagcgcgggcgcgggcgcgggcgggcaggtggggcagcggttgtggggcgtgtgggaggtggcgcgggaggtaggcgatgtgggcggggacgcacgggagaggcgggagcggcgattgcgggcacgccagccggaggtagggaatgggcccaacaggtgggccccacctgtcggtgactcggagaggggagggcgcgggcagccactggctgggcctcggcctcgatccgccccagctagcgcgcgggagggggaggggaagtgggccggtggcccaaaaggaaaaaggaggggaaaaagaaaaggaaaaagaaaaagtttttttccagggatttaaataatgcttttgctcgattttaattggttaaaattatttctagagctctgaaaattccattaaaaatcctgttagcatattttgacttgaggaacccaagaaaaattccacatgccattttcgattattatttgtgttaattaaattaaggtttctctcttgcttttacagaggtaatttcttgagaccaattattactttgatttaggcttgggaaaagaacttcagggtgtgacagaaggtcctcatggtatacctccaatacatattatacatatatcctagttatatgattaaccttctaataccctctttctgatgccctcctggtactttgagaagccacccctgactgccgagttccttacgacagcccgtcatgaccatacaaccgaggctaaatacgtaggagtccccttcccagaaaattaatttaggactatatacacgcgcggaggaatacccgtattgggctgtcaccattagtggcccacctctcatccacatcatataaccccaaattatattaccctataatctagacatcatgcctaaactaccagatactactctaatgtcattgtcatgacgtagagtaattgcaattgcaagcattataattgtacctatgcatctcccagataagctagcagtataatcagtataacttgaacataaagtaaagctggcattcatatactcggaaagtatttcaataccagaattgtataaagaagaatattctaaataaagtacaaatcttatgaaagaagaaaggagagcaactagagccatacccgaactcttccgaagacttccagactctgatttctattctattcctactccactagcttgagactagtaaactaaacttgagagaatatgagagagctcttgcttgaagtgtgtgaagatagtgaggatgagagctctttaaataggcaggtatgatggttgtagagcatgtgaattgtcggaaatgtgtatattttctttttgtatcctcaccaaggcaaaatgtgccagaatttacccctattctaaggctgatatgtggagttcggtagggataaattgtgacatacctgcaacatatatattgcaaagccaaagatatggactcaagaagatcatcagtcatacccctagatcaagggtctttatttgtggtagaaaatggaaaagtaaaatattttgtggaatggtggaataaagaaataattctccccttttgctagactttctctccattttgttttcttggcatgaatatagaaggggcatggctatattttgttttcatcatgctcaatgttttaagagcaaactttatttcctttttctctcttttttttcacagccatgtctttccctccttttatcattttctttttgccaagaatttttctaggagaagaaagcatggtctaaagttggagtttatttgaatggaatttttgttggaaggcaacttccagtgtagaagattagcttaattatatatgtggaaatgaaaatggaaatgactccttgatcatgagtgtatgaaagatatctaagacgagtcacataaatttgacaaaactcaatataatgtcaagcagtcatacgcataataaggtttatcaaagatgcacttgcatatggccttggtaggaataaagaatgaagtcaattggaggaatgagcttttaaaacaattttattttgaaaacaaattcccaagagtcatgacaaaagttgcaagaattcctttcatctttattcacctcacataaagcaattacttagatgcataaggttccctaaacatggatggctgttcacaagcacaagttcagctgagaataatgaatatacaagatcaatcatctgaagaatttcattagttgaaaattttatcttttacttatgcttgaaccaattgttttctgattttcagctctagtactataccatggtggagatatacagataaaagacgtgctcacatgctcacctgtgaaaattgagagggattggggccagctctggttcggccgcatctggtagttcggccgaaccactctggtgcccatttcctctgcaattttctgcagagttcagtgccttccaggtgttcagagattcaacaatattcagagtatgtgcacgttagaagctgcgatatctgccccacacttattcaaaaacctgaattttattaaacaaaaacaaacttcagcaaacattggggttaacaccaatgagccacattatttatagcaagtgcttacatgattggaaaaataaaaccaagcacctactattactttatttatgggagaggagacatctaattagcataatatttattctccttccccatctctacgaatgcatgctttattttagcacacaaaccgcgactaagggtatcaacattatttctaagttcagcgagttctacccctagttccgtgttgcaagctctaagctctatgttctccttgcggagttccctcacttgcgaggcgagcttatagaccgagggctccggtgacttcacttcatctccttggtattggccggccgcccttacaattggagggggcgtcaaatgacgcttcacctttataggtggagggatacgggattctgctgccccctccttttttgacaccgtcaaaggccggagcaagcccttaccatacccaccgccaggagttcgcactccctgaatgcggaaccgatcctcctttggagtggatggagtagtagtagatgtggtgtacttgtggagcacctcatctcctgccttagtgaacagggtgcccacatatcgctcggcggaggcggaacggccttctcatcatcttgacaatggcgtcgtgccttcaagagaccgagcttgcctgttgtcagccgtcgcgcaggtgaatcccccctgaattttggtcttcgtaacatggcgaggggacagggatcacgctgccgaagagggggccgaacgtggccgaggagggttcggccgaaccagggtattcgccgaagtgctccaaattcgcaggggagcccgacactgtcacaaggggctgcgcccacagtgcattcaccccttccatggtgtagtgttccaccgggatcaattgattcgcccatgtcggctctccgtcaaggttgtatgtggagttggaggaagagccgatgaatgggatcaatgatttgccagccattagtgatttggaggtgatggagcaatagaattgagatgagaatgagaggaggcttgttaaagtgggagagaggaggaagaacagagctctgggtctgatacgactgatctacctccgaatgcgcatcacaacggattatagacgagcggggagattgaggttccaaattggggctgatcaggcgccgccctggttcggccgaaccctggtgggtcccgttaggtgccaattttttttctaggtccactaaaccctaagctaagcataaaaatgacaactatacaatgttttaagcatgcattagatgagatcatcatggttaataatcgattaattcaataacatccacttcttcatctacagtttcatttggctcaaggaaaatctttaagcgttgatcatttaccttgaatatatttcctgagtcgtcgcggggtgtgattgccccgtgcgaagaggtgtcgattacgacgagctgtccttcccatttactacccaattttccgtggccgaagaggcttaaccctgtagttgaacatcagtattttgtctcctagcttgaattgcttgatctttatccttttatcatgctagtgctttgtcctttctttatatatctttgcgttggggtaagccttctctctccattcttcaagtttagcaatttgcatttttctccattctcctgctccttcaaagttcatattccagttcctgatggcccaacatgctctgtgctcaagttctacagggagtcagcaagattttccgtagactatctgtaggggcacattccaatgggtgtcttgtatgctatccggtatgcccacagtgcgtctggcaatctatccttccatcctattcccattctgttgaccgtcttttgtagaatattcttgatcttggtatacccacaggaatacttctctaggatagcaggggtaaaggtagaatagaaaagtaaaaaggatacgaggatgagcaaggtttgggaatgatcagcaactgttccccagcaacagcgccagaaatgcttgttggtatttcttacgatcatagatagaatccgcaagcgcacggatataccgatgtagcacttcccctacggagtattccaggggtatcgaatccaagggaacgtgtgtggtcagatcttcctccggttcatccaaggacaccaagcagatgataggctaggatagagaggatttactagtgagaaacagtgtctagggaaagcttaactttaatcctaatgcaatacttcaggcactggcaacccgctgttcctaaatatcgctctactacgtacacggacagggaggacttaagtactcttgagggctgtcaccacctctacacctaccttaaacgtgctatgggatacgcagcaaccactagaaattaattacccagacaccgcgtctacgcaattaataactactctagtgcagatcaaacactaaagcaatcactataaataaatgacaatgatcccgtatgctatttaggaactaaccaagagataattctcacgagataaatctaactcaagaagaatattatattgaatttagactaatgaacagaataaaagaaatgagagaagattaccgacaactctggaattcttccgaattcttctactctactctcttcctattttagatacaatatagtacaatagagcctcttataattcagctgaaacttggaagtgtgtatgtgaagtaaaagagtaatgtcgttatatagaggtaggtatgacgtttggtgaaggggaaaggtccgaagtgcccctcaaccgccatcaggaatgcatctggagcgtccatgccaaaacatgggatcaacggtgatctccagggtttcgccgaaccagggggttcggctgaacctgggctgggaccccctggtctggcccttggcctggctcctcctagtcctcctttatccattcttcagtattttgggctgattctctagtatttgatgaagttcacaacccatccttgtatggatacatattccttctcactttagtctgattttcctcccaacgtagggtttatcaggcaatgaattcttataggtctacgcactttgtggagaaaattctttatgcagcctggaatatttggaaacagaggaactctctgattttccagaatttagcaccctcaatttcttcttggaaagctctctttaagagtgatctttcccttttggtttttggattaaatgtttctgagagacaatcccttttgaattggttaaatcttttgtaatttatattctttaataaagtattactgtgggggcttcccctatagtgctttccctcaaaaaaacgtagggtctatcatctgcatacaaatatgcaccaacacttgtgaaatatgtgaaattaagtacctatcactatgttggatattttattatctaaaatttatgcggatgttggcggtatagaattggcatttaacagccgccaacaagcgctaacgaccgtcaagaattagctaagatatccaccaccctgaaaattagtcaagggcttgattgtctatatattatgtttcttttcgtacttagtactgcatcagttgagtttgatctattaagtagtgcttagaaccaaaatccctagcctgctcttgattgccaataaggatttaattcgggttccagccgatgagttatctggacgttgcatcgacttacaaagattgcatatgactttgattgacctgatcgtgacaaagttttcaccgtttatctaatcgcttgcattatgacattggacctccggccgatatatgctttatccttcggattagtgcttattctatcttatcgttgttagccgattggtttctactggattatattgttgttttatcacattatcatcagtcgattgtctttatttacatcaagtgtcatattctacatcaaccatatagccgatagctcaaaatccattcactatcggccggtatcggcatcggcttgaattactccattggcttgtcagcgtgttgatgtgaaaaacacgaggcctggaagatctgcttaacttcggtgcagttccaaaaaatcttgcctttaggttcgtgagtgtgccagttgatttgatcctacaatcaacaagaaataaagacaggaaaatagcagttaaatctataaaagatagccgatcagctagtcgctgatgacgtatcatttatctttgagccgatgtcatattagaatcgatcggcaatcataaataagcaagaaagaactaaatcttttcgatcggctgtagatattaatggtatataatacttccatcaatatatacttaaatcaagtgattaggatagatcggtcgccatgctgagactgtataaatcacttagatcaaaatatatatattaacaagaagattataagcattcatagcatagccgatcagatagatctagcatgtatcggctagtactccgataccactctatattaagatattaaagcaagcaaaatatatcaaacaggaagcttaatatacctaaatgcaacaagatcttaacataaagtagttaaattaggtaagatcggctgaaacccggatgaaaccctaatcggcaaccaaaaagcaggctagagattgagattctaatcatgacttataaggtcaaactcaactgatgcagctataagtatgaaaagaaggacaatatctagacaatcaagccgttcagtgtttcatagggtggtggatatcttatataatctaggtcaacgttggtatttaacctaatcggctgccttccaatgatagatgttagccgattgaaggttaaataacaaaattgtcaaagattatataagatatatgacaactcgacgaattacataaacaagattagagtatcataaagttggaagcactaatcccaagaacgcaagccgccataacaagttttacctgtagctgaagatcgaaaccgatgcagctcaacttgaaagcaataactcgtgaaaagtaaatgaaagtaagagggtggtgatgcgccgagattgtattgaacatgtgttatttgattacatgggtccgggacatatttatacccgagatacaaaatatgtccttatcggacacgactcttatctctaacaaactctaagattccataagtctttgcggcagacttttgcccaaacttatctctaaggaaattacataaaatgtcctaactaatagatacaattgccttttcaggacttaatccgtgcgtggcaatccatatgaagcacattaactcaacccgacaacgtgtaccgagtcacattgtcgaaatcggctcaatcggctaaccttgtccgactcgaactctaccaattctggtcgtggccgattcggactttagctgattcttgctctgtttccagaacgatctccatcttggattccgcttcggttccatctccgatacttgaattaccaaatttggtcgataacacatgccccccaagtccggaatatttggtaatgtttcggatttgccatttctgcttctccaagaatatcgctcattgccgtttttctgactgtaaccgtaggctttaaatactaaccgtcaccccagagaaatttcacaccgttacctccgttttcaccgcttaagcaaactttttcttctctttccccagtgatcccctcagtgcgcaaggtgatctcaaggcgattctccctccggccaagcttccacccgcagcgatgtcgacttccgccagcccgttcgcagcgccatcagccgagtatgcagaggtacgtgtccatcggctagatcttcttctttatgcaatagattggtttttccttgtctcatcttgttttcttcttctctatttttatccgtagcatctttccaatctggttgcgattcctagcctatcacatgagcatcagattggccaacccaaatctaggtcactggaaagatactttcaagtcttggccttcgcttgagaaaagttctcctgagaaaagttagcccgtatggtacaagcgtgtgttggctagcaagcaaggtcactgggatgaactcggaatcagccaagcccttgctcttactttagcaaattcagctaaggacgaacccctgatggcttctgcaacatatttctggtccaacaccctcaatgccttcctattcaatcaagggccgatgaccccccactctgcttgatgtcatcatgatcactggtttagatgtcacctattcggccaatctgatgaccctaaattccaagaaccagtttgaatttaaaacaaaaacaataggtggctggtctggctatatcgccgcaaacatgggcataggatctgtcaccccccaagagcacacagcctttctactaatgtggcttgagaaatttcttttctgtggatcaagttgtggccctactaccaactggcaattcctagcagaagcccttgaagcaaagaagcaaatccctttgggcaaaatcctcctcggctatctgtatcagatgttgaacaacgcatcggccaagatagccgcaggctcagtagtaggtgcaggtggaccatcgtggttactgcaaacatggcttaacttagttgccaagaaagctgtgaatcggccagctctgttagagtcccaatttccaagactagaactgatcacaagtgacgatggggaagtactaacccatcgcagatgcatgtcatatggagaagctgcatcaacaccagccgattctggagcaaagctatcggctgaactgctcaaagactggttctgcagattctatgagggcttccagaaagatgctcgagtttggtttgcatatgaagactcaatgagctttgaactgccatcagactttagatttgaagaaatcaattctgaaagatatgataagtctagagaggtcttcttggctgctatcagtccatgtattcttcctgttggcatccatcaaggatgaaacatacaagtgtcttacgagttctaccatccaatgagctcggccaggcagtttgggatgggacagctgccaatcggcttttattttgccgataaaattcaatttagaggcgaaatctcatcaacattgatgatggatcggctgttgaacatcccaggaccccctttgggcagcatcaaaaatgtagaactagcaaagttcaggagcaggaactttgacagatggtggggtgaatggaagcagcacttgttccaccaatcagcttccatgtacatgacagatctattcccagatgttatccctcaggtaaatccttactttgtcaatcctgtaaaataattgtcagccgatttgtacctttactagtctcatcttctgtcttgcagacaatagaatcttcccatcctcgcaaaagcaacagcggcaaggacatcgagtatgcttcaggcctcttaccaaatggaggtggactaactcccccgtcatcggctaccatgcccccaggacctcaagtctactccaagggcagctaagagaactagctgatgccagtaggaataggaaaactaaggcatcagccgctaatccatcggctctggctccaaagagaaaggccaagaagaagaaatccaagccaaccgatgacttgcctgccttagatccatccatagaacaagccctagatgaagaagagattaaggaagatgtcgaccaagctgcagccgaactgagtgacttaggagaaaaaacatcatcggcttcacgcaaatagactcctccaactcctgctgctccagctcacttctcaaggggaaataacccatcttgatcatctcctgaaaaaacttgcagagttgattggttatcaattttgtatttgtagaaaaaaaaaactgtcgtcaagaaaaaatagcaccagcaccatctaaaccagctccaccggtaaggtttcctctataaaatcctttaaatatgatcataactgatgttaattaacacttgtctttttttcagccttctcctcctccttcgcctcctgtgcagtcgacgcccagtgatcgtactccatcggctgcaggcagccacaatattgaggaggaagaacaacgagctgctcctgccataccagtaagtctttcattgtcataaatcttagatcggctatataattcgctttgaaatttaactgtcttcaattttccttttgtaggctttagccgatctgttcttgtttgacatcaaggattactttgatgaagaggtagaagaaaaaataacaagcaaaactctagtccctctagatgacgatgtcaaaagaactcttgaagacatatctcatcggctagagacatcattagacaacttggtggttgactgcggtacaatccgggcaagatttgcagagattcaatccctaatcccgaatgatctggcaaataccatttctccagctgtatacctcgagcaacatcaattcaaggtagaaaaggccaagcaaaggatagccgatcggcgagagcgaagggatattgaagccactattcaaaccaatcggcaaaccgttcatgaagagaaagctaagctagatcaactcttggttgggccaattcaaactaaaatagatcggcttgaggctcgcagaatagatctcatagctcaactagaggaatgcaacgccgaaatggctcttgagcagaagaagttaactgatatcccaaaggctgtcgaagaacaaaagtccagactaaaattggctatcaggaacgtggccgatttgaccaagtctctcaaggtcattcctggaaccgacgcccaagatatccaagctattgaagaagtagatcaaattagccaacgggctgtatcggcaatccagcgtaacttgtctagatgattatctttgtaataggacttagaaaatttttgtaatcggctaagaaactttggtactccttttgattatcactgaacctttctgccgataattctcaacttttgtatatatgtgcccccctaattttgcaatgatgaaggcatcgataaaattataatttggactaagggcgatatattaaatatcgaccatcatacatcggcagaacacaaccgattatgataataaaacaactaagggcgatataactatatcggccgtcatacattggcaaaacacaaccgattatgatagtaaaacaactaagggcgatataactatatcggccatctcaaggcgatgtaaacacatcggctatcatgcatcggcaacacccaaccgatcatgcattaacccaaacacttgggtaatatctcttcaagtacttgccattaagtgctcgtccataaacttttccatcaagtccttgtaacatataaactcctttggacacaaccttatggatttgaaacggtccttcccaattcggtgactgtcgcgcccggaaaaataccttttccagaacgctagtgtattaatccccgtcccaggaaaagctggggtacaccaaacaaacatgatacaaaaggcacatctttattatatcgataatatttacattattacaaaggcacttaaggcctgacaaacagaaataatcagcagcggactagcgggccgacggttccatcttcacaggcgctcaactagggtataagccaggactccacctacgacttcttctccaaagcttctcttactgaagggggtaaagatagagcaagaatgagtacaaccacaatactcagcaagccacaccggcagatgcatgattaatgcaagggggtacaaggggataataataggggttaagttttgcagtaaacaacatttaaaagttacttcattgcccaaagctattttgtaaagatgattctagagctacacaatgttattaatcaaggctgtgaacccacacgaacctgccttaacccaaggcctacgatgattcagaccgaactagccaccagacccaggtcccagctcgtcccaagccaacccagcccaaccatttcacattttagttgttaagcggttttaagaattaaaacactaacttgagtacattgctaggcttgcccataaccgagggcgcggctattcgcatagattatactctgatcagaggtgtacatcattacccacaagacacgtcttcctcacgtgtaaccacgtgccacataccaccacggcatacggacggacgatgtgacatagttcccaacccatcctagccatagacaagagtaccgacccaaccccgcctacggctggaacccccgagacaggtaggtaggattgagcccctagcagcagaacaccggccctgtgccatgacatctcaactaccgagccgcagctcgtgtagccttcatttgtcctagagatgtccatcgagccccgacttcgtccatctccatccgtgtacctttgtttatgaccaaactgagccacaaacttagccttacccactagacatgtggaagtatggtagtgctttgcaatagaggcctgagcttaatccttatagtacccgaggtacgactaacaaaacccaaccacgcacctcgagcccaggctaaaaccattttgggggttttgaatagagggggaggtgtgtgtccaattccaacataaggcaaccagtccatagtgtctaaatgatatgagaattcccaaagtctaaagttataaaaccacctaatgttgcctaattaatcagcgaagcatctacctaagttcatactagtggaaccataaatagagtacccactagttggggttttgtttatcctagggtgaacaaggtaataataacaatagaaataataataaggtcataacaaaggtaaataggcatggctaaataaaacagtgataacgcaggaatttaaataaagagataatgcattaatttaaatcaaaataattttataaactgggattcaatatgctcaaggatgatgtgacttgccttgctcagagagaatggccttccgaacattcggcgacgaccacgaaccacgcttcaggaacctctggaacgacagaagctacacgaagcacacaagcaaagctacaagcctataaagaagcagtaacaatacataaaaaggaagcacatggttctttagtttaatgctgttatctggagatttgcggattattataattaggttttgcaattataaaacatgtgtaagcgctagcctagaaaagacgagaaggctgcgctgttgacatgcggaccccacatgtcaacctaagggaccatggcaaaccgggtacacagagacagtccacgggtcgatggaagcggatcccgtgtgtcaaccgagacgagtggctgacatacggactccactagacaccatgcgggctgcacatgtggaaaccacgcggctaccaagcgggcacacaaacacggtcaccacacgcacacacaaacgactaccgacaccggtacacgggtagcgggatcgacaaccgcacaacgggcaggggcgacatcgaaaggacgagggcggggcagcgagaggagagacccttaccaccatgcgacgaggtgtggcacgatgatgacgaacgggcacggcggagacggctcagggacgacggaggcgaacagcgagggaacgacttcggcggcgatccttgcacgaaggcaagacgcggccggtgcaatgcttgacgacgcggaggcgaggacgaagatgacgacggggctgtggcacttgatggagcgaggatgacgaacgagaatggcttgacagagggacgaacaccacgacgaccgggaacgacgagaggacgacggtgggaaccggtgaggaggcgacgacaaacgccggcgggttcggccgaaggggaggcgatgccgaggacgacatcaccgctgcaatgccggagtaggggacggcgtggaacacgccattgcgatgttggagaaggtggtggtgcagcggggcgacgagccggcaaggaggaacgggcggttggcgcggcggcggcgtttcagcgaacttcgggcgacgccgcagccgggccggagaagaggatggcgctgcagcaccgacagaggtggcagcgacgtcggcctgcactcaggcgaggtggcagggatggttggagatggtatagtagcggcaatgccactgcaagccggcggggacgcgtctccggcgatttccccacgaatcggaggcggcgccagggaagatgatgcacctgtgaggccgagcgagaacacggcgcggccggccggcgcacaggcactgcggcaggggcggccggagttgaccgtcagcacaggagagagaggaaggtgatggggaggtggctatggttcgggagagggacagagcggaacggccggctagaggaggaagactaccgcgcgtgggcccctcctgccagcgcgtgggcccctcctgctagcacgcggtcagcgcacacagcgcacgtgcgcgggagggactcggcctggcttgggccgggcggatgggcggaggcggcccgggagggggaggggaggggagttgggccaaggggaaggagggcggggcggcccttgagagacagagtgtcacgccctaaagtttcaaccttttccttgctttaaaaatttgttaagtaaatcgtccggagaaattgttctaattaacctagagttgaatccctaattaataaatgcaattattaattggaaatggcattgtgggatttttcttggattctagatgtcacaatcgattaacaggatttttagtggaattttcagagccctataaataattttaaccaactaaaaatccccaaagtgcaattttaaatcccaggaaaatcctttttctctatttcttttcttttccttcctttttctcttgatgggccgtcggcccatcactctcccgcgcgccccttgctgggctggcccgctcctcccttcccctccccgaagccctccctcactccctctctctctgggacgccgacaggtgggccccacctgtcggggtcatccccttcctccagccgcccgccccacgtcggcaaccgtcgccgaaaccgccgcgcacacctcctccgctcctcccgcgcccacgccgtgccgctcccgcgtcctccccacgttgccgccctctctcccgcgtctcccggcccgcgcgcgcgcttgcaaggggcgggattcgaatttgaatcccccccattctctctctctccaccccacatcgccggcaaaatcggaggctttcccggccacgtccgcttccccctccacctataaattgctcccccgagcctcctcttcccctttccgctctcgccgccccctcccgtgcctcctaccgagcccgcgccgctcgccgctagcgccgccacttgccgccgcctccggccgcacgccgccatcgcaagagccgtcgcctcgccgcgcaatcaccgccgctagcttcgccgccgtgagagctacctcggccgccgctcgctttccgttcgccaccgccgtaccgctcttcccacgcgccgccgcctactaccgcctctggccgcgcgccaccaccgctaaagccgccgccgcgctcgccagtgtcgcccgcacctcggtcccactcgattgccatccgccaccgccggaacccgattccctcgcatcgccggtgaggacacctttcctcctttccttccccttcccgcgagcgccgagccacgccgctgttccggccgtgcgccgtcgccttcacgccggccgccgccgcctcgccgtccgccggtcgtcgtcggaggccgcctgcggccgctgccgccttgccatggtcggccggcttgagccgtgccgaaccaccatccactcccctcccgccttgtgctgctgcccggtgggccccaccagctggtggaccacccctccccttgagccaccagccggcgccccctccctctccccttgtgccactgacatgcggaccccgcttgccggcgccccccccttgggtgacgtcagcccttgggatttattacgcaataaataattaaggactttttctttattagtaattcatccgagctccgtttaagtccattcaagtctcagtaaattcataaaaatccctagaatccattaaaaatggttttgtttcctgtttcagtagtcttatagcatgttttgcttgtgtgctttgtttgtcgcgtagatttcggccgtttcgtcgatccgcagtttctcgaagacgttgctgtggtctcatcagtgcgagagtaaggcaagtcatgcattacaattgatcatattgtacccaatctacaaatgtcccgcatttctattaaatgtcgcattcttttacaatgtcatctgggatgggtcctattactcagccatttattgtttaccatatgccattgataacctgggtatcaaaatgattagatgttggtttaggaaatgcttagccatgcttagctcaactagcacacaaatagggatcacattattacatagactttaactatgagcatagctttggattggtgccaccgcaatggtgttagctaattaaaatacactggacggtgggctgtgggtgcatggttttgctggtcgcacccatggcagttaaggaccggttcacgggaaaccctgggagacttaccgtgcttaccacaagcgggagtgggtaactgcttgatctgaagtatagctcgaccctttcctaggcaccggtggcgagggtgggcgtgatggagttgggtcggccggggtgtcaggttgtccagctgccggattcaccgcggcgcagtaggggaccgcccactgccttttgacgggtgggggtgaaaacttagcgtggtgtggatggttaggggagggttatgtggagggtcttgtcacgatttccccctttgcagtatcatggtgatacttcggggcatggcgacatgtgtggaatcgtgtcttgtgggtacagttgtacaactctgatcagagtaaaactattcgaagaaccgtgcccgcagttatgggcgatcaaccaaattcaccgtggttagtctcacccctagtttagcttaatgaactggtgtagtttaggtggttggttgggcctgttgcaacgtggtgtagcgttggacagtgtttggttaatattgattaattactacaactgttttactgctttcaactattatttttaaatgcctgctttgtgcaaaagaacctttagcctccttcggttatatcctgcatcatacctcctcttccggtatgacttgctgagtacagtgggtagtactcagtcttgctctcttttcccctataccagagctgaagatcttcctagtgggagctgtcttgtcgaagttggtttgtcgctgccgtcaaggattgcctgtggagtcgagtcgcctcgctgcagaagtcaagtttccaagtctagctcgttttatcttttccgctgcatttgtaatcttttctatttttgtaagacgtggatctgtatgtcaacaattgtcgtttgtgtaccctggctggtcctggacagggatttaatgcacattcagcttagaaattctggttcgtgaatttctgggcgtgacatagagggggagaaaaaagagagggagaaggacttcgggtgcgggacgagagagagagagggaggcttggcccaaatgaaaaggaggattatttttagttttctttttaataaactttgttaattgttgttgttgcttaataaatattttcggtgctctgaaaattcaagtaaaatttgagggctccttttagaccaaggagaatttaacaaaaattctccggaccacattcgaatttttcttgtacgtattttagtgtttgccaatttcttttcgaattttaattaattctattattccatttagagaatgatttttattttgggatgaatttatcaggacgtgacagtgaccacttgccgaatttgttatcacgagttcctatcgccaagatcaacttccaaacaagctctccctcagaaaaagacttagatattatcttcttgttataatgccgagcaaccctttccttatccttagtaacttttgtgagagctctcaatctggattgaaccaaatcctccttcacatcggacatgagattataatattcatcggctgacaacgcattctgcaaatctgttctcctcgagccgattctaatgtccataaacaagcttataaggaggaacttggatcgatccatggcaacccatccgataggaccagaatgcttcagccaacctagtatgccattgccgaggataatgagaaatctttctctgaaacaacttgatcaaactcttgttagatgcctcggattgcccattagcttatgcatagtatggcgaagaattcaacaatttgatacccatgctatcggaaaactgaacaaactcatcagacacaaagatagacacttgatcagtcgtaatagtatgaggaatcctaaattggtaaataatatgctcttgaacaaattgtatagcatcccctgaatcaaccttcttcaaaagaatcgcccctacccacttggtaaagtaatcggttgccaccaatatgaacttgtgtcccttgctcgagggtggattaatcataccaatgatatcaattccccaacctctgaatgaccatggcttgatgataggtttcatagtcgacgctggtgctctctgaattgctccaaacttctgacaatcctgacaccttttgtaatatctaaaacaatcttccaacattttcggccaaaaatatcctgcacgcctatcgagggaagtccctcgatagcgggaggttgtgagacgcccctttcgtgagttcggccgggggaagaagctcgcctcttagaaatcacgtatccgccccctaggctgctagctaccttgcacacaatcgagttatacaggttcgggccgctgtggagcgtaataccctactcctgtgtttgggattatggatgagtattacaagggttcctttactccggagagcactctcgcccttcttctcctagagttcaggttttctgagagtcgtccttctcggtggggaaggtcctccttttatatctcaaggggataccacatgcaccgcctctacctactcttctttcgggtggggacccaccctatcttgaccggaacttgacccgtgcatttgcctggaagctaagccactgcttgttcttgagtggggcccagcgccgtccctcgcctgacacgggggacagccctatcattcccccattaatggatgaagacttgtggtggccgccgtccgaatgaccctccgatgggacgggtcatacctacccccactcaaccgggagcagacgcgacgtgggagtacggttgtcggtctagtcagacgtgaccggtgtcatgaccggtcatagaccggtcattcttgattatggcgcgtcagattcgcacgccgcacgtctgcctcactgcattaaatgtgacacggggcagttggggcgttgcgcgtattaatggaagctcagcctgggccccctcctcgctcgctccccccgccaaatggtggctaggcgagggcctcggggcgaagcagtgcaagggcccgaggggcatgacgtggcaccccgaggccccgaccccccccggctgctccagcggttcgcgtgctcgggggcagggccaggctgtacggacacgcagcaggataggaaggtagattccccacacttcgcaaatccccggacccatatctccgacaacgccaaagcagccacttcatcttatcagccgattgatgagtaccacaaattccttcatgtacctcacccatcacaaccatggcttgatcggcactcagacatttaagcaacaccccatcaatcatccgataatacaactcatcatccaataatgtgtacttcaaagctttataatgcaatttctgagaagccgattgagatagattctgcaaatattgatacacatcatacctccaatcatcggctgttatcgtggcaacttctactttgatatccctcatcatcggcttgtaccctgatgccccttgagccaaattattagcttcaacattttgctcccgagatacatgctttaaaatcaccagccgaaatccatccatcaactctcggcacttctcattgtataccattaatgtatcatttttgcattcatattctcctgccaattgactgatcactaataacgaatcacccataatttcgacagcatcggcctcaacttccttaagcaactgcaaccccttgagaactgcttcatactcagcctgattgttagttgcatatggcataatagtataggcaaactcgaaactttcccccgaggggaaattataactaagccgataccacaaccatgagtgcacactgatccatcaaaaaacaaagtccaaggcacaatatcgactgagccgattgagtcatcacgatgatccacaataaaatcggctatagcttgtcccttaatcgcctttgttgactcataccgaagatcaaattccgttaaagcaaatatccactttccaaccttacctttcaaaatcggagccgatagcatgtacttaaccacatcggctttacatatcacaatgcattcattggacaatagataatgccttaactttgtgtaagaaaaatacaaacacaaacacaacttttccacaggagaataccttgtttctgtgtccaagagcctgtggctcaaataaaatacagccctctccttcccttcaagctcctgaatcaaaacttagccgattgacttctcaccggccgagagatataatctgaaaggaatcccctcatgtggagggattaaaactggaggagaactaagatatttctttaatattattcaaagccttctactcttctgccccccaggtgaattcttgatcggctttcaatctcaagaaaggtgtaaaacgctctaatcttccagataagttagagataaagcttctaacaaaatttatcttgccgatcaactcctgcaacttcttcttgtcctccagaggttgaatcttcttgattgaattaatactcttttgagttacctcaatccccctctcatgaacaagaaatcccaaaaactgaccagccgatacgccaaaagcacactttgttgggttcatctttaagccatactttctagttctctcaaaaaccttcctcaaatcggctatgtggtcttctacttcttttgacttaacaaccacatcatcaatataaacttcaacgaaccagctgatcagatcatgaaatatgtagttcatggccctctgatatatacctctagcgctcttttaaccaaaagtcatcacaccccactcaaacaagccaattgcactaggacatctgaaagctatcttaaaaatgttttcttctgccataaagatctgattgtaacctgcattgccatccataaaccttaatatcttatgccatgaagcagcatcaaccaattgatcgacaaccggcattgggtactcgtcctttggggtagcgttgtttagatcccgaaaatcaatgcacactctgaccttgccatttttcttgataacaggaactatattgaaaacccactcagcatatcggcatggtcagatgaaaccagcatcgtacaaatgtgtaacctcagccttgatagcatcgagcatatcggctttgcatctcctcggcggctgctggtatggtctaacccctggtttaataggaagccgatgttcgacaatcgatcggctgagttctagcatctcataatactcccaagcgaagcaatctctatattcttttaaaagctctatcaatttggttctgaattttagagataaattcttactgaggaatgtcggcctgggtctatcacctggacctatatcaatttcttccaaatcatcagccgacatgaaaccctgtccttgcttgtcattgagatcatctactgtatccttggtgtagacgtttgaaccctccacgactccctcaaaataataatttgggctctccatcttcaattggctgtatatcacaatcggacacttttagaaaatctcaatcccaaactttttcagacaggcaatcaatatcattcatctcccaaagagctaaatcggcactagcaatgttaactgatctgtcagctggcacaatatcaatcttgtcgccttgccattgaatcaagcactagtgcatggtcgaatgaatacaaaaattagcatgaatccaatcccttcctagcaacaggctataggaacccttcccatcgatgacaaaaaatattgtaggaacggtcttgctgctgactgtcagctccacattcaaaactcctttagtttccgatggattgccaccaaaatccttgagaaccatgttagtcttaatgagatcgtctgaatttctatccaactttctgaatgtagtgtatggcatcaaattcacagcggctcccccatcaaccatcatcttggacatcggcttccctttgacaaatccattgatatacaacggcttgagatgccgattctctgtcccctctggcttctcgaaaatcgcttgttccggtgacaaaaccaatctcgcagaaacctcttcaacatcatccacatcggcttgcctcggttcaaattttgctggtagcataaaaaccatgtttaccgatgcaggcgcagttgccttgcccttgagcaatatttttgctttatcggcttcaacttcatcggctgctgtgaccgtgcacttaatgcgctactcctgcttggtatttgttttcttcagtcgatggttaatctcatgttctacttcttgaaagcgctccttgttcctcattctttgaacccttctcttctgattcttggtgaaaattcctgtatcacaccattgtgttttcctatcttcatcttcatcatggtgataatcttggtttactagacccaacctctaatgaacaggtaccctcttttgactcagccgattacctctattataggatcggcctgaactccctgcagtgtcactgcatccaggataatcttcgatcgatggcagcatcataccttcattccagcagaatcttctttgatatttgttgataatcctggttgtattcaactgagaaccccgagttttcccttcatcagcagatcgtccagctatatgcaccatattaacagggaaaggattaccatcaaccttcattggcttctttgaatcatcaaacttaatctcccccccttcaatggccacctagacctgctgtctgaaaactttgcaatcattggtattgtgagaaccagaatcatgccacctgcaatacctcctcttacctagttcctcagccgatggaattacatgaccagcaggaagttgaatttgtttttcttagcaacaaatcgaaaatcttatcagccatggtgatatcaaaatcaaatctttcctctttcccagaacttctcacccatgggcatggctgtcacgtcccaaaacgacgctaaaactatatccttaaaattatgcctagaataattaaaatccaagtgaaagcctccaaaattaaaatgtgcaaacttaaaagtcaaataaggcttggaggatttttgtatatttcctaaaagccgaaaaggtgtaaataaattttagtggaattttcagagcacaaataataattatcaagaaataaacaaagtcgaaaaggttttataaaaagaaaaccctaaaaagcctcctccccacaagcgcgccgctgacggacgggcccgcccgccaccctcactgatgagtggggcccacccgtcatccccctcctcccgccgctcccgccgctctttccgcccgcgcctagcgccgccgccaccaaatccgccgcccccgactgttctggcgtgcaattaagaggggggaaatgttccccgtgattccctctccctttccccctattttcccctccccctcccacattcaaacggccggatttgctcctgcaaatcacaccggcgccattgatgccgaccataacccccgcgccggtttccttcccctccggtcgccctctttcactcccaaccctatataaaccctcctcgtacctccctcgtccatttccgccgtttgccgcccctcctccttgtcggattcgcgcccgcgccgttgtcctctctctccgccgtcgccttcgactttcggccgggcctagtcgcttcccgggaccgtcccccgcctcggcgtcatctcctccagcttcgccgcaccaccaccaaccccgtccatcgcctcgccgagctcgccgaccgccggaacgccgccgtccccgcgaacccgagccgcgccaccgtctccctccactccgatcgcctcctccgtcgctgtcgtcgcccggggtgagccgtggaccgctgcctcctttcacccttcccttcctctctctcggccgccgctccgccatgcctatggctgccgccggcgaccatagggacgcgggcgccgcctccctgcacgccgtgtggctactgcgtggggccccgccgtcagccgcccgtgccctcgggtgcggctgacgcgtggggcccacggcgccggctggtgagcccgcgggtgcacccggttcaccgtgaaccgaggggctgccgcgtggggcccaccactcctgtgaacccagcctgcgcgccccctcccctcggctgacgcaataaatcgttttaactaaaaaattaaatgaagaaattcacaaatattgacttaaagagcaataaacttcaagtggccataacttggtcgtttgtactcggaattggactgttcaagtctctaatttttccttaagaagtcaaggacccatttttgtgctttgtttttgtttgttatatggagtttattagagtaaaagcctttttccatttcattggtcgtgtagacgctgcagcttcagaagatccgctctacgtggaggttgaagccgacttttgggaaagcgagcaaggcaagtcacatcatccttgagcatattgaatcccagtttataaaattatttaggtttaaattattgcattattgctttatttaaattcccgcgttatcactgtttatttagccatgcctatttacctttgttatgacctcctcattattgctaatgttattattaccttgttcaccctaggataaacaaaaccccaactaataggtactctattcatggttccactagtatgaatttaggtagatgcttcgctgataaattaggcaacattaggtggttttattactttagacttttgaaatgcacatatcatttggacaatatggaatggttggcttatgtggaaatggacacaccccttctcctccattcaaaaccccaaaaatggttttaggctgggctcgaggtgtattgttttgatagtagcacctcggccactataaggaccggtcttcgggcctctattgcaaagcactaccgtacttccacatgtctagtgggtaaggcttagtttgtgtctcagtcttgtcatgggcaaaagtacacggatagggatggttgaagtcggggctcgatggacatctctaggacaaatgaaggctacacgagccgcgcccaggtagtcgagatgtcatggcacatggccggtgtcttactgctagggtctcaaccttggttacctgtctcgggaatcccagccgtagctagggttgggttggtactcttgttaatggctaggatgggttaggaactatgtcacgtcttccgtccgtatgccgtggtggtatgtggcgcgtggttacatatgaggaagacgtgtcttgtgggtatagatgtacacctctgattagagtataatctattcgaatagccgcgccctcggttatgggcaagcctagcaacgtacccatgttagtggtttaattcttaaaacttgcttaacaacaaaaatgtggaatggttggcctgggttggcctaggacgagttgggacccaggtcgggttgccagttcggtctgaatcatcgtaggccgtgggttaaggcagattcgtgcgtgttcatggccttgattaataacactgtgtagctctaggatcgtctttacaaaatgaccctaagcaactaaaagtcttgttaatgctgtttactgcaaaccctaacccctttattataacccccttgtactcctttgcatttattctgcattcgtgggtgtcttgttgagtacggtggttgtactcaatcttgctcatttttttccccaatccagaagaggagttcctggaggatgaaggctttggtgtctagctcgtgcctaccgtgaagtgcctgtggtcgtcgccctagtcttccattgtttttcgtttctcttcatgtgtgctaggccttcgtcgcccatgtaataaattaactatttacgcttccgcttgttaaactctgaattgtatcaacttttggtgtaccttgcctcctgggacaaggataatacccgcatgtatggaatgcctgttgggttaattctgatcgtgcaagttggtatcagagcctccttgaccctaggacgagccttagaccccaagccttattcgtattttgaaataaaaaaccaccccttatttgcgaaaatcctttagtctttctctgtcttgctgctttatttctcatcaaaagctgatctctaaaatttttcttttgcctttgtttatagatggccaacaacctcaaccggtgtggtcttgatctgactggcttcgctttggagctgcggggcatgtgcgttgtccagggatatccgcatggagtggactaccagggcaagaagctttcacagcaggatggtgacgatgcacagccccgtgccgcttgggaggtcactactgtgatcctcaccagctcccccgagagcaattcgctggcagtcaccgcgggtggagactccttccccgccgcttggcagaacgccgtgctcctcgccatcggcactcttcaccagtctatccggacgagttgcagcactcgccctaccactaccaccctcgtcatggaggaacccgcgactacgccgccttcagggatgctagcgcggaggatgacgctaccatcatgcatttggcgtgcatagtggaggcgtatgacacggcccgtatcgatttccatcgatatggtgcgccgtggtttggtcgagaacaacatgaagatcctggagctgcgtcaggagaatttctagctgaagaaggagttggacgccgtggaagcgcagctgtgtcagcttaagattgcttaaggacaggtctgccaccccaagcaccgccgtgtctgttgcagtcagaagatcaccgcccgcaagagtacctccaggcctgagcttgttcgtcagtccttggcgtggacctgcttcgtggagactcctt

SEQ ID NO: 9706 - DNA, 17192 bp, Oryza sativa
  unsure (1)..(17192): unsure at all n locations
gcgatgctgctgctggtgctggtggtggtgcgacggtcgcgtccggcgcacggaaagacgccgccggtgggcggtggcttcctcctcactcactcgctgcgctgccgagcccatgccgcggcagcagcagatgcactcattcatttacgccgctgcctgcctgcctgccatcgtgacatgccaattgaaacatgctgcagcgagaggtacaggggcagcagcagcagcttcagcttcagctcgtgtgggtgtgggtgtgggcggcgctggctgctgtgacgtgctttccctttctcgcctccgttaggaacgatcggcagataaacgatgaataacaacagattaatcacataagatacgagatttaacatgaaaaaccattctaagataggaaagagagagccatggataccagccagcaaatcttcactatatcagatgagattacaacgttgaacggcgacttacaatatatatatatatatataaaggtaaaacctctaaaagtatgacgatacatactgccgtgtgaaaatgaatttggatcctgactcaacagcctcgcagaagatatcgagaacgtacgtacgagtctacgtaggtacagcgaccgagcgagcgcgagtggcgagcaaagcaggcaagcggcagcgttggtggtgttggtggtggtggtgtgtctgcctgcctgccgcgtctgctggcgccgggccggccgacagcctcgtgccaacgcctgcagacgcgctcgtcgcgcgatcgccgattcgctttcccggtttcaaaccaaccatcatacgcgcgcgcgcgcgtacgtacgcgtacgtgaagtggtgtgggtttgctgctgctgctgctgcggcagcgcgtggccgcgcgcgcccgtgttcgaacagtggaggaggaggggagggctccaatgatctgtcagtttggtcggcacgacgacagtggggagaggaggggaaatcacggaggagctagctaatctctcgtctcgtttcttttgcagtcgtcgtcgtcacggtcacatgcggattcaggnnggtnggggggggggtgaagtgaaaggaaggacaggatcacaggaatttactgggggatgattcatgaagcccatgaggagggtccgacaaagctgaaagggcattgggcttccggcctacaatgtccccatgggcctacatgtaggggaaccacgttccttttcatttttatggtatactcctatcttttaaacacagttttttttggcaaaattttataaactatcacaattatcactctagtttgaattttttttctttgaagcagatctcttgtgtttaggcgatccatgaagagtagccagagaaatacttcaagttttgcagtacatttactctttcagatgtgtgtcattggtatttctggctgtagatgagcgaagaggagggaacggaccttctttgatatttttttcgtattgctccaattgtatacccattgatcgtgattgctggttagagaggtgttcggtatgatgcaatgtaactcagaccactaatgtgcagcatgagttgagagagggaggtgaaagagctcagatatgtcgtgtgagttaaagagtgcagacatgtcgtcttcttttgcaaaatagaataagatttgaaattgatcttgtggaatatgtccatgccatttgtttttccaaagtgtatcttttacaagcaagaggctaaaacctataattatgtgataagggagatactcaatctatagtttcgtgagataagtttgttttgtgatagatttgtgcaaaatacatgtaattttatgaaatttattctttttatgattacatttgaaagtttcttttaaaagaatttatggtagctttataagatagtcgcatagtttttgagagagaccaaaagggagatatttaactatttatcactcctacaagtggcaattaataatttgtcactggattcacatgttataggcatataggaacccacatttcataaactatgaatggcaaattcttaattgccagtttgccacatcttaaaagtggtaaaaagttaaatgccccaccgaaagagcctccgcgttggggtgagtctactatgtaagtattcgcggacgacgaacggtttcaacagccacgtttgggctttcctatcctaattgatcattccaaaaagggacatttaacttcttgccgcttttaagatgtagcaattaattatttgtcactcactgtctatgatatgtgagccctcatgtgtctatgacatgtggatccagtggtaaataatttagcaccaagtggcaaatagttaattattcttccaaaagcacagaaacaaaagcagtcgacaagttcagatataacaacagccagtcagcaatggacgtacaatgcctgtcacactgtgtagatcgagctctaccatctctctgactctctactctctaaactctacaggccgccgtcgcagcagggaggcagcggggcaccacacaggcacctgttgcgagcgtagcaatccgcaccgtgcgccgccatgaacctccccgccggaatctcgccgcagagctcgttgtcgctgacgttgaggtgctccagcctgacgtccatcagcgacttggccaccttcccggtgatccggttgtggctgaggtcgaggtacctgaggtggtgcgggaacctcaccccggtcatgtcgaacgccagctcgttccacgacaggtcgatcttggccgccggcgccgcgatcccgaacaggtgcggcgacgggtcgccggtgaggcggttgtgcgagaggtcgacggtgtccacgtcgccgtagcagcgcggtatctcgccggtgagctggttgtgggagaggatcaagaacctgaagctgccgtgcaccagccccggcgggatggcgccggtgaggaagttgccgctgaggtcgaggtaccggaggttggggtggtcgccggcgagggacggcgggatcggcccggcgagcctgctgtcggcgatgacgagggtacggaggttggtggcgccggcgaggtaggacgccggcaccgggccggagatggaggtgccggtgatgtcgaggtcctcgagcagcgagaggttggcgaaggagggcgggatgggccccgacatgccccggacggacgcgatctggaggacggcgagccccgtcagctcgccgagcgccggcggcacgggcgcggcgacgccggcgagggagaagagcgccagcccggtgacgcggccgggctcgccggagcagaacacggcgggctcccacgcgcagcagttggtcgacggccgccacgacgacagcctgacggggtcgcccagctgcgccttcaccctcagcagcgcggcgcggtcgtcgccgttgcactccaccgccgacgagacggcggtgcaggcggacaggacgacgacgacgaggcagagcagtggaatccacgacgaggctactactgttgcattggccattttcttgggtttttagggttttttttggcagcaatgcaagctactgtgatgatctgcactgaacttgaccacctgcatatatctatagaaatcgccatgaaattcgtgtgctagcttctgcatcagattctcgtttattcacttcatgtaaaggacgttcttgtgttctgcattcaacatgcatgtgttagcagcaataaaaccgctcaaatccgtgcaggattctgcagagattgcctcaacatgtgcctcaaggtacacaaaccagaattcagttagcgatcagttactgccatccagagatcaattggattcatcagataataagcagtgcaagaacaaaattcttttctcaataagatacagattttggtggtgtttaaaacttatgtaggtgagatgaagatgaagattaagtgttatacacaaaatgaggtggatctcacccaatccaaatgtgggtgagatcgaaaaggccaagaaactttcgcaagtgagttggcttgtctgttgttatgcagttttctacagaattatgtatgatggagaaaagctccttatagatatccttcgtctgagagttgtgaggtcaaatggttgtccttgtaggaccaggagcagtcattactcgatgctatagccagacttgacgatgcatcagatagtgaaagtggtaagttactggcagactctacttgcactgttaacagtatctttgaagggtgatgagtattagccacattagtatatttggttttataatgcacaaccaaataattagaaagagtgaaacctggaacttcaaattctgcccaaacattgagaaattttggatgtgactcagtatgttttgatcgaaaatttgtcagtctttcgtagtactggccacccacttgtgtcgtccttgtctgatgcctcaaatttgttacagctatcaactattattctaactagtcattgtatatgacagaagatatggctgtcggggcccaaatggtttctgctggtgatcacatgggcaggaacggcgttgcttgttggtaacaactggcaaagtgttggattttgaagattgtgtttgtgaagcgcctgtgtagatcaccggtcaaaggaaaatcatcgatggggcattggcaatttggcatgccaaaagtggatgtactgaacatgtccctgatagggcctcttctttaggctgcgaaaagttcaggtcacaaggcgcagagcgcttttccttcggtgataacggtggctgtatttgccccctaacagacttgaaggaactctaatctgactattaacattccaaaactgttaaaccctttgccaccatctccaatcttcttgtctctctagtgcaggatttgtaaactccacctgaatgcaacgtgaaaacgaagactgtatcttgctttccagtgatcaggttgtgataggtaaacaactatagagaccatatttaatgcttagggcacatgaatgcggggatagctcagttgggagagcgtcagactgaagatctgaaggtcgcgtgttcgatccacgctcaccgcatttaactttcttttccttttcagcattgcattttttttctttcttttccttttcagcattgcattttcttttctgcattgtgcatagaactttcttttccttttcagcgttgcatttttttttctgaattgtgttctttgaatgcaccatttatttttttttccttctcttttcctctcatcttgatttcaacgttgcattttttttaactgcattcattcaatgcaccattttgtgtttttccttctctcatttaaagaaggataacgaattgcattctcaaggtgtgaatatattctcctttataagataactaaaaattatcttccagtaataaataaaaaaagtaggtcgactttcacaccaacaaaaccgttagcctactcccatccctgcgtgggcgcagttgtccccgatcccctcccgcgaacagtaacaccttcggagagcgggcacgcctaacttgtggagagctgagaagcatggggttatggatttcaattttaaatttcttcatagggtaactgttggagccgatctttaaaaaaatttctaaaatttagcaccttgagattgatggagtgggagggagcaaccatgactaaactcgtagagagcgagaaatatgaatgtggttgtggatttcaattttgggcatacggaactgttgaagccgatttgtttttctttcaaaaaaaaaacccaaaattttgagattgagaagggaataaaccaaacgatgtgagagtgagaccctggtgatgggtaacgatcaattcaaaccatcaatttgtaagtgatcaatggtgttgcttcaaacacatggtgatggggaacgacaaattcaaacagcaatttgcaagtgatcaatggtgttgctacaaagacagacgatcagttagtcgactacggaatgcaatacattagcctccaaatgctgcagacgcaaaactacgtaatttactcataccttgaactatccacctttgctacttgctacaggtcacatctgttctactagcttacactacactgcccccaaattggcaaatttctacctcctcccaccccgcttcgccgccgtcgccgtcgccgccgtcttctccgaccggttcaccttggccctcttcgacggcggcggcgtcgttgcggcggcggcacctcgcttcgacggtggccgccccacgcttctcttcggcgtggcgctcttgccgcccttcttggagccgccgcggccggcatccttcctgccgggccccttacgcgtcttctgcggctgctccggcgacgtcgccgccgcagcacgcttccgtgtccccattggtgagcctttcttcttcttcttcgacggcgacgagccctggtttagccgtttgaggaagtccacggcgttccgcttcttggcgggcgtggctgcgtcggcggcgatcttcttgtcgggcttcttgcttccgtcggtcgctgcctccgtcgcttccgagagcttggccattttccggccaccgacgctggccgagttcttgccggggccgcggcctttcttcgtcctcaacccccacgccttgtccttgctcgctgacgccgacacggagaccttcttctcgccgtcgtcgctcccctccccttcctcggcggcctcacccttctccgcgctctcctccttcttcgccgccgccgcggccttcgcgatgggagctccgcttccggcaaacgatgagcggtttccctcctttctcgatcagcgacccgacgatgccagcgccgccgccgccgccaccggccggcgacgcgtccagcctccgccgcaccatctcgatgtccacgtggcgcctgatcgcgccacggtacgcgtcgctctcctgcaagtggattttaaaaaaaatgaaaaaaaagaaaaagaaaaaggaaaaaaaaaggagaaaatatctgtgggggcatctggctggaaggcaccccacccgcccaactgattgctacgctgcacccaaccaaccacgcagaatgattcaaaccaaaaatcgaacaaaaaactaggaactttcaaattcaccatgagctaatccgatttgaaactttcgcgttcgttcgaaggacacaaaaaatatgaggtgtgcacatgcgtctcacctacctaccacacaacaaaccaacccgaattcataagcaagcgatgacgcacacgaatttttctggtcacgtaattcggattagtgctagtgctatgtcatcatgccacatgcgtggccctaatctaatccataataatctagaggacccccgttaattacggatgggtcccaccctctgacatatcgtttgaaattcccctctttacccctcccctaacttttgaccggcggcggtaaaaaacaaagggtaaaaagggtaaattgtaaatgagcggtaaaattcatttttacctggctttcgtgcagccgctcgagcaggggaccgaacctggcggcgaacgtgtcgagcagcgcggcgagcggctgcgacgacgacgacgacgacggcgactgcgagggcggccgcagcgcggaggcctcctcgccgtcggcgtcctcgtcggcgccgggcttgtacgagcggcggcggcgcagtctgaccgagctccgcaggtcgctgctctccttggacgcggccaccgactcgccggaggcctgctgcttcgccgccgccgcgtcctcgtcttcctcctccgccttgacgctatggtcaccggcgcgcgccgcgggtttcagatctgtggaattggactccctgcacgaccggccgggctcctcgctcgacagccgctcgtcgccgttcgccgtctccggcttcccctcgccgccgccgccgccgtggatgctttgttctctctcctctctcagccgcttcactttcgtctgtagcgttctgagacatgaaaataataataataaaatagttatttatttatttaataagaattcaataattggagaccgagagatcagcatcagacggctcatgaaacgcgcggtttagaggctttttgaaagagaatttggtgattagattttttttttcttctggtgttttagtgttttttacccgatggagagatcgcatcgctcgacctcgcggcggagctcggcgacgcggaggcggcggagctcgtccatccacccgtccgcggcggaggcgtcggggccaccctcctccgcctcctcgtcgtcgtcgtcctcctccgccgccccgccgacggagaagcggcggtggaggtggcggaaccggaggcggcagctggtgggcgtgaggcccgggcgcgcggcgagggggctccgcgtctgcacctccatggcgacggagtcccagctccccgtgccgtgcctgctcacggcgcaggccaagagcagctcctccaacgtcccccagatctcacctccacctcctcctcccgccgccgccgccgccgccggagacacgtcggggccgtccgatccgtccgccatgtgctctcgtcgtcggcggctgcttcccccctttttcttctctctcgctcgcgcacgcttctttgttcgatttttatctcggagagatggatgggatggatagatagcctctgcctctgtgattcgagcgcgcggcggcctcgcgcacccaaaagacaatttcgcgtttctcaggggggtgttttggagaaggcgagcgtgctgttttcaaactggggcccaccttctgcctttctttttattgtacgatccccatattgcccctgattgcgcatactattatcccgtactatatatgagacgcaaatgtcgcaacaaaccgtgtttatttgttaggccttgttccattaatccctataagtaagggattagaggagatttatttcacatctattgtggcgtgaaattattctccctcaatctcctacaatcctattcaatcccctctaaattgaacaaggccttataggagaaaattcttgctctaattccaaaccgcaaatttgatacgcagtactctctctataaaaaaaaactcagcatatccagatttgttgtactataattccatcccaaaataaactcgttatgtacaaattcgttatactaggatatatctctatatccaattcgttgtaatatgtccaattctagtacgaggtttattattattttttttacagagggagtaagttttttttagaaaaaaattgattcacagtaaacgtgtaaacgatctaagcaaagtcagaccgtgcactttctttcttttttgacacggacggcaacaaaatgcttgatcctgaaggtgcatgatcctataaagtatgccaagaattcatcaggatgcggattagcccgtgagctgacacgtgggatctgaataattttggcccggattatcggctgcgttggattggtacgggtgaactgtttgactgggcctccttgatgattcgccaatgaacctgtccttgcttccgtgctgaacccgtgtcttcactgtgcggttacaagaaaaagatttgaacgaacagggcatgccactcgtcagaattcatagtttcaaactagtattccctaaattctcaaattcattcatgccgaatgcaaaagctggcactctgtttatcatcaattttttgtttaggaactttgatcaaaggtacaagcacagagataatgatcatatggattgaaattgtaataaggatgatctggaaaactaaagcgtttcatacatctcaatggagctgaaacttcaactaacaaaagagcgagtttatacatggcgaattggagataaataatactactagtagcagtctagcacaagcaacggcctggaaaataaggcgagattattacatcaccttatgagaattccatttgcttccctggggaagcaaactgcacctaccaaatgtattattgagcgcaaaattttaaccaagcagccatgtcaagttgcagtattgcagggggttgcaatttcagcaaattctgatacttcttcacttccggcgagcctccagtgccttcttcaactcctcgctcgcctcattcgacaccggcttcggtccactgtccaccatctccttgccgttcccgtggcgatctggcttcgccaggaatggttgtggtggtggtggtgccagggacgacggcatccttcgggcgtcgcctttaccgggcattgaggcggctctatttccaccgatctcggcacgcaggtcctccacggtacgccgcagcatgatgctctctgcattgagcacctcgagctgcctcttgacgagcgagaacccttcagtctgaaattccggcgcatccttcttcttccccttgtcggcatcggaatgtggaggattccgcagcgtgtgctcaattgtgatcttgttcatgaccagcagcggcaacttgttgatggccaggttacccgccttgcggccgtacccgtcgtcggcgagggcggccttcagctcgggcggcacgcgcagcccccactggaaccgcaggctcgccttgctccacagcggcagcacgctcctggtcgtgaggcgcatcccggacagcagcgcgccgaccccgccgccgctcttccccgcggcggccacgttcgcggcgaacccgttcccgctgaacgagaacgccctgtggtcgtcgccgccgttggcgaggtcggtcagcttgtgcgacggcggcggcggcggcagcggcggggccggggacgcggacgcgggcggggagatgacggagttggcgagcgagaagtcgccgatgcggggcttgaagaggagggagaaggccggcgggctggaggagaggaggttgaactcggcggatatggcgaacggcgcgcgggcgggggacccgagcgggccgaggccggtacggacggagagcgcgaagggctggagcgggtcgttggggcggtacgagaggcggagcgccgggccggaggcgaaggcggtggagaggtcgaagcggagatcccgcgagtcgccgccgccgccggccgagacgccggtgaggaacggcagcccgaggacgccgacgggcaccttggcgcgcaccagcggccggtcgtcgtcccggaacttgatcgacgccttcatggccggccacctagggttagggtttggtcgatgggggaattcgccggatttggtgaggttgcgggaggatagcggcagtggaggtggggaattttgaagtgcggaggtgagggatttgggggatggggcggaggtcgtcacgccatttcggaggagggggcgtcggcggcgggattgaattgtggggaggaagcggaaatggaagggggacggaattgggttggatggctctctagctggatggaccgtttttactctccttccttactccctttcctacctgtaataagtttatttttagctcctatgtttatttaaaataaatttatttttaaagcaattattgctctttacatttatttaaaataaacttattttaaagtaattattgttcgttacatttatttcaaaataaatttatttttaaaataactattgcattggagtttaggaaagtatgaagttattaaaattgaaaataggtaaaatgagaacatgttgtattgggatttgataaaattgactgcccaaactactcactctagtgcaggtttattataatataattcgtccgtttcatataagggtttttatgtttgtttaagttaaactattttaagtttgattaaatttagaaaataacaataatatttatgttattaaatgaaaataattattgtgaaatatatttcataatttacttttttatatagcatatgataatatttttctcaacaaaacctggtagcacttataatagtttgatttataaaaagagaaaatccaagaaatgttagtgataagcacccaatttcaagaaaatgtaatcgataagtatgagttctgtaaaatatcattgtataagcgacttttctcagaaatgtcatcgtcgaccatccgcgttgttaaatacatcattcatcctatagcacttaacggagggctaccaacggaatcctaatgatgatggtatttatagaacaagttgtttgtacgatgacatttcatgacactcacactcgtcgatatcatttcttgaaattgaatgattgtcaatgacatttcttagacttttttttctatgaaaaagatatagaatcttttatattttagaaacatatatgttcataatccaccgtttgcgaagcaaattcttgttttctcagaagattattttcgtaataatccacatgtgcataagttaattgtttagtttgttgttttggactctaccgtgcacatcaccaccttcttagttcgtgagtacatccctccatgatggtctaagaaagcctaatgacaggtccagtcattaattcctgatatggcctttaggcccaaaattgtactctcaaatagtcaaatctaaatctcattattatttttttccctataaaccatccatttttcaaaccttggccatccaactgaattttttttcttgggtgaaaaactgaaaatgcattacacggtgcagtcaaaactggcctaacatcctccaggaaatcaatcctaaacaaattatccaattgctaagcataagctacatttacaaagggatcaacaattcagagttcaaattatccaattgctaagcataagctacagttacagagggatcaacaattcagagttcactgggcatggcacgatcgcggcgtgcctgcacgccgccaacgacgacgacgccaccgccgccgccgccgccccggcgctccagaccacgccctcctccgccttccacaccccgtcgtcaaagttgcgcgcgtagctgtccgagtcgtactcgtacctcgccggcgcggcgagcctcctcctcgctgcgcgccgccgccgccccgccgcgcagtacagccccgcggccgccgcccgcctcaccgccgcccaccacgccctcgccgcggcggcggccgccgccaccgccaccgccaccgccaccgccgtgccgtcccctcctcctcgccgccggctctcgcacgccgtcagcctccggtacgcgatcgcacccatctccaaaaacgcgcctctcctcttccgactcgtgcgcgcgtgttttccattttataaactcttcacatcatcataaatgtgtttttccggaccagctggcatgtgggacccacccgtcggggaggaggacctgttcggtgctactccagctgccaggtgggtccaccaccagaggcagtttaataattttattgtgagctctaatccgtgttagtactactgctaaaacaaaagatttgggttgagtttagttcacatcaaaattagaagtttggttaaaattagaacgatgtgatggaaaagttaaaagtttatgcgtgtagaaaaattttgacgtgatgaaaaagttgaaagtttgaataattattttggaactaaacacggcgttgttatccgagatgggaggcatattggcattgtttccggatgcgtataatcaagctgggaaagagcagaagtacaggctgtttgattgcatttggtgacctgatcaaatcaaacctattagtgtgccagttgctgggcttgatctttgttaggaacaaaaaaggctgggagatgaataataataataataataataataatatagtatcagaacaagttcttccaaatcattggttatgaacggcaatgctttggatttcagaagttggcatctggtaatgaggggccatgacagcttcttaacagcagccaggattccagactacagagtgctggaataccgacacagtatcacaagactagttctatgttctggccaattagacaattagtacccataaacggatatatagctgctctaattggcaatcacctgttaacaacatagtagctgggatttagtagtaggcatcaactggcaaagcaagcttccatgatcttaacctgattgcagctgttaagggaactacccccaaaatgcatacaaatatgaaagtatgaaaggcatgtagccaaactactatggatattttactgagtttacgcacgtttcagaattccctgtacaaaagaatccaatttgaaacaaaataaggttttaccattaccatgaatctgtcttacacaactacttctcgatgcctaagttcatatctcatttctttgccttagagaaacgaaggcacctgtacttttcaccgctaacagtgatctcgagggcaccgtcttggttgtcctgattcgaagcagtgcccatgagcacgctcttttccttctctaagttctccttttccatcttcagccttgcctcttgccgcgcaatctcagcctgtgaaacatgcaattggatcaagtcatgctgcaggtcaagcatagttcactctatctgtcaaaacaagtttgtcatttcatttgcgaataaataaatatgagtaaaatcatcaagcatagttcactcttatatgtgaaaacaagtttgttcaagcttcaaaccatctgaaagaggaatgtgttctcaacttattatttctactaatctggcaaagatataatggtaacaggtcactctgcactaatacagggtccaaaatcactcggcatgacaaattgacaattaaccagaatggaaccaagtgattgttttggataggcaagaatcaagtgactgggagtttaaatttcccctatcaaataggattaccttattacagtcagaacaacaacatttaacaaatctcttaaccaacaacatagccttccatacgcaaaacatttatccaaatgaattaagatcagaatccgccaacacagccatattgcttatatctcaatagtagtctctgaatggaactatgaaaggattcagccatttttgggacttgctgacacaccataatcgatggacaggaggagggtaacatactgactactgagacaaaacgacatgataataggaacgccaacaaaacatgtaaagaagaaacaagccaaaatgtatgcaataaacttcggttgacataatataattcatgtaactgtacatgtcatgtgatgaagcaggtatgactattgaggaaagatcccaaatgtaccacgaactaacccacaggtctagattatctaggaaagattttgttctctcacaacatgattcaaacctattcatccttaaaaattgaaaccttgagaaggtattcataaataatacggcaatcctactcatacactctagtctacatatgcatattcttcacatttggcagcagttccaccaaatgaaattcttcaccattagcagtgtagtcagattcctatcggcataggagctaaactactgaaaaaaaaaatctaataaggcattacatccttgtccgcttagttgtttgacttgtttttaagccaaaaactgagaaaagaaaaaaaaacaaagaagaaagaacaggggcggatttggagtgatgggggaagcaaaggaaggggatcatcaacatcagatcatcaccgacctcgcggcgggagagctcggccttccaggcggcctcccgctcggcgacctcgcgctcccgctcctggatgtagctctgcatctcccgctccttcatgacgcgatcctggatgtccgcgtccagcgcctcctgcagctccttcacgaacctgtccaccaccgccttgatccgcaccgacatctccctcccccgcacttcgccgcctcgccgccgctggcgccggactccggcggctgggctagggctccgatgcggccgcggcgcggcgaaattttcgtgggccgctcgtttcgtcgtgggagagagcccagcctctgctgagtcagcaactctcctgggtccgtacgctttcgactgcgaaagcccgcagaaaacgtattccagaaaaccgtaatcatcaagtgaacacgtactctttgtaaacttgcaacaagccagcaggatgaaaacggttgggaaaacatcttcgtccttcgaccattttagtaaccatacttttctcggaaacagaaatggtttagaaaaatagaaaatatcaaaaaatcaaaatcacatatttaatttaacatggctatataatataaccacataaattcatttctatttttaccattttcattttcctttttcttttaccgtttccgacggtttggtaggtacaaataagaaacgggctttagtcggtcggttgagaattttcgtgactattttcatcctacctatgacctcctttgaaaattttcatttttgaggattttggtagaaattgagctaatttctaatgttccaaagaatccaaagtatcagcatctgagatgcggcataaaagagatgcctcttctgttggcatgtccttgccaaccgaaaacacatgatctcccaacttcacagacagtcacacaatgcaagacatacagtgacaaatgggttagcatcagcaacagagaaaaatgaaaaatgtgcagaacatttttcagcttcacacagagagagcataccagaaggtaaaagaactgagccacaagctaaccgcaacatgccaacatagttacatagaagcaatgagctttttcatcggtgtctggaagataaaaaaacaatttaaccacctaaataacacattgagtctagtctccaatagtaacagcacctacaccagaagagctagctagagatgcaacggctacagttttcttccctgattcaggttcagacattacactagataggggggctagttaggatccatggcgtcgcaccggagtacctcgagtaccaccgccacgacatttcctttcgcaagttctacggcggtcagacgggaccaaggtctggtcactgatgatgatgaggaggaggagctcacttccaggataagctgggtagccctggctggccatggttgctggccgtgacaccttggttcagcgggctccccgggccgcccgatgattcactcaatgtgccccttgatggcgggctgcttggccccgtcccgctcatcggcaccatctttagcggtgcagacattgggtctgaaggagcatgcagctttggcccctttttcccttcggtgttg

SEQ ID NO: 9707 - DNA, 11477 bp, Oryza sativa
ccccgaatcctggccgagcacctcgcttccatctttggcacggagaaggaccgcgtgaactgccccttctacttcaagatcggcgcgtgccgccatggcgaccgatgctcccgcctgcacaacaagccgtcggtctcgccgacgctgctgctctccaacatgtacctgcgtccggacatgatcacccctggaattgatgctcagggcaaccccatcgaccctgagaagatccaggccgacttcgaggatttctacgaggacatctttgaggaactcagcaagtacggcgagatcgagagcctccacgtgtgtgacaacttcgccgaccacatgatcggcaatgtgtatgttcaattcagggaggaggatcaggccgccagagcgctgcaggcgctgacggggcggtactactccggccgtcctatcattgtcgagttctcgccggtgtccgatttccgggaggccacctgccggcaatatgaagagaacagctgcaaccgtggtgggtactgcaacttcatgcacgtcaaggagatcggcagagacctgaggaagaggttgtttgggcacctgcataggtcccggagaagccatagccatggccggagccgcagcccgagcccgtaccattaccggagggactatgatcggaggagctcatcgcggtccagggaccacgacgattactaccgtggaggtagccacgattactaccgtggaggtagccggaggagcagcgagaggcaccgcagcagctacgacagcgatggcagcaggcggcggcacaggtccaggactaggagtcctgtcagggatggtagcgaggagaggagagctcaaattgagcagtggaaccgtgaaagggaggctgcacaagtgtgatctctggattagttgctgtttgcaatggcccatgtttctcatcttgtactggtagccctagattaaattagcatcatatcttatcttaatgatctgagcttggatgtactcgagattttccttactgaacttgaattttctgtcagatgcatgtgttaactgaacctatttggtgttaaattatatttgtactgatggttgtgtgctttcggttttgttcagcattcggtatgtttttgtgcatgtggtcaggactagctgaatggttgagtaaatctcgagtgatcacgatccacaatgcattccccattcggtagtatgctattgtgcatgtgatcaggtctagctgcagtagaatttgttgacttgtaatgataattgcagcttggagcaccaattgttttttgttttcattcagaggtttcagcacgttgcatcttttagcacctgttagtgagatgaaatgatttacaggtgagatcatttaagttatcattcaaatgtagtagttgatcattcagacgtttcagtatgttgcatcagtgcaggtaaaactaagatgcaggtgggaagagcgacgtaccagctatatttctgaattttctgatatttcggatcttttcatttgtaacctctgaacttatgtttcgcatattttagcaccgtgagttgttatgatacactgccgaactacacatcttcagcgactaggagcaagctagcagcggcctcgtccatgataccagtatatgtttcctacaactgattgttccactgataggatatattgcctatttctcatatctcagacaaccgaagaacccacaaagaagacatctactgcaaataacaatcatctgaacgaaagagctcgataacagatgacaggaaaaggaaaaagaaaaatcatgaacaaaaggaacatgagaaagaaatcagggagcacaagcatgcacaacagattaacagcactgcaaatactgagcaagctggacatctgacgaaacataatgaaatatttcgtggatggctcaattaaccaatgagtttgttcccgctcacaatttatcagcgattctccgcccaaaaaagctacaggtatagcaaccctcttagaaacctaagaaaccaggggtgggtaagatgtcaacttcctattacatgaacaaaaaaaggtagaaactagatgtagatcaaatctacatcttagcttccttagcagcatcctggtattcagcctcaggagtctggtcaccaccactgctgctgctgctgccgccgccactgccgccaccgccaccttgttgcatgtgctctccaatctttgaaactgccttgtttgcagcctcaagcttctgcttgatcttctccaaatcatcctcagccattgctgctcttagatcagatacagcagactgaatctcattggtgacttcagcaggaaccttgtccttgtactcactgacactcttctcaatgctgtagatcgtggtgtctgcagagttcttcagatcaatcaatgatttcctttcctgatccttctgagaatgtagctcagcctccctcaccatcttctcgatatcactttcagacaaaccgcctgaagactttatagtgatttcttgctctttgccagtggacttgtccttggctgacaccttgacaataccattggcatcgatgtcgaatgtgacctcaatctgaggcatacctcttggggctggtggaataccttcaagctggaactcaccaagaagcttgttgtctgtggccatctccctctcaccctggagcaccttgattccaacctgggtctggttgtctgcagcagtggagaagacctgactcttcttggttggaatggttgtgttccgattaattagccttgtgaagatgcctccaagagtctcaataccaagggagaggggagtgacatccagcaaaaggagctccttcacatcacccctcaagatgccaccctgaatggcagctcccatggcaacagcctcatcaggattgacacccttgcttggtgtcttgttgaatatctgagaaacaatatcctgaacctttggcaccctcgtcataccaccaaccagtagaacctcatcaatgtcttttgcagatacgcctgcatccttcaggcagttcacacaggggatgcgagttctctcaatgagagactgcacaagagactcgaactttgatctggtcaaggtaatattgaagtgttttgcaccagtggcatcagcagtaataaaggggaggttgatttcagtctgcatggttgaggaaagctcgaccttggccttctctgcagcttccctgagcctttgcaaggccaacttatccttgctcagatcaatgttgtcagacttcttaaactcactaaccaggtagtcaagcaatgcaccatcaaagtcctcaccaccaaggaaagtatctccattggttgccttgacctgaaaatggtacaaaaagttatgatcagcacacatgtggtacaaaaagttatgatcagcacacatgttcaacagatatgcttaggtttagagtatatgaacatgcaatgagaaagaaaattacctcaaaaactccattggagatctcaaggattgatacatcaaatgtgccaccacccaagtcaaatacagcaatcagaccctccttgttgttcatcccatatgacagagctgcggcagtgggttcattgataatcctcatcacctctagcccggcaatcctaccagcatccttggtagcctggcgctgagcatcattgaaataagctgggacagtgataacagccttggagacagttttgccaaggaaagcctctgcagtttccttcatcttggtgagaacaaatgcaccaatctggcttggggagtactgctgcccacccatctccacccaagcatcaccattaggtcccctgacaatcttgtaaggcaccatcttcatttccttctgagtctgtgggtcatcaaaagttctaccaatcaagcgcttagacccacggaccgtgttctgggcattggtcactgcctgccgactcgcggttatgccaaccaaaagatcaccattctggttcttggcaacaatggagggtgtcgtccttgcgccttccgcattctcaatcactcgtggtgtctgcacaaacagattcattacttctataacaaagcatggctagttcaatattaaccgaatatatagataccaaactaaaagaatgtaacagtaagtcagaacatcctgttaatcacaaattaattccacacaacaactatattcatcactactatactaaagcatccataattcactaataactgaatgtatcactatccaattaaaagaatatcatgactagtcagaatatcctattaatcacaaattgatccaattcagaatatcctattaatcacaaattgttccaattcaacaactatattgcagttcaagatatgctactgaatcaggcaccaattcaagatatgctactgaatcaggcaccaatcaggcaccaactgttttacaaacaagaaaagataacaaatttcgaatggaacagggaaagaaaaaaaagaccacaccttcccttccataacggagacacacgagttggtcgttcccaaatcgatcccaataacatccgcggcggcaggctttgagctgtacacagagcgaatccaatcaaccacccatcaagcacaaagaagagcagttgagatcgacacaaaagacgactactaaattacctgaacgcacgagccactgatccaagcctggacaacagaggagacgccgccgcgtgacgggccatcggagcctggtcagatcaatcaaacaaacaaaatacattacatgagatcacctcaaccatcgcacgcaggcaaatcaacactacagatcccaaaataatattaccacttcaccaagaaaagaaagaagagcagagaggggtggaacctgagaggcggcggaggcgagggcgtggccggtggacctggccagcctcgacgcgatgagagatccgatggccatggcggcggcggtggtggcggcggaggtggagaggaggaggaggaggcggcggcgagatccggaaaaaccctaggcggggtggcggcgagggcttcgctcttaaacccctcgcgggatgcggctctggcttgcaggaggggaaagaaaggcgcggccaggggcatttccgtcatttcggtggggtcgggttgtgtgactgacggtgggcccgggggtcgggggtcgtggggagaaggttctagaccgcatcttagctctcgataggtggcgaagtcagaataattgtttgaatttgttttttcttcttgcgaaggaatactggtagtagtgtttttcttgatgaagaatgcaacaaaacaaatcaaatgcatctagcgaagtttgatttcaatccgcagatattacggaagaactgaaagaataccctgatcaggttataccgaattcgggtctagccgcttagggtcagatcggtagaaagttgatttttttttttgaaaaaaaatacattttttttggatgctctcaccgaatcgaatagcatgaaaattccgagctctattacatttgcccaatgatgaagatttcaagcaatgcagcccattaaatctcctaggcccagctcaacatttggcccataaattccatgatccatctcactatggccgactttcttgtgctcacttgcaaggcacacgagatgaacctctgctttctgaggcctccaaaccctctcttctctaactgaatttttgtttaccagcattcgagggtctgtttggaaagctgaagattatgaaagaagttgtgattgttagaagcttttccaaacaagatttgctctggtccaataaaaaatatctcgagatacggtacctcacgctaataaatcgtttccgatcattggatctacctggacaggacattgttagatccaacgatcgaaaacgatttggtacctcgaggtaccttttgttggatagaagcaaatctcacccaaattactctgcagctatagaattcagaaaatgaactagaaactagctctttcaaaatctcataagctatttatcaaactgtttctcagaaataaactctccatccgttagttaccgtgctggagttttaagaccataggaattaacacttctcttgaagaagtgctacctgctgctgcatagagcatcagaaatgactgctataaatcacaagcagttttccacggatcaacaggttgagatgaaagcctgaaacggatgcatatacactgagcacaaagctgcatctgaatcctgaatggagcagagcagctgagaatgaggacagaaaacacatttactgaaaaaatgtgtttcagtgacaagttcagtgttcactcctgggtatcaggcatacggtaaacatggggaagccggcaaggttcatcgtctacaaggcctgccttcttgtaggattcgacgctgtcggcgagcgtctcctcaagtttcctaggtttccagcccaactttgtcggtttctccgatgtcaattcgaccttgttgcccacatcaaccaatctgaccaaggaaaaaaaaaacagagagagaggagctgctcaaatcgtgttcatgttttgagcacaaaacacttagggcttgttcccttcgttgagaaaaaaacaacttacaaaactatggtaataccaaattttggtaagttaaagttaggtggtgtatggcctgaggttttggcaaaatttggcaagtagctgcagttacttaaacgagtagctgcagttagggtacatgctcttcatcaaatccaccaaatccttcatgtccatttggtcttgagcacatatgtacctctcacatggccctgacttgtcatacatgatacactagaagtaaagaatcagtgacatcacggacatccactatgggccaaaaattgttgttcataacatcagggcgtcctggattgcaaccaaaaatccaaaactaatttagtcagcgtacaagaggaaatacgtattagaaagctagaaactactccctccgtcctaaaattaattgacttttgtacacgaatctaaacataggatacattcatattcctttacacaaattgatttatcataggacgaagggaggagggtgcctttgagggtgaacctttcatgatgtagaggagaactctgctgctggtgttgagttgcatggtatgcaacagtgggccaaagacaagggcagggcaaactgtaatgacatgcagtccatttttctctgaatattccagggctatctcttcagcttcggtcttggcaaagctgtaccagttctgccaacacaagaatatatttggaggtcaataaattagtccccgaaagataaattaatgctgcacgaagaacagtttaatttgcaatatctgaccttattttctctgcagaactccttgtctgaccagcaagtctcatctctcaccctgtcttgaggccagctcgggtaaagcacacagcaccaatggaggagaccatgacgagtttctgaacaccggaagctgagcaagcctcgagcacatttttggtgcctttcacagcaggaaccatcatctccttctgcatgtatatatgatcaccagctagattgtaagattgtagaagagttattgtacaaatatatatttctttagagaagggtattttttatccagcatctacatacaatcggatatatgcattatttagttacttagccccttaaataaccaaatctaaaagctttttttttaaattggaaacttagcccctcaaataacccaatttaaaattcgtttatatggagatttgaactcagaaccttagagcgccactcaggtcactgtaaccattagactacatgtcctttcacaattgtacaaatatatacttatcggacacgtatcctattcggtgctgcatatgcagtagttgtaactgacacgtgggtcgtacttgcaccaaacccagacccagtgacccacatgtcaatgacgcatgttacgcatatcagggttcacatatcacatatcagtgacacccactgcatatgtagtgttgtagaggatcccactccacacttgcctatggatcaaccgtctcgtcttccggcaccgaagtgccggtatggaagaccccctcgcagccggtgaacgccaccgtcagagcgtcgccgttgagctcgtcggccttgaacaggtgcaggttccccggagccaatgtccagctgcttcagaaacgcgtccctgggatcatctgaaacaagaacacgtataatcaccatacctgacctgacaacaaaggaaaagatcgatgaacataagcaaatatactgacgtgcaattctttttgcgcgtttgcaaaaagccgaaaaagatgaacatcagcaagaagtcgatcgagaggtccatgcctgggtcggctgcaacacaaaactacaaaagtccattgctactgctctgctagtagcatcaaacatttgtttaatcgggtggcggatatattaaaattacacacacaattgtccatcttaatcagtagacaatattcaattattgccaggcataaattgtgtcattgatcacaggctgaatcaattcactaatggaacagagcagatgataatgtggacactggacaggaacacctgatccctcatctattacagtattattggaaactttttttttcagtgacaattagatcaagaacagtagcagcaagacggcgccggctgttcactcctgagcatctggtgcacggtaaagatggggaagccggcaaggttcgtcatctacaaagcctgccttcttgtaggattcaacgctgtcgacaagcgtctcctcgagtttcctaggtttccagcccagcttcttcagcttctctgatgtcaattcaacactcgtagtcatatccacatcaaccactctgcaaaaataattgtgttcatcttgtgatactgatgcaataacctgatgtcatttcagtttctctgtcatgaataggatagttgatgatgataatgatacaaggcaaattacttggctgtgtagctgtagttagggtacatgctcttcatcaaatccaacaaatccctcatgtccatttgttcttgagaacagatgtatcgctcagatggccctgccttgtcgtacactagaagtaaagcatcggcgacatcgcggacatcgactatgggaaagaatttgttgcttagtgcatcagggcctcctgcgttgcaaccaaaactgatggaatcagtgcaccaatcaccagaacaaacaaaaactgtagaaactataaaccattgagaaaagctagaaaacagataccgtttgcacggtatagttaggcccggtttagttccccaattttttttcccaaaaacatcagatcaaatctttagacacatgcatagattaaagaaaaactaattgcacagtttgcatgaaaatcgcgagacgaatattttaagcctaattaatccataattagccataagtgctatagtaacccacatgtgctaatgatgaattaattaggctcaagagattcgtctcgcggtttccagacgaattatgaaattagttttttcattcatgtccgaaaaccccttccaacatccggtcaaacgtccgatgtaattcctaaaaattttcttttcgagaactaaacagggccttaatagaacctgctccctgcttgcatatgatctgacacatgcattctcacaaatcacaagcaactttccacttctcatacggatagctcgggaagataaaaaatgacgagaagtagggtccatgttgaatatgtgcggatgagatgacatgggccctccggatttccattgatgtccacatataaaatggaccctagcttggcatgcagctacaaaattttttagaaatttgttacgttgtactattgaagcagcaccgatgaggggaaagtcactaaattgtccccttttctttcttattttttgattttgtttttttaagatgaaaccttctaattttcatctcaattaatcggtacctaggtaccaaacatgatactatacctatattactatctttgatatatatctaggtacctagtctgagacccataagtatcatatccgatacaataagtgccatgtttgatacctattggtaccatgttcaatacctacgtacttggtctgatactcgtgggtatcacatccgatacttaggtatcaagtctagtattcgtggataccatatccggtacctaggtatcaggtctgatacctatggtaccatatccgatacctagtaaccaagtcccatacttatggtaccatatttgagacctcaggtctgatacctatggtaccatatctgatacctagtaaccaagtctaatagtacttatggtaccatatttgagacctcaggtctgatacctatggataccatttccgatacctagtaaccaagtccaatacggtaccatatctaggacataattaccatgtcagatacccatgagcaccaacaagtttgatacaaatagacatgatatgtatctccaaatattagtatcatcacatgtatcaatctaggtgactcaacctaattggtcagcctagctctcattccctattttataaaaaaaaagaaataacgaagagcatctatccattacatattggcccgactccatccaagccacctagcacataggcatgtcagagcatgtggcctagctctgtagtcgtcccatctatcaaaattatacatgaagcttgaaagttagggagtgtttagattcaggggtgtaaagttttggcgtgtcacatcgggtattatatagggtgtcgcatggggtgttcgggcactaataaaaaaactaattatagaattcgtcagtaaaccgcgagacgaatttattaagcctaattaatccgtcattagcaaatgtttactgtagcaccacattgtcaaatcatggcgcaattaggcttaaaagattcgtatcgcaatttcctggctaattgtgtaattggtttttgttaatccacatttaatactctatgcatatatccaaacattcgatgtgatgggtgaaaagtttttattttgggaactaaacaaggtctaactatgccgttcggacgggatagcgtgctctagtttctctccattgagaaaagagggtgaggtgaacctttcatgatgtagagcagaactttgctgctggtgttgagtagcacagtctgcaacagtggcccaaagataacgccagggcaaaccgtaatgacatgcagtccatttttctctgaatattccagggccatctcttcagcttcggtcttggcaagacagtaccagttctgccaacacaagaatttgaggttcataaattaatcctagctactattaaccaggaaatccaacgaaaggctaaaagagctttttttcccccttttctttttgcagttgtctgaactctgaagtgttaagctgctatctgtagaacactagtttggcaacat

SEQ ID NO: 9708 - DNA, 34398 bp, Oryza sativa
aaagtcaacagcgtcatctattaaaaaatggaggtagtataatttaacatacaaactttaaatccaacttgaatatgagatctagagctgtgcaagggatgcctgatcggcgaccagccgagcggggctgcacccgcgcggtcagtcctgcccctctagtcccattagtatatactccctctatctcataatataaagcgtgctcatattacaagattcaactttaaaaacatttgaccaacaattattataatataaattaaattttatttgctaaaattaatatcattagattaacatttaaatgtactttaagatgattataattttgttgcaataaaccttatagcatatgagaaattataagtcaaaaattagttttgaagaccgtgctaagtttgaccatgccttatattatgggatggagggagtacgtatgtatatactttatatatgtacgtatatactttatatacatacgtataaactttgtatgtatataaagtatatatatgcgtgtgtatatgatgtatataaaaaatatgatatatatatatatatatatagttttgatgtataaaaaatatacacgtacataaaatttgtatatggcatatacaaactttgtatacgtgtatactccctccgtactcgtaaaggaagacgtttaggacaatgtttaagtcaaaccttgggaatataaatcatgaataactctcaagttgttgagtttgaaaatgtaaaaattatatgaatagatttgtcttgaaaaatactttcataaaagtatacatatatcacttttcaataaacatttttatagaaacaagaagtcaaagttgtgttttggagaccgtgtcgctgtccaaaacgacttcctttacaagtacggagggagtacatacatacatatacaaagtttgcatacacatatacaaactttgtattcgtacgtataaaaaactaaaggaaaaaaaaccaaaaaagcaaaagaaataaagaaaaacataaaatagaaaaaaccgaacggggacacgtgtaccatctaccgtgctcatcccgccccgcccccctctgcatccgccacatgccgcgctgttgatgaaaaaatcgaacacaccggcctgggagatctgcttagctcctgtgcaggtccaaagattgatgagatgcggacgtgccagtcaatttaatcctgtaactgacaagatttgcaaataatagatcaaacagccgatcggctgacaagccgatggagtagttccagccgatagccgataatagccgatgccgatacaagccgatagcgatagggtttaagcaatcggctatatgtcaaatgtagatactgatataaaggcaatcggctgatgatgatgtaatatagcaatataatcctgtataaaccaatcggctaacaatatgatatagtagaacaagtattgatccgaaggttaaagcacccatcggctggaggtccgatgtcatgaaatccacaagattagattaaacaatgaaacctttgttgccatcggctaaatccaacttatatgtatatgcaatccttatgagccgatgcaacgtccatgtaactcaccagctgaaaccccgatgaaacccttactggcaatcaataagcagtctagagattatggttctaagcacgacttagtagatcaaacttaactgatgcaacactaagtatgaaaagaaacacaatatctagacaatcaagccgttgactgattttcagggtggtagatgcctaggctaattgtcggagcccaaaactaacaacttggatccgactgagattattgtatcaatccctggatcagtaaaaattgatacatacaatataactggttctttattgcatatgttaaagtcttacaatactaagggttttacaataataggtactcacctatctaattagtacacagcggaagtttctatacattctgactagtgaggtaaaaccctcagggattttctaagttatcggggtcttcgtagtaatagtcatatgggtcctcctcttgacccagatctgaaaaaggggttataagagcaaggatgagtattcacaatactcagcaagttatcatggaaatatgttatgcattgacatataatagggttctttgcaaaaagcggtattagacaatctggaaaagttatagcagaatttataaaacatataaactttagatttctaaccagggtaccatatgagtcccagtactcaactccatgagtacggctattcgaatagtttcaaagatattctactgcagcagatgtacgttttacccgcagtccacgacttgctgataattatcggctttagtcatggcccagtattaagtcaataacaattatggcacctgttccatgaacttatatcctcatatgctctgaacgtaatgttaacagcagcaagaggagttctggcgttcccgaggtatttaaggggaactgatcgtatgacaccacgtcatttcgatcagggtttagaaatataccatatagtttatactcgagtatcacaaaccatttacctgtacatggtaatggttaaagttgcccttcgcggctatagttgcctcctgcgcgaggacttaaaaataagaaccactatacagaggtgccatattgctaattaacataataactaggtctgtccccattctagaatctgcggtcgtacccgttcgttcgacataagtacctgttaaaacttatatcgattgagacaatactagccacctggaaatcatccaaatcttacgtattgtcccaatctaagtatagggtattttaaccagattgtaagcaaaataagcaatactaaattatctgggtttctatgattaatttatgcatagaaaatagaatattgaatagaaggctataaataaataaatgatttgtaaaatataggcttaaatgatcaacaggtatatggtaacttgccttgctcgatgtcctgagattgattgatattatctagagtgtcagaggaatcctcaagacctagggttagacatataaaatttaaattcaaaaggagtttaaataaaatccaaaaataagaaaaatagagaaaataaaataaaataaaatgaaaaaatagcaaaaaggggctcaatagatagagaatgattttagaagaatattggttcaagtttcactgaaattggatctatattttaaaagatatggacttctaaagtttgaaaatcaaataaatgtgaaatggcactgtgggtgggtcccacctgtcagtctctctctctcttctcttcttcaacctccagccgttccccaattccagccggcggcgctagggttggcgattgcggcggcgatggagggggaaagtggttgcggccgaggaggggagggagctagggatctccggcgacggcgagcggcggcggaggagttaatttgatgcgtggacggcctagcggctacggcggcggtggcacggttaggccgagatggcgatcaaggtgataagagttaaacatggctaggggaggggttctagagcatctacgaggtgcctagagggattccggtagcttgccaacctttggcaaggcgcggaacatagttgtcgacgagcgcctccataggccgcggccgtgctcacgtcggcagctcagagggtggcatgttagtgcaaagggattgctaaaatggaatctaggtagtatgtagatgattgaaacggaaaaactcaccgagatcggttgaaatgacggattgcggcggtgaagaacagagcagcgcgggggcggcggtgctcggcttggtgcggcgaggtaaaaatcgacgcagggctttggttagggcttagtatactagaacatggtatgatataggtgttctaagggttatttagggcggaagatggatggagaggggtggagtcgatcgcgcacaaggtgttcgaccgacgggcgagggtggttgatgagatggattggtgaagcagagcttcggggttgtggggctatggttgttgatgatcgatgatggacagggaagggattggggtcctatttatagggctaggaggagcggatgagctcgggcaccttcatcgccatggatgagctcgggatttggatgaggcaaaggtggcagaggctgagagagggcgggcaagatcgatttgagtggcgggaggccacgttcgaatacttaccggcgaaggattgacttgaccgtagttggaatcggctggcgacgtgttggcgccaatccgagcacgacgcgcggcagcggcgagggtgaaaatggccggctcgggggtgaatggtttgaattgtgagaggggataccaccatctatctccaatccaaccatgcggcaagaattggcgcgattcaccccgggtagaagcaaaatcgcactcggcggcggcttggacgggtgcgcacggcgtcgagcggcaatttcttgcggcgatcgtcgtcctggctttgtcgtcgtcaagattggtgcggcgacggtgggctgagggcgtcggacgggcgacggcgcgccaaggcagtcgggcacgtgcaaacggccccaaggccgacgcgcggcgacacggcgcgcagcaaaatcggatgccagtgcggtgtgtgcaaggggaggaagaagtaaagaaatccacggtttttgagtggggtgtggtccctaggatcaaatctaaactttgtgcaagattggatggagttgggctgctctaggtgggctagacattctaccgaacaccttatgtgcaatgaacagtagaattcagaatttttgaatatttcctagaaaagatttgaattcaaactaggagtttggaaaggtttcactagggtttagagtatagcaaatctccactaatattagggtaagctaaagaaataatctatggtttgaatttgagagaatttgctcaaattcactagggtttagaataaagggaataagttagagtaaattggttgggttataatacttaaaccaattttaaataaaaatcaaatagatttttgaaccaaacaaatttaattaaaagccagaatgatgcagtcaaattttagtttaaaatttgaggatgtttgtcacaccccgaagttctcctcccaagcctaaaatttaatttataaatgatcctaagaaaatgcaggtgcaaatcaaaagaaaaccctaagaaggtaatgcaaataataatcggatttgacatgtggaatttttcttgagttctacatgtcgaaattcattaacaggatttttagtggaattttcagagctctagaaataattttaaccaattaaaattgagcaagcaatattttaattccagggaaaatcctttttcctttttctttttctttttcctctctttttcctttttttttctttcgaatgggccgtcggcccattctctcctttcctccccccctcctccctgctgggctggccgcaggccgaggcccagccaggccgtcccgccgccctcctctccggggtcgccgacaggtggggcccacctgtcgggtccttcccccacctcccgccgctctcgctcgcgccgccgcgctcgcaaccgccgccgcgcccacgtctccgcctccttcgggccacgtcgaccacgcacgcgcgtgcgccgcgtttcccgcgcccactcccctctctctcccgctcgcgcccgcgcccgagatggccgggattcgattttcgaatcccgcctctctctcctcccccactcccccacgtcggccggcgattcccgcctctcccggccacgcccggtcctctctctccctatttaagcttccccgtcgctccctctcactttttccccattccgccgtactctctcgagcctcccatcgctcccgcgccgtgcaaccccttgccgccgccttttccgctactccggccgccgctagccgccgttagggtcgccgccaggccgcgccgtcgccgccgtcgggttcgcgtggccgagatccaccccgtccacccctcctccgtcgaggttcgtcaccggagccctcgttccctcgcactcgggtgagcaccacctctaccgccgccttcggccatggtttccggtcgccgtggtccatctccctctctctaatccctctcttctccttccttagggcaccccgaagctcatccgcccgccgacgtcgtcctcccgtggcttgccgtcgctgttcgccatcgtcttcctccgcgccggccaccctcggtgaggcaccccctcccctctttttcccctccctctccctcctagccgccgctttagcgccgccgcccgttagtcgtcgctttagcatcaccgcccttcggcgccgcctttgcgccgccgtctccgccgtcggttgctgtcgtcggcaacgcacgtgcgcgtgcgcacgccgtcgccgtgaccggtcggccggctttgtgccgagccgagcctagcctgaccgccgccgcaccgtccgatcggccccgggccgatccgggccgtcgatcccgtggatcggcggtggatcacccgcgtggtcccggtccacggtagaccggccacccttgagtcgctgaccagtggggcccgcatatcggcgccgcaccccctccgtgctgacgtcagccctggggcaatattgcgcaataaattgattaaggcttttctttaatagtaaaaacacatagaatcttctaaaaatcataactaattcatccgagctccgattaaatccattcaagtctcagtaaattcataaaaatgtgtagaatccattaaaaatggctttgttatctgtttcagtagtcttatagcatgttttgcttgtgtgctttatttgtcgcgtagatttcgcccgtttcgtcgattcgtggtttctcgaagacgttgctgtggttccatcagtgcgagagcaaggcaagtcatacattgcaattgatcatattgtacccaatttacaaatgtcccgcatttctattaaatattgcattgttttacaatatcatgtgggattggtcctattactcagctatatgttgtttcccttacgccattgataacttgggtattaaaatgactagatgttggtttaggagatgcttagccatgcttagttcaactagtgcacaaagggggatcacattaaagcatagacttgattattggtatagctttgatttagtgccaccgtaattgtgttggttaattaaaatacacgtcatggtgggctgtgggtgcatggtcttgctagtcgcacccatggcatttaaggaccggttcgcgggatgccctggaagaatttatcgtacttaccacaagctagcgtgggcaacggctgggcttgtagtgtagcttttctctagccgacgtacccaggcgagggtgggcgtgatggagttgggtcggccgaggtgtccggttgatcggcttccggattcaccgcggcacaaaaggggggctgcccgttgcctgctggggacgggggcgaaccctaaggtgtggtgcgatcggttagagggggttatgcgaagggtcctgtcacggcctctttccggtatgtcgtggtggtatgtcggcgcacgggaacgtgtcgtggggctgtgtcttgtgggtacagttgtacacctctgatcagagtaaaactattcgaatagccgtgcccgcggttatgggcggtcgaccagattcaccgtgattagtttcaccctagttagcttttggaactggttagttcaggtggtggtttgggcctgttgcaacgtggtgtaacgttggacagtgattggttaatatggattaattactacaactgttttacggctttcaactactgcttgaaatgccggctttatgcaaaagaacctttagcctcccttggatatatcttgcatcatacctcctcttccggtgtgacttgctgagtacagtgggtagtactcagtcttgctctcttttcccccacaccagagttgaagtccttcccagttgaggatgtctcgaagaggttggtttcgtcgctgccgtcaaggatgcctgtggaatggagtcgcccgctgcaggagtcaagccttcaggcttagctcgcttttatctttttccgctgcatttgtaatcttttatgatgtttgtaagacgtggatctgaatgtcaacactgtcgtttgtgtaccccggctggtcctggacggggattttaatgcacattctgcttggaattctattcgggaatttctgggcgtgacaatgttacactaatctaatctagtaacgcgatttagccgataccggcagaaaccctaaagcgagagacagccgatatagctaaattgatatgctaagactagattaacagagacatgataaataggtaggcaaatatatcatctaaaccagagcaatccaagaggtcgaatgtaatgatgcagccttgaacgacgccgatgtagatgagacaattgcctggaccgacggaactttggacttatcctttcgtcggagatcgaagacgatgcagccccgcgtcgggtgccaagttccgccggaacgtaaaaaacaaaagtagaagtaaaaagggtggcgatgcgccgaattgtattgatcgtagcgatagattacatagaccccgggtgtatatatttatacccatgggttgatacaagtccttgtcggacaagaaagaaactaacctaaagataaaaggaaaatataaagtccttatcggacactaaacacattttcctaaagataaaaggaaactaacaaattattcctaattaatagataaactgacatgccgcatcctctttaaactcggtcacttaaggataaacttcatttagtagattgattttcttaaccgaatatagcaggaatccgactattggcgactttataactcccatcggctgattccgagatgctgcagccgataatgattctaagccgatgacgtctttgccgattaccaaatttcactgttaacacgcgccccgccccgggggggtgggggggtgctgttcgccgattagctttttcgctttgcagatcctaaaattccttcgaaccgaaaaccctaactgagtacggagctggaacgtactccctcagtcccaaaaagaccaacctagtacaacgaatcaatgtgaccctttctaataaaatgaatcaatgtggcccctcctagtacaacgatgaagttgccttttgtttttgggacggagtaaatactggagacgtcttcgaagcgaaacggctgccaaggagaccagctgttgggcttcaagaagtccggcccattttgggtagctcacgggactcaaggcccaaacccatatagccagaagtgggccatcctaaaactaaccgaattgggcctcatttaattcctcgattcttctgacagacgcatccacgagtggcacgcatggaacagccgctccccaccgccgcggcggaggcggccgccgccggcggcgacggcgaggcctaccggatccggccgctggagctcgccgacatctccagggggtttctgggcctcctcaaccagctctccccctcgccgcccctcacggaggaggccttccgcgcgcggttcgaggagctcgcggcgctgggcgccgaccacctcgtcctcgtcgcggaggacgccgccacgggccgcctcgccgccgcgggggccgtgctcgtggagcgcaagttcatacggcggtgcggccgggtggggcacgtcgaggacgtcgtggtggacgccgccgcgcgcggccgcgggctcggggagcgcgtcgtgcgccgcctcgtggagcacgcgagggggaggggttgctacaaggtcatcatcaactgcaccccggagctgacggggttctacgccaagtgcgggttcgtggagaagaacgtccagatggggctctacttctgaattctgatctaggtttcgtcttcttggatctctctgcctactacttgttgtacttagttaataaggaattttatgtcagttattgctccttgtatggatggatggatcactgatcaatgtggctaattccatttgcattgccaagatgtgcaagtttatttaattgaatggattgttctctgcatttatgtgcaaatctcattcttgcaaatgatttcaatgagtaaaagtaccataataatcgcaaacaaaatttatagtgcaaacctgtgacagtatggtttcgtattacatcgctcctgcctttgagaaattgagagtgatagtatcacttttaacagtttctgagtcgtatgaggccatcaggggggttagcgtggctgataaacaaaggttcagttatgttgcagcacttaaattgctggaggatatcaatccttccttatttccatcaatgacttgacacagtgtggtttgatctgatcacctctttagtttggaaacatttaggtagaaaagatttcaacattcacaagtactgttgtaattgaactcagtgtctactttatgagtaagcgctgttttgaatgtattcttagctttaggttggcgctaattaccttctctttctgacaaaaatgctccttatgttcatacagcattctttcatctatatcagaatttttagcataagttcaataccacatccaaagtaccctttagaacagtaaagttcagtagtatacaaaggtatatcaaaccaaggaggtgcatttgatacaagtaagtcattattcatgaggctacaagtaaatcatggatgcttgtgttggaagagcaaaacttctagaccatgcaatgcctagtttgaagttatgaacaatccactctttgcttgcgatggggaagtttatttattcttgtaaggtaacacttactttcatctctcttaatcctccactcctttagtctattattatgtttagttgttgattacttgatttcatactccagtttgttgacagcgatggtcctgttaattaaggcatgatcatatctttttaaatcaggtctagaggctaagattctttccattgtgttatagtagtggctcagcgagattgtgtcatactagtaactactattttgaatgcacaagggcaagccaaccgaagtcctagtgatagatgaatattctgtgattggttggcattataccaaggagtagtgggaatgtaaaggtggaaaaatgtctgaatagcgtcagaaaggttacataattcgaatagtatggtagtggatccctgaatcagcttgtgctggattgcttcttttgctttcttttaccaccctggtttccaaaatttgaattgacctgacttttgatcataatgatctttcaaagaaaaaaaaaaacttttgatcataatgcaaccagctggtgatcttgcctatcagcctatgccacaagtgctctctgaaattcacagttcatgaacctcatttggaagtaacattattaccaaaagttcacttttaaaatcttctagaggcagggagccagctttgactgcttattgtccctattagtatctgctttgcatagtactctcgctttcgtgttgtaccgtcaaaaggtttatcgttactgtttatgccattgtgatagatcatagatggcctctttggctttgtcatgatgcaggtgcaagtgctgagtcgccccctatcatagatggcaccaaagcaggttcttcccagactttgataactctggagtctggaccttcacacatggagaatccccaaggtggaggaattattgaggattttgctggcactgcatctcctgcgtcgtatgtctgaaccaccacaatgcattgcatcgtattcattcagaggatgagccagccattctccattgccagatccacgcgacagtacatttttccatcccaatcaagacctgacaaacctgaaggtaccgtcatgtggccagctcttctcctcccttgtgccgttcaagttgtcacagactcacagtgctttgcattgtaggatccgggacatgatttctctgtggtggccatggcaacaaacaactttgctgctcggttgcagcacgaggtgtggtgtagtgcagtgttagttgctgcccacttttaattggcttccactgttgcagtggctctcctcatcatccttcccacttattatcataggcacgctgctgccctttttaccactcttcgtctctcatccattccaattcttgtgcatgcagggctgcaggcactatctctttctcatctgcttcataccaaacctacgcttttatcctgaagaaagactggcaggcaatatgggtttcttgcagtgactaaaaccaccttcgttcagtgttcatcgaggacatggaggtacggtaccgttgtcgcgttctgcacttctgcgttgcatgcttgtttgtagactgtatgtattgctgacaccaccacggcatggcgacggcttgcgtgtgtaggggtgtaagttgttaagccgtgaacccacttatagatcaaaataagcaggttcatggcttgttttgttttataagtgaattttacgggttggccacttacaaactcctgtgtgtgtgtgcgcgtgcgtccaaaaacaaatgcaacacaatgttgagctttctttaacaatgaaaatggtgaacaggtatgtagcctagtgcttgtagctctctagtagagtttatcagctcctgagttcgactctcctcgggatgaatttccaatgttgatttagcaaaggatcactttatggccctttggttaaaacatgtgttaagaaacggacttatgatgaatatgttcttgagtacggagcagtgaccttaaagcacgggttaaggctcaaccatggggagcgaaaccgtgtgttaagagaccaaggtttaagacatgatctatggtggacaggccctcatgtacggggtaattaaggacctcaaagcacagattaaagctttgtttgatttactttaggattattataatctaaattattagaaataagctgaaacaaacagatagcttattatgatagattattataatctataaaccagattactataatctaatctagtaattcactataaatgtgcttattttagattattaggttgctaacagctaacaaacagcttataatccagagaaacaaacagctcacagcttattctatgtcggcttattataattcagcttacagtaatttgactcaataatctagattataataattttaagctgaaacaaacagggcctgaggctcgaattatagaggacggatccacatgttaaggatcaggctcgtgatctttctcagccggctttggttaagatttattattcttagcttagagcaagtttaatagtatagccaactactagctccaaatcatttatagtcaatttaatagccaatttatacaataattacctataaatatatactacactattaatatcttgggagtccgtgctgtagctgtccctataaatatgtagcccactactcttctattccctctttcatctctttaaaatatgtttatagttggcttatagtctactattgtacctactcttaaaaaacagtgggtgtggtctttctcatgccggtctgagcttgtcaaagtttttttttcaaggactaaactatggcctggtttagttccccaaaaatatttccaaaaacatcacatcgaacctttggacatatgcatagagcattaagtatagattaaaaaactaattacacagttaggagggaaatcgcgagataaatattttgagcctaatttatccatcattagccataaagtaacctacatgtgctaatgacggattaattaggctcagaagattcgtctcgcggtttccagacgagttacgtaattagttttttcattcgtgtccgaaagctccttctgacatccgataaacatctgatatgacgtccaaatttttttttttcgcgaactaaacagcccctatgtcatggtgtttgggcttataaatagagctaagcttgtggctggtttttggtcggtcgctggtggcttgcctttccgggcaagagccaagagggaaaacaaaagagcggcaagacggctggggtcggtgacggactgacggctgcaaggcgacgcgacggcgacggcgactcagcaaaagttcctccatgatcctctcaagaaaagggagaaaagcttgttgatgttgcctgctcggcctcccctttttaaccgtgtggctggatcgtcttctgacttgtaatcaccggcccgtgaacgatcagtggccgagtgtgagtgacactgtttgcgattgctcatatttctctaataagtcaaaataacttattaaaaaatataatttataggtaaaacttttacatatttattcatagcgacttaaaaaattaaaaaaacattaaaaatatcttaaaattaactttaaaatcaagttggaaaattcaaatttggtttggtttattaggctaactgacggggctctcaatctagaaaagaaattctatcagttaatcacatcatgatatttacttggtgctttctagttaagacattagacttctctaattggcacccaagaagatttggacatgatgtacagtacgtcctaaagagacgtgagttagcccatgactccgcaccgttttgtttctgcatgggacgcaatgatcgatgggcatagtccggttaaccgcagctactaactaaaaagttcattgcaaagagtagcaggcaagtcctcaccagggtatttttattccataatcttaaaattttagtagtaatagtaccgtagtagctatagtagctaattaaccgtctagcaagttaatagataacgacgattgcaaaattttgaccttgaagataaaaaaagagcttttgaagcttgtgcaatctgctaagtactcttgatattaccgtgctgacgtgttgatgatagacttgcactatctaatcatggtgtcttttgtgaccatcattcacttaattaccctgcctttttcttttccaacttctacatcggcctttcaaagcagtaatctacataaaaccggaaaaaagagagcacttttttatactttgatgaaacactttacatcatgaataaccaagcactataaagtactccaagaagcaacaaaaaatttcaaaagtccggaggaaagaagcgagaaaaatattggttggcgcagttgcgtcgctttcattcaccgtggtggccctcgcgcgcacgaaacagatgggggccttatcgccgtcgtaatcacgggagcggttttctcagccgtcggattggcaaggggcaccgatccgacggctgatgttgcgcccacaagatagccggtgatgcagacgttcactcaaaagataccgccgcctctaggaaattggtaggtacactcacacatgcagggaccactttgggttttccactcccctgcaagaaatgaaagttttctctataagagcaagtttaatagtatagcccactactaactccaattcatctataaccaatctaatagtcaattcatataatagttgcttactactacctctgtttcataatgtaagactttttagcattgtctgtattcatatagatatgtgtctagattcattaacatctatatgaatatgagcaatgctagaaagacttacattataaaacggatgaagtatattattaatatatggttccacctgtcatatacaactgcgtcttggaatccatgctgcagctggctacagatctgtagcccgctggtcttctctctcatcttttatctcattaaaatatgcttatatctggctaatagtctgctattgtacctactctaatacatctccagtaaatatataaaactgttagaggatgtgatcttctaccacgcatatggatgcccctcgcccagagcccgacaagggtacacgtcacgctaccgcttgattgactggggagccgcctaccacggaccatggtgtcttccctcctcttctcccttcctctcctgaacaatcgcagtgagtcagtgtggctgggcttattgaacattgtcggacaatgggcaccccatgtcgtagtttgacaactttcgcctaggcctcatcaaggtgccaacgaggtggtcaaatgtatgtagccgtggtaagactactctattgaactctaacgagcacaccagcagctactacggtctacggtggaatgttttggtgtaaccccctaggtgtagcttacacggttgcgcggaggaggcaacctgggtgaaggtgttggagatgacgctaagaggcgatatcggcgatgcacttcaataatgtgagcttggtggatgggttcaacgtaccggtgggaggtggcgttgggttaagagtggttgattggctaaaggtaagatgggaagaaattcgaatagtggtgattagagggaacattaaaataatgaaggggtacaacagtactacgtggtatggtttgaggatttaatttgatagtatcctctatttctcgaggtgtacgttacaggtgtgctcgtaaggtttgtggtgtacgtacatgcagtgtgcacgtgtgtgcatcttttgtatagtaaaataaatatgtatatcttcattaatttttgaaacttgataagaaaatttcataaaaaaacctaaaaatgcactgtcaaacagcatggttttccttattatttttttaggcccatttgaattataggaatgaaaaaacaaaggaataaaaaaagattttaataggaatgcaagtgcaaaatagaggattggaaaatacagaaaaaaacatataaatgatcgtttgattggatcacatgaaaaacataggaatcagatgagagagatagactcaaaaggaatttttttaagaggttgaacctcttgttaacttttttctaaaatctctatagaattatttgttccacgagaattttaaatgatatgatattattcaatcctttgtttcaaagcttatataagaatttttcccatatgattgaaatcattgcttctcctccaaagcaaaggggcccttaactttttcctgagtgtatctggatatgcgcaacgggaagtcagttagagcaagactaataatatagccgacctgttagctataagattttttgtagccttctcttagcctacccatatagtagatagctctttacaattaatataggtcccacttctctatctcgcagagtttcttgggtttttttttctaagccggctataagtttacagctcgcttcttctctctcctctcttctctcttctctcttctcttctccacctcagcatttagatttagctggcttatagcatactactattattcttagtatttgttgcccacctgatcacgcgccgcgcgggtacttgtgcagttgtgctagtagtagtacgtgggggagaaaccgttatgaccgccgccgccccccacccacccacaaaagcgtgcgccgccgccggttttctctcgcctcacagttcgtccaatcgaatcgacagcaagtactactcctaccagtagcagcagcagcatcagactgaaacttttctcacagtactagtctctcagatcccccgtcagtcactcactcgcccgatcgtgctgcccacgcattcataccgtcggcgcagccagccgacgtcgatcgatcgccggcgaaaaccggcgagccgacctggccggcaaaggctgctgctaccgcccgtggtttcggaggcgacccctgtggccggatagatgagcacgtcgtacaccaccggatacagatgccaggagccaggttagaggagttgagatcgacagcgacgagagggacaggaattcgccaaacagcttcaacgcatgcaccaccgttcgctgaacctgaaactattcagcctctgtttggaacagattttggtacagattgttaagacagactcgctctgtttttaatatataacgccattgtttttttaaaaaaaaagtgtttggccacttatattatttaaaattttgtgtaaatataaaaaaagttcaagtcatgcttaaagaacatttgatgattaatataatcacaataaaaaaatgataattacattttttaaaaatagaacaaatgattaaacgtatcttaaaaaagttaacgacaccatatattaaaaaactcctaaatagaagctataattgtatgagatatttcttatccagattgtattactaaaaaaaatatcctaaattcttatgttttatgttttaggatggatgtgttttggaacggcggtggtactgtatacttaataatggcacgatagattaattttttaaaataaactttactagaacaacacggtggatggattttttttttataaatcatatttttaccaacgttgagaaaatattttgtgataaaaatctgaaaaaaaaaagaacattagacttagatcatgttatgaaagcttttgcaaagccatagtttctccctaacgatccggattctattacccagattacgagaaactatacttgtagaatttacaaagcgaactaaaaatagctgagatttcaacatatagattctatgaatacgtacttacataatccaaataaaaagagctatgggactgctcaaaacagtgaccaggattattcgtgaacattgttgcgatgcatgtacttcacaaaaacagggtgtagcaacgagaggaaacaggatatggaggctgtctggatgtgtcatttgtcaagcaaagggggatgcaatgtacatgggcatgcattcttgcaagcagacacagctgcaacttgcacttggtgtgtactatgacaaacagagatgagacaaccatctatacacttgtgagttactctcctctccttcattatcaaaagaacaggctaattaattaatcaagctttgcagctacagtagtctaccactaccatgtgggaccccaacccatcatctttgtgaactctgaagaatgcatgccactgctccaaaatccaatgccctcatgttcaatttaccagatagaccagcgaattcatcagcaaagaaggaaacgaagcttagaaaaactgccggtgcagatgcttctgctgcatgccttttgcggccgttcgtgtgttgcgcactgctgcaccggtcatggcgattgattgacttgattgatttagccggcgaagtgcttctgcttgctcgccgagcaggtgcagctggaacggctgtcgtttaacaccttcagatgaatcaagaacaagaacaccgtcagcaacttggatgatacagtattacagtatttgattgattatgtctcagtctcagacaagactagctagctggttagttatgtatggttactgatcgaactgcaaacctcatcctcatgtgagcatctaaaaagtgttcaatagaaaaagaacatgccatttttttaattaactagagtaactaggagatcgatgcaatctggatgtgcccagctagccactactactactcctactagctaattacagttacccctgccctcatctggagggtaacaacttgatctaaacatcacctatatatcccgggacaattaggcaagtcgcagttctgaattttgatcaaacaaaattgggagtttcagactcatatatgttaccttgacctgcttctggagctccttgatgtagtccacggcaagatccaacatgtcagcagtgttggtttgctgcaagtaaaaccaaaacccaaattcacaaacggtcagctcatcagctagtactagtagtagtagctcacactggagtacagtgttagtaattttttttcacagcggatcagagtcgtggtccttccatggcagcagcagcagccaaaatgaacccaaacaggggaaaaaaccaatcatggagtatagcacacaaggtgttcgaccgatgggatccccctcaccttttccatgttggggacgagctcctgcagcttccgtatccgctcgctgatccgcgtcctcctcacctgcaagcgggagacgattttcagctcaggaatcgaaggaaatggatcgcgtgccacgccacgccacgccacgccacgccatgccatggcgtgcgcgtggcggcgagaggtgtgcgcgtgtgtaaggtacggtactgacccgctcggcgatgctgcgggggtgggtggcgcagccgcgcttggcgcggatcttgcaggggacggcgtcctggaactggaggaacttctcgatggcggccatctccggcgacgcggcggcggaggcggaggaggggggcttgctgctgttcttggacgccgccgggaggctgagctgccgcggcaggtcgtcgcgggggcgcttggacgggaggctgctgtccgggaggagcgacgtcgccggcggcgagggctcctcccaggcggaggaccccatcgcgtacccgccgccgtagccgccgcgtgcggcgccaccgccgttgctgccagcctccgggctgccgccgccgccggcgagctcctcgtcctcgctgcccatctccgagatctgggacatcaccgacccctgccgcgacgagaagctgagctgccccttgagccgcgggtcgccgccaccgccgccgccgcccatgcccgctcttagcatattcccgtatcctataattggtaaggatattaatggcgcctctcgaattccagaaatggaaaggctagcagccacctcatgattgctactacttcttgcaagatcaaggtggagtggagagggaggtgcaccaaccgttgtccatggtaagatggttgaggaagccggcgggggagctgctctgccggaggaggctgttgccggcggcggcggcggtggactccgtgccgccggagctgacggtgcggtagagtccctccatggcggaagccatctgctgctgctgctgatgcgactggtacatgagctgctgctgatgcgaggccatggagtcttccggtggggcgaagtgggcggcggggcggggaggcttgttgtcgtggccgccatggccggcgaggaagcgcgcgaggacggtgtccgcggcgtggtccgggctcccaggccgctgctgctgcagctgcagctgcagctgcccaccaccaccaccaccaccggggaggacgaagtcgccgcagacctccccgagcagcgtgctcggcgctgacctgtaccgcagcaagcccggcgagctcatctgcggcggcgtccgcaccccggctggctgcaggctcaggtccttggacaccggcgcgccgtacatcacccacccccacccaccccactgatctctccacacaccaaaccagcaactcagctcaagctcaagctacgatcgagacgagggctcgtgattccgctacgaaatttcttgtggatgtggagaagagaggagaggagaggatttaataatggcgagaggtagggaggaggtgattggggaggaagatgtgggagtgagagcggagaggggtatttatagcggtggaagttactggaagcaaggggaggggatcgaggcgtgcgtgccctcgtggccgggtcagctcgtcgtcgtcgacgacgacgacgacggcgacgtcggcggcggctgcggctgctgctgctagcttttgccttagctacagccaccggcctacttcactgctttactactacacctcttgtggaatgtggattattaacactaacaccccaaaattcgatcgttcttattctaaaaaaaaatcgatcgttcttttttttctctcctaattactcacttaaaagacgcatgcaccctcagtgcaagcctgtaacacacgtttgaagaaaggacgaaatacatgtaaactatccttttgcatagaatgattttctgatattacatggttcacgcaaacgcacacacaatactaaccatgcaacatcacaatcacactcacacccctgtgaatatgttccaatatacatactctaaagaacggaaaccagtggcacatataatgatttaaagattaaatagctgaattatttatgataattattcgagagtacacgtgagtaaattaaagttaaaattttgatttaaaatagtttttttaaagaaatttatgtaaataaagttgtacagacatatatttgcaacatttctctttttttatctgtttcatttctactccaattttaatgtaaaaaaaatacagagggagcacaacacaagagcagagtggattcggcccaacgacattttcaccgatccggcccagcaaggttgaatacgtggacccaccgtagccacgacctctcatgtcaaaaatactacctttttttattaaaaaaagtcctaaatatggtaaagggagaagatgcaagaaatggggaaaaggcaaaaataaaatcacgttaacgaggggtgcacatgtgtgcaggcaaagatacagtgctgttgcctgcttgtagcagctgcacctcgctgcactgactgacaccttacaaaaaattgcatacttaattaagattttttaagagcccaaagtgacaacatagtgtttaccatttgtttaattattcagttaagtcactgtcaagctatgctgtgcatccactcttcagttcagcatatgctcaatcaccactggtcaatggaaagcatgctactttccagtttccacaagaggggggaaatattttttccctcattttactaacattttgtcttgagagaatggatgttcataagtttgagcaaacaaaatggccaatgtgagagcagcaatatctgcaggacatgacagaagcaatactgaatttatactactgatgatgcagtggagaccatcagcccatcacaagctgtttcctggggatacttttgtcttgatattaggtccatatttggctgccgtactcctcgttgctttggaagagcatatgaagttcacagcaatttcgtgtggattttcaagaatatctgtggggcttaaggtaattaagattattttctttattggatgattgatatattttggacaatttgtttatagtgatgaattatatatatatatatatatatatatatatatatatatatatatatatcatgaacaaattgtctaagcaaatattgatgtagagagttttattaaaaaaatagtttgagaacagtggtacgcatattttcatttacatagcctggaaagaactggttctaagcaaactaagactagagtagtactagtacttgtttagagatgctgtcatcttatcaagggcgacttggatgtacttgtagcctcattaattcttaatccataacaatcttggtcctaccctgtactacaaaagaggctggatctggcttaactaaatagtatattgatcataatgagttgatgacactgcaatcaagtaatcaactactcctgccctgctgccatctccctcggtgcgattaatcaaactcttctccccatttgattccatctgaaggaatcaaaggaaaatgccatccttttcacccaactcacaagatcttgtgaaccatgtggctccacatgtgtctccaatgctaaatgttctatccctctctctctcttaatctctctataaccaatcttctctcctactttgtgctaagcttgtgttttactgttccattatccatgcagaaatgagaggcaggaaaaaggtgagcaaggaaaaaagaaaggcaggcagtgtggctccctctgcttttgttggtgagccaacaagagacaaaaacatggccacactttggagagtttgggagggtggtctctcacggcataaagtcctaaaaaaggagggaataggaggtgatacggttgggtttgacaccggctgggcagccaagaagcagccactagtcctcccagacctggccaggagggtcttcatcaagaggttgaccctgccacttggatgatgacacaatcagttccaacatttcgttcatagttgattataaactaaaatgcttattagacatataaattaattataggtaaaacttttatatatgtgggttcttcacgatctaaaagcaaacgctgaaaaaaattatgataacaaaatataaaaagacaacttaaaatataaattttgattgggacggataagtaaaaacaaacattagggatagataataataggacataatgctacactagtatttcttatgcagttttatacagagttagattttaaaagtagaaatagatttgatgcgtaacccttactctctttatatacacaatttattttctatacaacattattgatcaacctacatcattactagatttaccacggccaacgtgtgtatgtctctctgatttttgtcaagtaacatatgatgtttttatgcttctatagtgaaaatgggggctctttttagcgtgctctctctctctctctctctctccatagtacatcatatattgtgacttgattcctgttctctttttttttaagtcggtgattattcccatccgtcttggcatataaaacctggcgtgttaacacactcccatgtagcaagtgtcagcagcatgtgtttttgagatatgtcaaatatgaatggaataggttcaatttggcatgcaagataaggtaatatgcatgtttgaagtcggtatatgttcatcctatattatacagcctgttttggaaaaagttgccatgtttatttttagttcgctgtagatcgtatacttttttactctgtttccactttcttgaaggatttttttttagatgcactttcttgtagcagttagaaagcttcatgtaaattttacataggtagaaattgtattcggatgttgccaagctaagatcgaagacccttgtatcatccatgaactaacgttgacatgtttgtttgttcgataaacccaatcttcaaaggtgctcataaggatatggaaagatgtattcaagggtaagagcgctcgcgtatatatgaatgcccgcacttgtaatatatttagaaaatgtattattatgggcatgtactaaacaataattctctttatgaatctattctcgagaataggcgtatcaagaatcgtgtgctctaatattgataaagtgatgaaccatatccgaggatgctattcctcgagaatccaacggcagtaaaaggtcccccaatgcatggagtcatggagtgtatgtgcgtttgtacataaaatggcataattatcgtgataaggatctcttgatggcataaggtatctttgatcaaacgagaacgacctcaccatggatgaatggatgaaggtgttgcaagcaagaaaaatcttctgaagttatctgcaagaacagtggataataccaatataccatctgcagattagtgccaaaggatttgtgaaatgtatgtgtcgccatgagcgcttcatgatcttcacgagaacttggccgtttctggaacctaatgttcccattattcctaccggtggaaattcctcaataatgctcacattttgttcgaatatacagaaggatctatgcattattatctgaagcagtctataccatttatgtactaatgttctgtgatatattcccctgagaataatctcctgaatcctgacagcaattgcaaatttttatgtcttagaaaggtccaaaggaaggtactctcagcagccaattaccaaagtgatcgtggtgcaggaacactattcctctcggtagctaaaatcacgtcacattattctttcattgggataagcttcacattattggcacctttggtcagggcgtatcactacaggagcatgaaaggatgaaaagacaaagataacggaattatgtgtaaaggttgcatggatatttattttgcaaaaggaattcaattagttagtgtggtggtctcaatattttgctgtccaaataataatattttcacaacccggtatcagattctaacacccaccttagataatactcccttcgctccataatggatgttctagttttgttctaagtcaaacttatctaattttaattaactttataataaaacataacaacattttcagtactaaattagttttattaaatcaacattttaatatatatttttaaaagacatatgtttcgtgttggaaatgttgctattttttttctataaactttgtcatacttgaagtttgactttggacaaaccaaaacattttacattatggaacagtgggagtataatctttttttttacactcaaataaccattttttctctcttaattacttggacgctagtgcatggctcttgcacaaatttagttaggtgaaagccctctacttctttgggggacagggaggactccaatctgatctctgatctgaactgaatgcccacataaacacatgagagttagacaaccagcccagacctgagtagcagatgccaagtccagtttttattggcctttcaatgcacaagaggtggtagctgcccacgtaactgcagggcccccgtactgcatagatgtgagggaagtgaagccggagccgtacggggaaacaccggcccgggcaggcaagcatggcgcaagattgagatcgccagccagcgctaagcttccctcccggttgacacaacagcatgaggctataggatctagcattctagcaccagtgcaagccaaccaccaccaccaccacgacgacgacgaccgcggctcaggtgggtaggccggtggccggatacctcacagccttgaccaaagacggcgtcgccttgtggccaccggccggctcacgcggcagagaggtttgcagggtaagcaaactcaagctgcttgcagccagccagggtgcatacatgcaagtttctttttgacatgtactacaagggaggctagtgcaaccaaaatagaagaagagatggattcagcggttggaacttggaacatcgcagcattttaaatttgttgagggtagattctggttacatttggacagcaagcgtactgggaaaagaaagggaaacaaaggttggttcaaaacttactgtttggaatctgagctccaaatgttacagccttgaccttggaccaccctttcctggtatctgtagagcgtcataatggccaaaaccatgaaaaagaacttgaattggatcttctttcccgtactcctgaccatattctgcaattgctattaaaccaccagcttccttatcatgcatgtacacagtaattggcatcctggccacattggtaacggcatattagagcttttgttacttcccgttttcagaaggacaatacaacaagactacacatatatgaaactatccactattgctgttgagctacattaataaactttggtcaaagcctaacaaaatggaatattaatgacttttgggagttgtgttttgaaaaaaaaaaaggaagatccccgcaaaaaaaaaaggaagatgcttaacagtcataacatgacaaaaaaaaacaaacaaacaagacagtataagtggacaaacttatcccaggaatcctaaaatggattaaaagcaaaccaactaaccatcaaccctatataaatatgaccaagagggcataagtattctaacaggttactgcacaaatgtatactgcatttgaaatggtgagagtaaaataactccaaacatcatggctaattctcaccgaagaacatgcgaagccattaacagttctggttcacctccccacacatgtggcttcctaatccgagagacatatgcatcgaagtccccctcaacaaacctgtgaattaatgtcatagcgaagcataagaatgcgtaactcaacaatatttagatgcagagtaactaacagaataatgaggacaggtagaactaaccattcagtctctgcccgtctcttgataaattcatcggcgacctaacagtgacaccatttaaatagatcttttacatgataaattcaccagaaatggttgcgttgcttccagagcaacatttagtatctaagaacagaatggatcaacagtagtacatcagcagaacattacaagcataccattgctcttaagtcatcagccatctttctctggagatcatcatcaggtcgcttacctgacctaatacatgcaccatgagccacagatcggaacaagcaccttccatctccaggaatgcctgagggttaccatgtgaatcaaacacaagtgagcagacgatgcatgctttaaccaaatgcatattgtatagtaattagaaaaacacgcacactgtctcaccagtaacagaataatccgtgcaaacttttttcccatgagcataactagtggacgattcagtagtttgggggctatcagtattattgtccacaggaccctcagcatttgccttcgcaggaactgcaaaacttaggaaaagtccagtgcctgtagctccaactttgtgtcctatgcttcttgaatcccagagaatactatacaacttctgacgtgagggctcatcaagctttagctttagaatattatccctcgcaggttgtctgccacacaactgtttccccgaactggcaaaacatgttcgcagtgattttatgttcatcttaggaggcaaaccaactaatctgatctttacatgataaccgactgcttgtgaacgagaatacttccataatgccatgccctgtgtcagccctccttgtaactgacaagactgagaatacaagctataagtacagcgttgtaaacagacagtaggtgtgtagatagccatctgcttcaggcagcaccgcgccaccaagtataagctgaaaaacatgtttcgatgaccaaaattaagaattagtggaacatgagataattcttacgaaaatcaaataaagcaagccaccaccacaatgaagtagaagatccaccatgacacaacggacctatgatagatatgattgatgtcaacattagtatcaattgaagaggattaaattatttttcagcacaaaaaatagtttcatcgttgacatatccaggaaataaatgtgtggcagatagttattagtgagcataaaagactgaatgtctccaacctctagcaatcgaccactttctgctgagattcgacaaaacaatgggaaggatgggcatgctaaatcataagcgcacacttgctagaacaaaagcaatttgtcctccttttctttgtcacacttgcgtagagaatccatattatcctcgtgaacttctcaggatgtgctacagggagaaattgccctcccaaatcccgagcattcgagggcatgggcagcagcgaatcactagaaaactattctcattaagattatttaagttcctgtcttggccgcgaagccgagatttcgtgctaccaggccattcccatgcccgaattcacaagactacaaccctaagctggtggaaaataatgcattatatgcacaattgaattcagcaagtgccaatgcacccaaaccattcccctcacccgggagagcagataaattggaagatagtagtaactcaaattagtcacaaattgcagaggataatgaagtaaaatccgcaccttagccttcggactgtccgaagcgagcggagccgaggagagacgcctgcaagaatggagctgacgaaagcggaggttattggggacgggagcgtgagccgaagaggaagggatagtggtggcgggagaggctttagacctccgttcccgcgaggggattcgccggtgcacgccgccgccgccgccggcgcagagtcagtcacggccactggcgcgccgccgccgcacgcgaggaggaagacgatgagacgacgcctaatcgatatccaccgcgcatggtagatcggacggttcaggtggacccttcggatatggtagcgatcctattccgaggaggcccacacggaggcccagctttgtttggtctttggtggcccgagaagagaagaggctcgattttgttcggcgggggaaaagtctaatgtgagttctcatataggagtacatttcaagtgcaaaacttggtatatctagttatctaccactttaattattaaaatattttaaaataacccccttgactgttttgaggatagttttcagtgatttggcatctaatggcagtctagtcataagatgaaccaaaaatagatagaggattcaagtgtaagtggtacaaaagaaagtaaacaactgtggtgcccacttgtcatagcccactcttattcttctctttcttctttcttttgcagatagcagcaggaacccgacaagcggtggagacgaggctgatgagcccagcactgatgccatctccctcacttccacacccttcctctctgcctcatggagggccaccgcttgcctacctcctcttcgtgtagctacctctacctcctccgtttatcatccctcttctccataacggcagtggcggggcggcaaggtgggaagtcagagtcgatgtaggattccccaagctctgccacccttgctgttttggcctcaccggccaccgcttgttgtccacccagagctccacaccccatctccctcaacaccgatggtgatgcttagggtatcgatggggaggggatgaggtcctccaaccttgccgcttccagggctccgtcgtctctccgggtagggctcttacgaggatgcgatggcgacaataagggatcgataagggcgccgacgataaatttttatactgcaacatgctcgcctgctccatcgagatggcctcttgaatgtaccttaacgtcatctacctccttaccggcatcgagcgtctgctccgaaagcacctcgacatctgcaagcatctcaagattaccaaccaccgatcccgcaagttggggaaagaaaaaggggagaaagaaagagaggattgttgatgaggagggcagaatctccaatttatgaggattgtgctacagggaagctattcactcttttattataagcatgttttcccatattgctaaatggtatttttttttcaaaaccatctatatcgacattttttaaaaataaatcaatttttcaagtttataatatcaccaattgtgttttctgtctcggtgagttgctactacagaaactcataccattcaaagcacggatgactggtcatttcacccacaactagggctccatatcaagccagttcagctcggctcgttatcctacgagccaaaagcctcgctcagttcgaaccaacatcatttcaaagttacaaatgtttgcatacaatataagtattaaatcatcacaaatttagcaaatgcaccattaatttcatactttcatataatcatctaaagtcagtctaaatatttaggcctatgaccaagtggagtggtgtgacaatgagtggatgggggatgagttaagttgagatttacgagtaggttaaactttagttttgacttgttaacaaacccaaacaagccgagctgtgcgagctaaagtgccatcatccttttttccagccctatccacgacccatccaacctgtgcaaccttggcaccgcattctctgatgttagaaaaactatgttagagggcagtggtgtatcaattcattgtcctccgagtatggaatgctccaaaaaaaaaagccaatgatgccatcgctcgcagtcactatcatgttcgctagcgtgcgagcaaggacaacattggatttttcttgggagcgttccatatttgagaaacggtcgatcgatgggctactgacgtactctctctgttttttttaaaaaagacaacctctgtatccagattcgttgtaatatgttgtctttttttagaatgaagggagtagttttcccaacttcagaggatctggttccgtgcaacctcgtgccacaactctcaaacttgtacaggcaaccaagaacacctgtgatctacattttgagatcaggtagtatgattgatccatgaatcccattatccatcatcctcgagtgagagtccagcacgaaagctgcagctaccactccagcttatccatctcatcatccattcccctcgcaacgaactccctgcctctcgctccgatcgtccgcgccacggcggcgacacgatgaaaccccgatccaactgacaaaattcccaagcgaatcctgtgcagctcgagtagaagagaagagagagtgcttcttggcgagcgagtcaacgtcacaatggcgtccccgctgctgctgctgcttccgctcgccgtctcgtcccttctgctgccgttcgcggcggccgcgcgcgtcttctccgtcgcggactacggcgcggcgggcgacggcgcgcggtacgacacgggggccatccaggcggccgtcgacgcgtgcgcggcggcggggggcgggcgcgtcctcctcccggcgccgggggactacctgacggcgaccgtccacctccgctcgcgggtggtgctcgacgtcgcccccggggcgcggctgctgggcgggaccaggcaggcggactaccctcccgagtcccgccgctggtacgtcgtcctcgccgagaacaccaccggcgccggggtcaccggcggcggcgagatcaacggccagggcggggcattcgtggtcacccccaacccgcagaagaacatcatggtgagctggaacgccaccggcgactgcgagggcgacgagtgccgcccgcggctcgtcggattcatcgactccaaggacgtcacgatccacgacatcaccctcaaccagcctgcctactggtggtgagcatttcttgatacctcaaatccattgctcaattcgtagtagaacagccaaaacatgacaacatttcccttgtcatttcatcctaaagatgataaatccggctaatttgtactccactgccctagatatcatctgattagcaaaaattacacagcatttgtgtagtgatgaggtattcagggaaagttaacaggctatatgcacttgcattccctgcagtctgcatattgtcaggtgtgacaatacaatgatccacaatgtgtcgatatatggggattttgacactcccaacaacgacggcatcgacattgaggattcaaacaacacggccatcactcattgccacatagacaccggagacgatgcgatatgccccaaatcaaccacaggtcctgtttacaacttgacggcaacaaactgctggatacggactaaatcttgcgctatcaagtttggcagcgctagcttctttgacttcaagaagctggtatttgacaacattacaatagttgattcacatagaggacttgggatgcagattagagatggaggtactgacctgtacttgctgttgtgtgtattgccattctgtgatattaggtagtacttactattttctctagcaagctataagatttccgcagcaattaaaatatattagattgttttcacggacatttttttaggaaaactgaaccttatgctgcatttgtaccccgtgtttatatagaatttataaattgctttagcaccatgaaatttttatacagcagcgaacctatcctgtatgctgaaatatttctattgtgaattttcatcaagtaaaaactgcaccattaaggtctttggtctagaaatgagatttgctttaagcctcttctaaactggagttttcattcctgcaggaaatgtgagcgatgtggtgttctcaaacatcaaaatgagcaccaggtactaccatcctttatggtgggggagagctgaaccgatctacatcaccacatgtccaaggcacccagattccaaagaaggcaccatttcagacattcagttcatcaacatctcatcggtatcagaaaacggagtattcttggctggatcgaagcacgggctgcttcgcaacctgaagttcaagaatgtcgacctaacctacaagagatggacaaactactcgggagggctgtatgattacaggcctggatgccaaaagatggtgaagcaccgaaccggtggtatgatgctggagcacatctctggccttgagatcgacaatgtgaggatgagatggtcaagaggaagcctcaaaggctgggatgttgatcctctcctcttccagccatcgacagtcgacaagctgtcattccatgactggcaatcgctggctgtcagtaggtaatggaagagcaagcctactgaacatcacatttgtacaagtatctgtatcacaatctgagtggtgattcttttctgaaacgtgtaaataaagatcacatgaaaggcaatggtcttaccatgttgataatcatcgcttgaatggcataaggttcttaccagtcaataaaaatcctcaagtcccaactccctgt

SEQ ID NO: 9709 - DNA, 6423 bp, Oryza sativa
ccacccgccgagccagccgccgcgctcgccacccgtccgcgagccgccgccgccgcccactgcccttcaacgcgtgcctgagagagaaggggggagggggaagactgaagagaggtaaggacaggtgggccctatattttcttttatttttttttggattggatttccatgtcgacgccacgtgtatgtcacgtaggagcaaaaccgctcattattgagtcggggggggggggtaattcaaccgatatcaatagattgaggtgtaatataaccggttttgtggttcgggggtaattcgtactgtcgcaatagttcgggaggttcctaaagtttatgcatacgtatgtatatacatgtagtatatgaaagagactataggatcagaaactgaccgcgcggctgatctcacattagggcgcccgttcgcgctcctctagtcagcgtgcaacatgacaaaaattaacctacgtgcggccgaagacacgtgttcagcccatgaagcattatagcccacgtactatcctttcctcgttcagcccacaaccgcatgtgcccaaatatatgcttgcatttggactgttgagtctactagttttcaagctcagtaagcaatgtgttgaaaaaatatataaaaactttatatatgtactccctctatttcataatgtaagtcattctaacatttcctacattaacatcaatatatctagattcattaatattaatataaatatgagaaatgttagaatgatttacattatgaagcagaggaactaaaacttatatgtgaaaatttataaatatatattttgtggggacaaactttatacacaaaaaaagtttaaacatatagaaagggtctacacataaactttacatatatatataaaacatattcaaatttgttttcgcaaataaataaataaaataaaacaaacatgtgggccatctgtcttcatcgtattcccacaccacattagatttggcatgctctcgcaaaggaaagaaattaagatgagctaagcacgaaaagaaaatgcatgcagggaaaaaaaaggtggatgagcgatgccagtcctttagccttgtcgagttccacggtacgacaagaatgtctctctctaaatctaacttagttatagtgtattatagtatcatcgaccttaagttggttatacttaccagccgcttacaccgatcgcttgttctacctgttccgctatacggtacttcctccgtttcacaatataagattttatattattgtctatatttattagatgttaatgaatctagacatatgtatgtgtttagattcattaacatatatatatatatatatagagtactataaagttttacattgtgaaacagagagtacatcctaagtatatctcagtcctagtaatcaactccattcatgtctatatctatctatgtatcatatatacttgaaccaaaatctcaacatacgtttaccacaacaccaaaaaaatcttgatcattggatcatcttggtaaagggctaggagaagatctcagctgatatgaaactgtctttaattctcttctgttcacattcataagtgcatttcatcatcgtaattacgggatgttctttcctgcagcttttaactgaagactatatatattgatgtcctaaatcatgcaaccgaaaaatcagtacttttatcctttttttttgtccctttttcttggggctgtttacggctcgggcgtccgatgatttcaagaaaaatcgggcgctgacgtcagcgtccgatttacgtgcaaaactactttaaactgatttttctcctaaattacttatccaaatcataattcgattgcaccattaaattcattgcaattaaatcttcaaaacaagaccacacatggataaattccgacgaaaaaatagcttattattgaattatttttaaatgttgcatgatgttccaccaggtatatcggaattgtttcactaactagatcgaaatgtttcactcgtttaaattgagtgttgtttcaccttatataaaaataatgtttcaacaaatagcgaaagaatatttcagttcactgcaacattaaatctatacatagtgaaacattgtgagtacattaggtgaaatattttttggtggaacaaaaaataaaccaaattcccttaatagggggtttccaaaatatgtgggttttttgttgcaatggaatgtctcgttcactgcaacattagatctatacatagtgaaacattgtgagtacactaggtgaaacatctttcggtggaacaacaaataaaccaaattcccttgatagagggtttacaaaatatgtggattttttgttacaatagattatttcagttcactgcaacattagatctatacatagtgaaacattataagtacacttggtgaaacatcttttgtgtaacaaagggagggataagtgggtgggtccagatggggagaagggagcgcgcgcatgggggagggggagcgaccgatttttcccacctcccccggtcgcccgattttaatcaatttccctttttctttagcttgcatatcttttcaaattcacttatgtgcccgctgcaactcacgtggtatcacctactatccaaagcaaactctaaccgaatgaggaatcgaatcaatcctaacctagtcacgacaggaaccaaccaacgtacgtaggctggagtttctcagatctatcaagaacactgtacgttgcgtggcattggtacgataaagcagcgattctaacaacaattgactgttctgcaataatcgattcatgattatactagatcgcaatatcttcctcctgttttgttttcaattatccggcccccagcttgtaagatatcagcagacagcaagttcagcacactgcacaccgacgccgacaccacattagggaatgcaggaacacatgggtttactggcgtgcagcaaactgaaacgcggctcatcgctcaccccttccatcgatctgtcggcgcaaacccacattaaacttacccagttacattgctggggaagagagctttactcccggttagtaatctttcagggaaccggaacatctaatcatggactaaagatgcatagcaagtcagaaaaatctgtgggtgtgggatttaaactcaagatttctcacctcattccttacgcacgttaccatcccacctactacacatatttgactttgatagagatgatttttttaaactaaccttggaaacgtttttagtctagattggtgacaccaattgggactaaaaatatatttagtccgactaaatattaatttttaaactaaccctggagacatcttcagtctgggttggtaacaccaattgggactaaaaatatctttagtttgacaccaaccagaactaaagatcaatatttagtccgtgttaatgcatctttagtccggaatagtaacaccaaccgggattaaagatcattaggggcctgacaaggcctaacagctattgatctgtggctaaaagtgatttttagtcccaattggtattgccattgggcttttgaattggggctaaagatattctttagtacggatccaattagaaccgggacaaatgtggtttttgccatccgagtaaagatcagtttttcattaatgttagttcttccctccatttcatattataagttattttaacttttttaaagctaaattttaggtttatcaaacttataggaaaatctgacatctacaatataatatgaaattagttttattaaaaataattaaatatattttaataatatgtttgtttagtgttagaaatgttgctatatttttctatatatttaattaatttcttttaaaaaaataataattttttcctgaatttttcattgataggtgaaaatatgggagttacagagcctgaggaacggtagcatcgtgcctttacattgatttagagttagtagggctagagaaagcttgtttgcaagcagagatcacaaagcgttccgagttcttaattctttccgcctagatggttgcttcatccatgcagcggcgaagcagtcggtgaaggcacgggggttcattcctgaagacaatatcgtgtcggtgatcagaacaaattcaaagaaacttataatacaaaatagatagtaacacgttatgtactttccccatcccataaaaataaacatgattcatagtacaaactacaaagagtactccactccctccatactcgtaaaggaagtcgtttaggacaatgtttaagtcaaatcttgaaaatataaatcatgaataactctctagttgttgggtttaaaaatatttgttgggtttaaaaatataaaaattatatgaatagatttgtcttgaaaaatactttcataaaacaagaagtcaaaattgtattttgaagactgtgtcgccgtgctaaacgacttcctttatgagtacggagggagtatatcgttatctcgttctcgatttaagcctgtttagttggcaaaagaatttatccctacatgtcacatcagatatacggacacacatttaaagtattaaacgtagtctaataacaaaataaaattacagattccgacaggaaaccgcgagacgaatttattaagcctaattaatctaccattagcaaatgtttactgtagcaccataatatcaaatcatggtgtaattaggcttaaaaaatttgtctcgtaatttcctggcgaattgtgtaattaatctttttttctacatttaatactttatttatgtgtccaaacattcaatgtgacggcgtaaaataatttggtttaagaactaaacagacccttattttttaggcaaaatttgctataggacatccaaaaaaacgtgtaattagccagtggacaccgtaagatcacgaatttactgtagggcaccaccaaaaagtgataattagctagtagacactcaagacattattttattatttttaaaggaaaagaggtgagagaatttttgaattgccgagaatgccctggtggcgcatcacgttatcccgactaggtccggtcgagccgacccggctgcaatacagctgcgcccacgccctccttgccgccggcgcgtcgtgaacaccatcacccgctcctcgtctcagcgcgcggaggtcgtcgctgccggcgtgggagagatcgatgtcgtagcccaagaaccgcgccgacgcccacctcggcatcccggtgctcccgtccatatggccggcctcggaacaggctaccatgctccagttgcacgggccgccgtcactgacgccgaaaccagcgttccagtcagcgaggacgttggccgtgtcatgcggtgctgccttgacggccagcaacgcctccgctgcaaggcgcacgcgaatgcagcaagaaaaaccgggtgagtgcagcaagaagtgaaaattttcatttgcaaatttgaaatatatcaagaaaagattgatatatttggaagaacttttatcatcatgattcaagcaagaaagaatggtatgagctaagaaaccaatcaaagatgaaacaagatgagaagacacggcttgcgatcaaagaatttttttattttctttttttcgtgttcagcaccttcgccggcggcggctggggaagaaagaacctccggcggcgtgggcgccacaccggcagaggacaagtcggacaccacgaggctcaaaaccagcacggcgagcaagtaagcagcagaagcagcaactctctgctcgtccatggcgtcagcgtcggcgtcatgcgtgctctcgttcgtcggtgactcggtgtcgtcgcgtccacgccgagagagcgctatagcccaaagcgaaccgctcgtgcgatgcgaggagaaaaaggagacgagacgctcgcgatcgaacactacccgctactggacgcgacatgaagcggaagcgagagctacaaccgcagtgacgatggcgagacgcggttgacgccatcgcgggctggccacttgtcgcgccgccgctctggccacgccgctcggcaagaccgactgggtctggttcgaccggaccgatcgggataacgtggtgcgccaccgggggcattctcggcaattcaaaaattctctcatctcttttcctctaaaaataataaaataatggtctaagtgtctaccagctaattaccactttttgatggtgccctatagcaaattcgcaatcttacggtgtccaacaagctaattacacgttttttagatgctctgtagtaaattttgcctattttttacgtcactgataaagttggttgtaggtacgcaggaggcaggccgaccaacgccgagggacgtgacccgatcgacggggcccgggggctcacgggcgacgcgcgtgatgccacgcgccgaggccgcccc

SEQ ID NO: 9710 - DNA, 23974 bp, Oryza sativa
cccccccccccccccccccggggcgcccccgcggtctctttccacgcgcgagcatgtcacggcccacgcgccgcgcgcttccttttccccaccacgcggaacacgcggccgggccggcgcgtctcgtcggtctcgatcggtgtccgatggaggtggagcccctgcaggctgcacagcgcgcgcgagaggcgaagcgatcgagcatggacgcggcgcacaacgcctcgccgcctcgcgccgcgtcgcgcgtttccgtatacggtacacgcatgcgcgaggtgcgcgcggcggtgtagttggtgccgtaggcgaaggcgattggcacgggcccggccggtggtgcacttgtcgccgcgcgcgcgagagcgaacaacttgttggcgcgcagagccaaaaccgccggaccggagaacgtctgcaactttccgttggcacacatggcatgcagcaaaggcaagcagcgcggcactcatcggtcatcgctcgtcagtggcttttttttccctcgattgagatatagattttacatcggtttttggtttaacacgtttttttaaatggttaaacggtgtgtttcgtgcaaaaactttttatataaaaattacttagaatatcaaataaatttattttttaagtttataataattaaaaaccaaaattggataagacacatttaaatccaacgaatctagatagacatacttatgatcagattctttgaaataggatgtatgtcctgtgcagtgctagattgctatattttaaaatggatggagtaattaactatggatgtgtttggagtatggatgtgtttggaggagatagttgtggctgcacagcgcaacagctacaaattgtgcagtaaattttatgctacttgtattgttaatacagctggctcagcccaacatctgtaatatacagcacaaacgaacacacctatatgttaaatggttttttctattttacttgctctaaccttattatcttttatcttcgttaggaaaaaaaaaaacatcaccgtagttgtgtgagatatcgagtattctgtttagctagcagagtatatagcatcaattattcaaagatgattggaggagggttcagttgatctcatcaatgacgatattaattaagcctgaaccagcccaacactgctcgacagggagcattattgtttcttcttattattgtccggctcaatgggatcagccagcaatgatgcacaggtactgaggtacacattcaatagtaatgcagcataattcatcacgccatcatatcggtcatcaccactgatgcacaaatcacaaattaaccagctgaaagctagactgacgaaacacaaatctggtggccagccgatcgatctcgtgatcaatccgaaattttgtggggctggatcagtgcctcttgaggaagtcttcgatccagtagctggactccttgcggtagcgcttgagcgtcttgcggtcgacgtagatgaggccgaacctgtcaaggtagccgtcaccccactcaaagcagtccatgaatgtccacgtgaagtagcccttcacgttcaccccattcttgatggcgtggttgacgaactgcaggtgctttgagtggaactcgatcctgtgtccatccttgagcgcctctggcagtgtgctgttgttaccctcatcgatgcctgtacacattgcacacaaattttacgcctttcgatgttcgcgaacgatttagtatatatacatgttaattgagttaattgaggatatggttcttttcgatcaacctatatttaagtttaattttggatgaattttgtaggaccagtgttgaaagattatatgttcttaccgttttctgtaacatagatggtcgggttgttgtatctcctcttggtgtagaggaggagctcacggagacctggagggtagttgaagaagatcggtgtaaattcctagacatgacaaggattcgcgtacgttgaattcctcagtaaaatggatggatcgatgtgggtatatgtgtacacgtagtcacgtacgcacctgtggaccgatgggtttgccattacggaagccggtggtgttggcgcggttgtcgaggtcgtaggatagctcgttggagttaggcggcggtatactcttagcgtagtaggtggtgtagtaattaactccgatgaagtcgtaggagcccttcaccatcgccgactgttcaggcgtgaactctggcagccgattgccgagccaacctctcatggtgcctgggtagtcaccatgcacgatagggtccatgaaccacccatagatgaagtctaggctccgttgcacagcgccacggtcagcgtcggagttgtcgtacggcacgaaccagtgggtgaccaccaccatgccgatctgtcccttctgtgttggctggtacttggtgcggtaaagctggacagcggcagcgtgggagaggtggatgtggtgtgccacgaggtagggctcgcgactggagtcaccgacgccgcatgacttggaaacatatgaagagcatcgtcccggcgcaaacacgcccttgccgtagccgtaggcgctatatgtgaatggctcattaaatgtggtccagtacttgacacggtcgccgaactcgcgaaagcacacctccgcgaagtccacgtattctttcctgcacatgttgagcaagggtgttttaaagtggtattttctaatattaaaatcaattgaaagatagtttatatttttctaatataatgggtcatatctatttataatattatctctaatgatggtataataataatattacctatttataatatcatctcaactattgatatataataataatattttctattagtattagaactaaatgaaaatcaacggttgagatcacttgtattggtggtgataatactgatagtaagaatagtaaaatactatcagtagatactatcatccttgagaatgtatcgtgaggtgctatattttctagcgtaaaatttggtatctcaaggtattttcttaaggaccataaaatttctctaaatagtattgtaaaatcactcgggaattaaaggttttttctcgagagattgcaagaatgtttgtgaaagtacagtaagcaagaaagaacttacactatgtcttcactgaggaatcctccgtatttgctttccagagccaagggggtgtcccagtggaagatagtgacaaatgggatcatccctatgtgatacagaaatgttgtcaaaattagttcatatttttttgcgtttttggaataaaagttagtgatcaccttttgctatgacatcattgatcaagctgttgtagaaagcaaccccttctttgtttattcctccactcaaggatccatctgcagtaattacaatttgcacgcagtggctatgtgattaacatcaagctttggaactcacatgtctgcgtttatattgtgtttcgcaaaacaaaaaaaaaaaggggagaaaattttgagactcacttggcaggatcctggtccacgcaatggagaaccggaaagcatccatgttcatgtccttcaggaggctcacatcctcctgaaatttgatcggatttgtcaaaacatgacccgtttcagagaattcagacactcgatgttaatcatcgtcagtcagtcaaaatggaaggtcaccttgtatcggtgatagaagtcatttgccacatcgccgttatcattgtttaaaattttacctgcagtcatatggattgttaatttctgtctgtcagataaaccggaagaattaattacaagctttgtgatgcacttcctcacgaattaacctggaatgtgagtgaagttgtcccagacgctaggacctttgcccccttctttgtaggcgccctcatactgcaagtaatcaaaaccaatcccaggataaactgatgagtatccagctacaaattacatcactatataacataaacatggctagttgagcagtgacacaactgatattgagcttcagaattccaacatgtcatatgtacctgataagctgctgaacctgtgccgaagatgaagtccttggggaagctgtaccgggtaaacttggcgtaaacgccattgcagaacagagctcccaagaacaaggtgaagaggagtcgccttcccattctgatccccattccagcgagagatggggttcagaatgagctagctgaattgcctccagtagctgcagctctaacgggtatttatagagtgatgaacgggaggggtagtagtggagtactcccgatgtttaggacagcgacacggtcttcaaaacacaactttaactctttatttctataaaaatatttattgaaaagtgatatatgtatacttttatgaaagtatttttcaagacaaatacattcatataatttttacattttcaaactcaagaaattaagagctatttatgatttatattttcaaggtttgacttaaacattatactaaacgactcctttagtatggagggagtactaaggaccatactgcgtgctggcaggagacactccatcaattcagtgtagtgttttctctgcagacatggtaagctggcgtaattaggatctcacttcatcacaatagcgatcgatgaggaagaagatggaacaggcgctgccgaaatccacacgaggaattgtttattaaacacatgaggcgcgtgctaacatgtctctatctaatataaattctactgaataatgcaataagggcatgaacttacaaaatgctccctttttttctcaaaacacaattcaaacatagaagcatatacatcagaccgacatgtattgagattgacgaaatcaccatggtcatatcattatcgatgtgtgtgtcgcctaccactatgacttgaacccgagttgactggttccaaaaaaaaaagtctaataagttaaactacacttaatttgtggtgcgtgtaaaccaagaccatacaacacatctaggatgggaatggggcttgtttcccgattctccacgggaaattctccattagagatgaggatgaaagaatggagatggttacgagtaatcaaatggaggaaaacacgtccgtgttgggtctggcggtggcgggacggggatgatcctccatccccccgttcctgtggagatacaattaacaggcataggagtctaaatccaatgcaaatcctatatatctataaagttcatcccactaaatatagttaatgatatttctcttttctctcgttaagtcacatggtctcaattatttctaattcttaaatgattgatctacggtttaaattatctctatttttttaaaaaacaaaaacaatgaaattgttgacggcaatgctctagagttagtacataggtgatgtataggtgatgtattgtacatgctaagtaggtggataaattaaatggtagaatattgtaattgtttaatatgacgagataagttgagcagctatattttaaggcaaagttaaatactagaagtagttatattttcaaacacggaaagagtagtactatatatatttcctacttactcggttttaaatataactagaattcaaaaattattttacaatataatgatttattcatctattctcacattttagttgatcagaaccatattttatttaatttcttcttatactttgttttgaattttttcccatttaattctacatattctcttaatatctatgactaatttcgaaggttgttatattttaaaacagaataagtaggattgtagtataatttgattcagtattactttgttacaattctcaatacctttgcaccagaaaaacactttaatttattttatcgattactgaaaatacctcaaatcaaacgatacatttttttctttcaattaaacggtagcatagccgtgcacaatcacgtggaaattagcacttaagaggagccaacgtttgctctcaaggactaaaaactaccacgtgaattgggaaagaaaaaaaaagatagaaaatttctgcactgttatctgaaatttaagcttagcacctagcagaagacatgatattcgtatttatctattacatcactaaaacaaaggctaaaatgagccccatgtttatactcaggaagctgtcaattacgaccttatttaaatggttcctatatatttgcgctgctgactttatccagttagtttgtaattttgaccactatttgctttactaggatataatgataatatcttaaaaagtaatatacctaaacgatttttatgctttcaaactaaatatattattagaaagcttcaaagttttaagagtttaaccgaataaaaataaattatatatttaacaacggagggagtgctgtagtcaccaaaaatctaaactgttaattgtgtatagcagtataagttgtattagagtattgttataaccgtattataaacccaaatgtgttttaataaataaaaaatataggacttgtctatcaaacataattgtattgatctctattgctcgataaacatcgtggtcgaaaatttattatctattgccagataaacatcaagtcggatttgtattgatctcttaattgtcctcctgaagaatgccctctacctaatccggttgtccatcagaaactgatactctgaactcatatttgtcgaaaccatcgatcgttagcgtattttcggcaataattaattggctagctcattgcaacgtggaaactgtaaagtaccaatgcagtaactgttgcactgaaatataagggatatttgatttggatatcatagaggtggaggttcagatgtgcacttcagagaccgactgatgtatatatgcaactacggaattacttttttttttaagagaagggttttttttttacccggtctttatatccaaccggatatatgcagtatttttttagcatttttttaaaatatgaacttagcctatagaacagggaactagccctcaaataacccaatctaaaattcgctcctatggagatttgaactcaggaccttagggtgctactcaggtcactgcaaccactaggctacatgcactttcacactacgaaattacttaagggttaaggcaccactaggctacatgcactttcacactacgaaattacttaagggttaaggctgtgtttgttccaagtacaagcatgagaaaaacccgtcgtttttaacacgtgtgttgagttgtgatttgaattcatttacacataataaaagacagcttctgccggagcaaagcggaggcccgtagatgcccgatgtgttctttacaaaaaaaatcctatataaaaattgttttaaaaatcatattgattatttttaaatttaaaataattcatactaagttattaatcatatgttaattatccacctcattttacctatcttaatcttcttctttcccctccgttcaaactaatctatctaaaatatatcgaatgttgtataactacacactacatgcaaaggaccacaaattgcatttctgttcaacatactacgtttttttccctaaaaaagagaaggggaccaaattgttttgcttttagagcctgctggttttgtaagttgcattaatcctgatttttggagttcattttataattgttgcatgtttttttagtcgttttcatcgctcggtcttgacttttggatcactattaacgaccaaatttggcaatatcagcatcggaaaaggagattagatcaaggtggagtcgaaggcgaagattgatccgagaatagagcaagaatcggctgaagtccagatcggctacgattaagatcggctgggtctaagtcggactaagtgagccgatgtagccgattctaacagtataatttggtgtttgacattgggttgaattgaggtgcttcaagatgattgccgcacatggatagagtcttgagaaggcaattgtatctattaattaggatgttttatgtaacttccttagagatatgtttgggcaaaagtctgccgcaaagacttatggtatcttagagtttgttagagatagtggtcgtgtccggtatggacatatcttataattctcgggtataaatagaccccgagccctatgtaattttgaacacacacgttcaatacaatctcggcgcatcgccacctttttgctttagttttgtttcgacgagttcttgctttcgggttgagctgcatcggtttcgatcttcaacaagaggtaaaacttgttatgacgacttgtgttctcgtgattagcgcttccatctttatgacactctaatcttgtctatataattcgtcaagttatcatatatcttacataatccttggcaatatcgtcatctaatctataatcggctaacatctgttaatagaaggcagccgattaggttaaatagcgacgttgtcctagatcatataagatatctaccactttatgaaacgcccaacggcttgattgtctaaatattgttcttcttttcatacttaatgctgcatcagttgagtttgatctattaagtcgtgcttagaatatcaatctctagcctgttctctggttgccgattagggtagtatcggagtttcagccgatcttatctgatttaaccatattcgatctatatgcttcaatgacatgttaaatccgccctttatgtcaggatcttattgcatttaagtatattaagcttttgtttggtatattatatttgttttgatatctttatataaagtagtatcggagtattagccgatacatgctagatctatctgatcggctatgctataaacatatataatcctgttattaatatatatttcgatctaagtgatttatactgtctcggcatggtgaccgatccatcccaatcacttgatttaagtatatattaatataagaactatatatcgttaatatctacagccgatcgaatagatttagctccttactatctatttataaccgccgatcgattcatatatgacatcggcttaaagataaatgatatgccatcagcacctagccgatcggctatcatttatagatttaaccacgaattctttgtctctatttcttgttgattacaggatcaaatcaactggcacgctcgtacatttgaaggcgagctttggacctacactggagttaagcagatctcccaggcctcatgttttctgtcaacaatcacctataatataagtgtactagtactaacccaaaattaatttttattgcatcgatcatgtatcttccgtgtataagcaatggtcatgaggaattcctatcaaatgggcctaatttctcccttccaaaagtcaactcaagtacagaatattttttgaatagctaagtactactacatcacttatatttaatgaatcacttatattaatttgatggtctctaccatgattatattcctttgatcattctttaaccttgctctgattgctttgatgccttgacttcagattctaagaacctaaccaaatccagccattgactaatttaggagcaaaacagcataaactctagtgatcaaagatgactagatgaggacctcaaatgacgtataaactctagtgcctggatggttgattttcggcccgaaaccaatgtaatcttccgggtttattgagcccaactacgaaaattctactgccttctttttaaagtatatatgacgctatttttcgtataacatttaaccatttattttatgtaaaaatttaatataaatatataaaagaataagttaaaattatattttatttaaagataaaacaaatcacaacaaaataaatgatgcttattttcttgtaagatgcatgataaaacgttatgtcaaaaaatcaacgataccgcacatttaaaatggaaggagtaatacagtattttctccgcacgagtactatctcgatcctgcctcccagtccctagcattgatccgctcaaccagtctctgttcatcgtcaatgtccttggctagtgctctttcggcgtcgatccgcgcggccagtcaatggcgagcaagagccagcaaacaattcatcttcctcaaggaggtcaagaattccctctttcccctccgattatctccctctgttaccgttcaaacaaccttgcaagcagataggaaaacatgtgtaatggttttacaggggaaaagaaatacaaatttcccaagcaaggctcttagtattaagcagtaaccatgcgctgtcacaccatcctattacctccatcccataattaaaaggattttgtgtgtgtatctcacacatggaccctatgatttttattatttttcagattgaattgccacataagcatcacattaatgacacgtgggataaagactttcaaaggagccacttcaaccaaaaccagagaaaatattataaatctcgtttgcactgattttataagtttgaggatacgttgtatctggttatgtggtctcgggatgcatttcggactcaacaaaaaatgggggacctagtgaacttgttcttattgagtaggaataagttcatctgaggtcccttaattttacgcaaatccgattttcatccttaaaccctaaaaccagatataaccggtccctaaactatcaaaaccggtgtaaatgagatccctcggcggttttgaaggcggttttggctgacgtggcgtctacgtggctggtggctggtttgactaggtctccgtcccacatgatattgacgtggcgcttacgtggcaattatatctaaaaaaataataaaaaccatgggcccacctgtcagctaaaaataataattttaaaatagcgtggcccacgtgggccccacatgtcattccctctcccctctcagctctccctcttcctcatcaagccatctcctcgcgccgcggcaccgcctcacagccggcaggagcatgccgacgaagcggagaagcggcggcggcggcggcggcaggccgcggggtcggtgcctactcccgcgccgccacatcatgttagatgctgcacagcggtgaggaggagaggcggagttcgagctcagtacagcgaggattagtgtacagatcgagctaaacagccaacaggattagtggcaggcaccaacaagcagttgctgctgctgctgctcgagacatgcatgagctcgtgttcactacagtgaggccggccatctgcaagactgcaaccatgtcagatttggcacggagacgaaaaacacacatgttagtgacccaagttgttgtcgtcgtccatgctcgccaaggccgccgccattgccgccggtgtcaatgactgcccgactgaccgtctgtcttcaactcgttcttctcgttggcagagagagaagctgggagagagggggacagaggaggaggtacagccgcatcacctcgctgatggtcgcgtgcagccgtgcaggtagtgcatccgcttcagctcgtcgtatccgtcgcagtcgccgtcttctccggcgtcggcgcggcgagcgtccgcgtgccgcgacacctcctcgtgcacgcgacgctcgcagcgcgggttcgcggcgaggagccacaagagccacgtcagcgcgggtgctcgtgctcgtcctccccgcgacggaggcgctcctccgacgccacgtcggcgggagaggagggagcggcgcgcggagatgtcggcggtagaggagggagcggcccctcctcacctgcttcctctccaacctcctcatcatccccggccgccgcctcctcccttcctagttcctccgggctccggccccctcatcttgagcctcgtcctcctgctcttcccttcgccggacgccgtcgacctcgcttcctggtgccgatacacgcctccgcccgcgcgagccaacccgacgctgctactcctcgatgggacatggaagcatgccaaggagatgcaggccgccagcctcccgtttttgtcctccttcgtctcgtccccgtgtcattgctcgtctactgcgatgtcggcgccggcggggtcgaggtggtggaggatgacgacggtggtggaggcgggttgcggcggagggcgtgcgctgcgccctctctgttgcgcctgagagaggagatggggagagaggaggaagaaggggaggggagtgagattgacatgtggggcccacgtaggccccaccattttttattaattcatgtgtgaaactgacatgtgggtctcacgggtttattatttttcttagatcgaattgccacataagcgccacgtcaaatgaagaacgagtcaaattagccacgtaggcgccatgtcagtcaaaaccaccatccaaaccgctaagggacctcatacgtgctggttttgacagctgagggagtcgttgtatctggtttttcggttggaggatgaaaatcggattcgttgacaagttaagggacctatgataaacttattcctattgagtatgacaagcttaccaccaatcgcattgtcgattccctacagcccactaacctggcccaaggtgatggaggaattgaggcctaactttgccggcccacccaacacatgcctctagttgaacacggcctacaaataatctagcccaaccaaaacgtagatccaagcccagatccacctgcagtacaatgcctgccacaatgtacaaactattgtacaaagcaaacagtcagctacttgtattcctagttggcacattgccgtaggtttttcacctcaactaaaccatcttaaaacaagcaatgcaattcacagtaacaaaataattacacttcaacgcaacatgtcgatagatcaatgaacaatggtcagctcacgctgtgcacgtaaaactccaccgcaaaaccatcaacgagacttctctgacgcagatcgctgaaatgtattccctccgttctattaaaaactactaactactccagtaacatacatctgtacagattcatattactataatgtgttacattttattctagattcgttttttatgaaacggagggattatgtccgtcagtagtatggtttatacgtcagtaagtcagagaatcgctgctacatgttgtagccttggtgacacggttgccacccttgctgccgcctcgtcgccgcggggggagccatcaccagcgccgccgccgccgccaaatccacgcgctcgccgcagcagccgcagcgaacgcactgttcgcccgagacgttggtggattccaccacgggcacgacgcagaagttggacccgcaccgcgcgcacgcgccgcgcacctgcgcggccagcgccgactgcacccggcggcaccgcgcgtcgtcgtggtggcaacccccgcgcgcgcgcagctccacgtactccgcggcgcggcgcaggtgctccgccgcgcgtcggcggcgcgccatggcggccgacacgggcgccagccccagcgcctcgcggatctcatccacggtggcgtcgatgccgtgccggagcggcgtcgcgtccaccccggtccacggcgcccacgacgagccctcgccgcccgcgtcttcgttgccaccgcgccggggcggcgtcgcgtccaccccggacaacggcgtccacgtcgagccctcgccggccgtgtcgccgttgccaccgcgccggggcggcgtcgcgtccgccccggaccacggcgtccacgtcgagccctcgctgcccctgtcgccgttgccaccgcgccggggcggcgccgcgtccactccggaccacggcgtccacgtcgagccctcgccgcccgtgtcgccgttgccaccgccaccgccaccgccaccgccggaatccatcgtcgtgtgatggcgagttgcgtctcacacggagtaaacggagactcacgatggtacatatcgcgccgcgccacgaggtgttcgacacgggaccgaggcgtgtgtccgtgtcggagaaggattctcaaccagaggaaggagaccaagagtcccaagacaggccccgattacctttctcgtaatgttttccagtacgtaccgatttcaaaaaccaatttaagatgaatccgagattaaaataggtcaagtaaaacacatcaattctcccagtttatggagttctacaggtagtggatctcttcgggtgttttgaattcatggacacatcaggctcaacgagaggaaattactggcctaatcagttacgaattccctctccatcctgaaaacctaaatggcaatgttaaggagcacaaaactaggctgcccaatgttccatgtctcttggcatgaaggcgcagtgacggtggggaagaagatgatcaatggtctctacagagaccagttcatggcattggtggagtggctgaaggcgccgctgccggagccatgctcggcttccggccggttggacggggcacctccctgcagtgcgagctcgagctcgccggagaaatggccgtggtggacagagcccggagggacctcgttcagcacaaccccgtgcggtggcggcaggtgcacgttcctggcgccgtcatggccccggctggagctgttccagccggggctcgccgccatgtagttgcttgccatgaccgagggcgacaccgggttgttgccgcctccgaaggcgctggccgttgacgacattggcggggaccggttgtggctgctggtgctttgggtagtatcccatggctgagttgacagaagagagagagcacagctggagtcggtggcgactcccgcgagacatccacctgaggtgagctcaaaggctgggtggtggagcattggtgccccagccgctgagccaccatggctgctgaacgcatggtgatcactgtatcccgcaactgcgctgcggtgaggatggagttcatggcccccttgccactggattgaaccggacatgcgatcgctgggctgaatagcaggccacgcatccctcacactgcttggaacccttgggtatgagaaatctaccacaaagcttctggacctgcctggctcttctgaaacaaaagttgcaggggcaacaagtcaatacactcatctgaagttcagagtaacaggacaaacatgagccacattttaccatgaaaggatgcagcaagccggccatagcgagaagaaagaggtccaggtgtcggcttcctccggcgttcattgtgacctgcaaggcgtctgcggcagctttttttttcttgatcaaattcaggtaattggtggaacctgtgatttgaagtggccaaaatattagtgaattaccacaagcgtagtgacactgcaggatataattgaatacaaggagttttcctaatgaagaatgtcatgctataaaaaatactctacactgacaatgaaaagcaataatcaatttaactcaataaaaaaaaagcacgctgaagagcatttttggtggggctattgcttattgtagtgaccttactttagaaaattgcaagcacatgaaaagtaggagtgccaactctgtaatcaagaatcagctacccctgctgcttatcttaatacggagcgtgcatcagataaataaatcaaaccacatgccatgtgaaaagctgcgtcgatgcaagcataacaacttttttttaatcctagactaatgtgtatttgttctaagtagcaacactaaccaaagacacgcctttcatgattagatacacatacaccacgaccgggaaaataaaaaggttacctaaccatgtggacagagcacctgcaatcattcccatagtactttagcacaaacaaaggctttagttagtacatcaaatagtcaagagatgttttatctacggcagagcagatttataaataacacaacagtcagaaccttctattttccggtaatgcatatgtccacaactccacaagccaccaactatgaaatagtatgcattttttccaaacaaattgttggatgcaatatagcagatgatgttatttcattttgatattttagattatgtagcataagcataagtgtttgtgttctagtatctactatacaaaatgaaaacatataggacaaaattagagtaagtatatgggatttctgatgaaccaaatgagaattattggttagcatgattgaccaacttcgttattgctgggcatgttcaaaggtagaacccatatagtcttttaaataatacatgtttattcagagactatgtccttacaactgttgagatcgacaacaaagactttatttaaacaatgcattcataaaaacaaaattattactattatttccttgttaaaaccctcatgcagaaaagtttccattctatagaggttaagagtcgttgctaagcggttgtttaatcgaagctaccatgtttgcatctccttgcttctctctcatccatgtcagcaaacattcctaattagcaaggttttgtagttactatttcatccgatttgttttccacctcaatttctctgctgccctacttccattttagggcattaaatagtgcatagtagtacagtgtagtaccttactactaccccatatatacttcatatcctaccacattccacatactactagaatagaaaaaaaggagatctagacttactatatgtgtgctcctcagacaagatattctggatggacacttttatgtcccttactattctagtcaggttccacatgtcctaaatttcacattgatcgctactactatcaaacccagcagcagtacactacacacagggcatgaaaatctctcaatctggccagggacaaaacggcaaaatttaatttgcctgaaatccaacgttgctgctacgtttttgcaagttgcagaggttgtttcttttttcttgtcctaaaatcagagcttgctgaggtagccaaatctagtggggagtttttttgaattttggcaggaaccgtttgaaagttgggcgaatcacacggtggattggtgagtgtctgtcacactcacgcgctcacaggtggaacagtagagcagcagaggaagcaggggcaatggctggacgacggcgacgaggaggaggaagaagaagaagattttggttttggtttttggttttttacctgctgcactgttggcagaagcgctgctcgaggccggcgacgacgacgatgggctccttggcgtgcatgtagcacaccttgtggcggcagtagtacggcttgacgccgctcagatccacgccgcaaccctccacctggcacctcggcggcagcggcggcgggggagccgccgccgccgccacgcccttccccttcttgccgcctccgcccgacgacgtcgacgacgactccaccgccgccgccgacgccgacgccgccgcgtcctgctcgaagtagatcttcttgccgaacttgagcccgtggacatcgtcaccaccacctccacctccgccgccgccgccgctgccgccggtcgccattgcggcaggcggtggtcggtcccttcctcctcctgctagctgcctagcctctctctctctctctctctctcttctttttattgccgctccctcactctctctctctctagctagcgagcgtgcgcgtgtgagtgaaaaggaaggcgagctgagctgagctgaggaggcgacaacagtggtggcacacccctcttttaaaaggagtagtaaaataaaagctcagctgctgctgctgctgcttgtgtgtgtgtgtgagtgtgacgcactagtgcactactactactaccgcttcacactcccagatgctactgctagtactactactccgagtagctaccaccttcaaagctcaaagctgcctactagtggtagtaggaggaggaggaggagtagcggtttaactcgtgtgttgcggggtttctgggggtgaaagtgaaacttgggttggcggctccaccccatatataggcgccacaggccggtgtggaacagcggcgcgcgcatgctctcgtggaaattttgtgccgtgtcgggggctcggccgcggcggtgtcgccgatgggggaatctcgcgtatcgactatactcttacttctaagagcaaggacaatagcagtctataagccagctgtaaacatattttaagaagataaatgaagagagagaaaagcagcgggctacagatttctagtcagctataacacagaatttaagacgcagtgtgtatgacagatgagaccaggtattaattttgtagtatgtaactattgtatgaggcttccatccaatggtccaataaaccaaaaaataagccaaattttgaattttcaaacttaattttgaaatattttcaacgtaattttttttcaacattggcttttaagttacaaagaacacatatataaaagttttacctacaaatttatttttattccctaataagccgttttggcttattagaaaaaaaaagtcaaccgatggaggcatgaatgagctattagattgactatagataaattggagctagtagttggctatactattaaacttgctctaattagtactccctccgtcccgtaatataagagattttaatattttatttacactgtttgatcactcgtcttattaaaaaatttatgcagatataaaaaaagttatacataaaatactttagataataaagtaaattataaaaaataaataataattttaaaatttttaaataaaatagatggttaaaaatattaaaatctgggagggagtactgcggtagaggagacggcagagaacaggagcacggccacggccacggccacgggcgagagcgagtgacaagagcagcagcaagcacagaggccagcagtacgctgtgcatcccgctgccgcgctggacggacgctgggccacagtagctgacgactcacatcgatgtgacgatggagccaacccgctcctgcctccgctcccgctacgtccacaccagcagctgcagctgcagctacattgggcgcgggacgacgaaggtgggggcgcgcgtcgatggcgattggtggtggaacgggcggttccgggctattggggagacgtgcttcatcacaggttggaaggggggaagaaccgaacaagggttgggcgtgtaaaaaaggtggctcttttccggaggtttccactcaggttggttttgattcagtggctgctttttagcgtcctttctttctttttagcacaggtacgaaccataggttattcgaggaagatatgagttgttctatgtactactacatatcagagaaagatctaaacggtatcataattaggtggatttatatcgtttgttgtatatgtttgtcgctattaacgtccggagaaaaatcataattttatatcaactttcaaaaataattattcttagaaaattatcaagaaagtatagaattatgtcaccataaaacaacgtgataatccaaacaatgctagcatataacccattaatcgagagtacttgataaatgtagtgctaggtatacgtggtttgcttcaaagcactagagatgtgttagtggatttgtagaagcatgtttttcctagtgcctacaattacgcacatgtaagtataatttttatggatttacttctgagtcattagcctgtattaagagtgcacacccatgtgtttgtgagtgtggtgtgcatatgtagtgatgtcgctacaccaagatataggtacataaatactttgatctgttggaataagtagcttttagtggcaaactatctgttgggaaagataaagtggcatagtataatttttttctaccgacagacaattgtcttctttttagtgttgtagtgtagtgtgtgtgcgcgcgcataaaacatacacatatagttctagctcatgcatatgtatcttttgtttgatgcatatgttgggttcaattccattatctaagtaaaaaggcttgtatattttgagaaattatttgtaattttaagttgtatgtttgactaaatttcgcataagtgcatatgatatgatcaaattataacaaaattacgcatctaatattgtgggtatatatatttgaggtgatgtggtttacgagagatgaaaaacaacttggatcacagattaattatcaaatgtaaaaaaaagaaattgaggtgacgtggttctataaaataagagagaaaataatttagacaacagattaatcaatagtaaaaataattgagattgtatgaattaacaagcgtgaaataaggtaacagtatttcgtatattggtatctgccatattcttttctttccatatccaaggtactccctccgtctcataatataagggattttgagtttttacttatactgtttgaccactcgtcttattaaaaaaatttaaaattattatttattttttgacttactttattattcaaagtactttaagcataattttttgttttttatatttgcacaattttttttaaataaaatgagtggttaaacaatgcaaataaaaactcaaaatccgggacagagagagtagtactacacagattaaaaaaatggtgttatacaatgtgttactagcaagcatgcatgccttatatatatttttatactagtgtactgtacttaccagtacaaggataagagctgacattttaggatttttgattccttaatcactttaattagcctcagtggtctactggtactaggagtgcctcccttccctcaagctaaaatcatgtggacaaataggggctgcagtgttgttgggagaaatggttgaaattaacgaagcgtagggtttcatgcgtggaggcatggagcatgcacgtgcttgcctgcttaattggtctctagccttccacttttgagttggacaagacggctattgggttttcttttaaccgttggtcctttgcctggggccgagttacgcctttggcgtgttaccattgctgaagaatctttcgtcttgagcccgagtttccactggtggtgaagttttggaattgcctcggaattcattagggatgttaattttcacacatgatactcacgcacacgctctcatctgtcgtctctataaatttagaccgtgttttgtcttggtgggactaaaacttttaagtcactatcacatcagatgtttggaaattaattataaatattaaacatagactattaataaaacccatttataatcttggactaattcgtgagacgaatctattgagcttaattaatctatgattagcttatgtgatgctatagtaaacattctctaattatggattaattaggcttaaaaaatttgtctcgcaaattagcttttatttatgtaattagttttgtaagtagtctatatttaatactctaaattaatatctaaatacagagactaaagttaagtccctagatccaaacaccaccttataaacaccccttttgcccctatcatatgcagtatgaataaatctaaaaattgagtcagcttatcttaaaattcacaaattctccatagacttctaccactgagaaattataataattagttataaacatgagtgttttaaaactgagtgttttatcattaccagcataaacttaatatgttttttaatcctaaaactaggcttctatgtaaaagaaaacctctaaaagttttcctacgtagatgccaatgaattaaaatccccaaatatgtatttctcgctctctacatcggctggagggcacttgctcttagtcctgattgtgcgaagagagggatgcgctctcgtgggaagaggggaacaacgaatttaggccatattttcataccggtgttttgctttgtatcacactttaaccaatgtttttattttagaataggtaatctttttttttgcagtttgaactaccctaactcatttctcaagtatataaacgaattcgagtatgctagctccgattcgtcaatgaactcccaccattttatatagaaaatttatttgatatatgatatagtttgatgtagatagataaaagagttgagagtgatccaaggtggtacaaagataagatttctagttcaaaattaaaaaaatggttaaagatgacccaaagtaaaacttattctttttaatttagggagctgagtgtatgctctctctcggtgagatgtataacttttaatctttaaattctcattatagatttccaagaaaaatttaggggttataattttgggcaaccttcattgatgatgctcttaggtgttgtttaatttggctgtcgcgactcaaagtgcctaagtttggctcaaaactgagtgtatgatagtatatcatatactaggacaatataaattagtaaagtattgattgttatagttgtaataaccaacacatggtaataatatatgacatgtatagtatttctcgtggcgacttatagcaggaaactaaatatgctctttaaaattcaaacacttcattaataaactacacctataaaattttggtgatatttagagtattagttttcataatcatgattttatattagcacaaaagaaaacatgtacttcctccgtattttaatgtatgacgccgttgactttttgataaatatttgacctttcgtcttattcaaaaaatttatataattatcatttattttattgtgacttgatttatcatcaaatgttctttaagcatgacataagtatttttatatttgcataaaaaatttgaataagacgaatggtcaaaagttggttaaaaaatcaacggcgtcatatattaaaatacggagagagtatactagaatctgcgttaattaaataagttattggtattaccaatattttagtaactccaggcttgttaccgaagtttttagtatgaaacgaaccaaactattctactccctccatttcaaattgatctacatatttcgtaggtacaccaagatcaagaaaaattaataactctctcatactatatttactctagcaataaactcaatgcatgcaccatccccactattttctactccctctgtcctaaaataagtgcagttttagcactattcatgtccaacgtttgactgttcgtcttatttgaaaaaagattatgattagtatttttattgttattagatgataaaacatgaatagtactttatgtgtgactaatttttttaaatatttttcataaaattttcaaataagacggatggtcaaagcgctaattatggatatttatggctgtacttattttaggacggatgtagtagccaatagcaaatcaagatattgcatgtgggttataaatgcttgtgagcatggatgcatgtatcaatgtctatttactccaatgcacaaataacgaatagacttaataaataaatataaatatgtagatcaatttagaattaagagagtataattaagtaacgtagagaaacaaggccctagagagtttctggcagctttactctgagaataattaacactctcaaacggcctatatttttagtttagagtttgaaacggctagataaatgtacgtagtaacacttggttctcatatcttccccctattattgcaacctcagaatctccagacagggaccaagttttagttctgagatctgctcccctgttgcaacttcagaaccaagttgtactactggcaaccttgctcccgtcgctactcccgtcatgtccaaacgaaggctgatgatggcacgcatcacagtttgatacccttactgaggggtgtttagatggggctaaaaactttttagcccatattatatcggatgtttggacgctaatttagagtattaaacataaactaataaaaaaaactaatttcataaatgagagctaatccgcgagatgaattttttaagcctaattaatccataattatcaaaagtttactgtagcatcacattgtcaaaattatggcgtaattagactcaaaagattcatctcgcgaattagtccaatattatgaaatgggtttt

SEQ ID NO: 9711 - DNA, 61400 bp, Oryza sativa
  unsure (1)..(61400): unsure at all n locations
gccgccgccacgcccttccccttcttgccgcctccgcccgacgacgtcgacgacgactccaccgccgccgccgacgccgacgccgccgcgtcctgctcgaagtagatcttcttgccgaacttgagcccgtggacatcgtcaccaccacctccacctccgccgccgccgccgctgccgccggtcgccattgcggcaggcggtggtcggtcccttcctcctcctgctagctgcctagcctctctctctctctctctctctcttctttttattgccgctccctcactctctctctctctagctagcgagcgtgcgcgtgtgagtgaaaaggaaggcgagctgagctgagctgaggaggcgacaacagtggtggcacacccctcttttaaaaggagtagtaaaataaaagctcagctgctgctgctgctgcttgtgtgtgtgtgtgagtgtgacgcactagtgcactactactactaccgcttcacactcccagatgctactgctagtactactactccgagtagctaccaccttcaaagctcaaagctgcctactagtggtagtaggaggaggaggaggagtagcggtttaactcgtgtgttgcggggtttctgggggtgaaagtgaaacttgggttggcggctccaccccatatataggcgccacaggccggtgtggaacagcggcgcgcgcatgctctcgtggaaattttgtgccgtgtcgggggctcggccgcggcggtgtcgccgatgggggaatctcgcgtatcgactatactcttacttctaagagcaaggacaatagcagtctataagccagctgtaaacatattttaagaagataaatgaagagagagaaaagcagcgggctacagatttctagtcagctataacacagaatttaagacgcagtgtgtatgacagatgagaccaggtattaattttgtagtatgtaactattgtatgaggcttccatccaatggtccaataaaccaaaaaataagccaaattttgaattttcaaacttaattttgaaatattttcaacgtaattttttttcaacattggcttttaagttacaaagaacacatatataaaagttttacctacaaatttatttttattccctaataagccgttttggcttattagaaaaaaaaagtcaaccgatggaggcatgaatgagctattagattgactatagataaattggagctagtagttggctatactattaaacttgctctaattagtactccctccgtcccgtaatataagagattttaatattttatttacactgtttgatcactcgtcttattaaaaaatttatgcagatataaaaaaagttatacataaaatactttagataataaagtaaattataaaaaataaataataattttaaaatttttaaataaaatagatggttaaaaatattaaaatctgggagggagtactgcggtagaggagacggcagagaacaggagcacggccacggccacggccacgggcgagagcgagtgacaagagcagcagcaagcacagaggccagcagtacgctgtgcatcccgctgccgcgctggacggacgctgggccacagtagctgacgactcacatcgatgtgacgatggagccaacccgctcctgcctccgctcccgctacgtccacaccagcagctgcagctgcagctacattgggcgcgggacgacgaaggtgggggcgcgcgtcgatggcgattggtggtggaacgggcggttccgggctattggggagacgtgcttcatcacaggttggaaggggggaagaaccgaacaagggttgggcgtgtaaaaaaggtggctcttttccggaggtttccactcaggttggttttgattcagtggctgctttttagcgtcctttctttctttttagcacaggtacgaaccataggttattcgaggaagatatgagttgttctatgtactactacatatcagagaaagatctaaacggtatcataattaggtggatttatatcgtttgttgtatatgtttgtcgctattaacgtccggagaaaaatcataattttatatcaactttcaaaaataattattcttagaaaattatcaagaaagtatagaattatgtcaccataaaacaacgtgataatccaaacaatgctagcatataacccattaatcgagagtacttgataaatgtagtgctaggtatacgtggtttgcttcaaagcactagagatgtgttagtggatttgtagaagcatgtttttcctagtgcctacaattacgcacatgtaagtataatttttatggatttacttctgagtcattagcctgtattaagagtgcacacccatgtgtttgtgagtgtggtgtgcatatgtagtgatgtcgctacaccaagatataggtacataaatactttgatctgttggaataagtagcttttagtggcaaactatctgttgggaaagataaagtggcatagtataatttttttctaccgacagacaattgtcttctttttagtgttgtagtgtagtgtgtgtgcgcgcgcataaaacatacacatatagttctagctcatgcatatgtatcttttgtttgatgcatatgttgggttcaattccattatctaagtaaaaaggcttgtatattttgagaaattatttgtaattttaagttgtatgtttgactaaatttcgcataagtgcatatgatatgatcaaattataacaaaattacgcatctaatattgtgggtatatatatttgaggtgatgtggtttacgagagatgaaaaacaacttggatcacagattaattatcaaatgtaaaaaaaagaaattgaggtgacgtggttctataaaataagagagaaaataatttagacaacagattaatcaatagtaaaaataattgagattgtatgaattaacaagcgtgaaataaggtaacagtatttcgtatattggtatctgccatattcttttctttccatatccaaggtactccctccgtctcataatataagggattttgagtttttacttatactgtttgaccactcgtcttattaaaaaaatttaaaattattatttattttttgacttactttattattcaaagtactttaagcataattttttgttttttatatttgcacaattttttttaaataaaatgagtggttaaacaatgcaaataaaaactcaaaatccgggacagagagagtagtactacacagattaaaaaaatggtgttatacaatgtgttactagcaagcatgcatgccttatatatatttttatactagtgtactgtacttaccagtacaaggataagagctgacattttaggatttttgattccttaatcactttaattagcctcagtggtctactggtactaggagtgcctcccttccctcaagctaaaatcatgtggacaaataggggctgcagtgttgttgggagaaatggttgaaattaacgaagcgtagggtttcatgcgtggaggcatggagcatgcacgtgcttgcctgcttaattggtctctagccttccacttttgagttggacaagacggctattgggttttcttttaaccgttggtcctttgcctggggccgagttacgcctttggcgtgttaccattgctgaagaatctttcgtcttgagcccgagtttccactggtggtgaagttttggaattgcctcggaattcattagggatgttaattttcacacatgatactcacgcacacgctctcatctgtcgtctctataaatttagaccgtgttttgtcttggtgggactaaaacttttaagtcactatcacatcagatgtttggaaattaattataaatattaaacatacactaattacaaaacccatttcataatattggactaattcgcgagacgaatctattgagcctaattaatccatgattagcctatgtgatactacagtaaacattctctaattatggattaattaggcttaaaaaatttgtctcgtaaattagttttcatttatataattagttttgtaagtagtatatatttaatactctaaattagtgtctaaataaagagactaaagttaagtccctggatccaaacaccaccacagtcgtacgctccgaaggcaaggggacgtataaacaacaaagacatgtgtaaaatgctctaaaacacaatgcaaggacaccactaataacaaaagttggcagttttaatttagttttgtgatgatgtgtatattattaaagttccgatgcaaaccctcttgtcgctacccagatgttccgtttcaggacaacacattctagtaagggtcaaaggttgtacgcattttgatgatggctagttgctttagggctcgttattttaatgtaaaataaatcttaccaacttttatcaacaccaaaatttagttaatttgctacttttgtcaaatattattgtattatgtgaagaagtttctagtaatcactaaatatttgtacagtaggtatggtacagtatttggaatttagttggattgctgccttattaaaatttacaaatgctaaaatttgacatagttgaaaatggtagcaaacggataaacgcccttacctcccacttgattgaaaatggtcgatcccgtcgaccgccagcacagacgacatcacccataaacccacttgactgtgtgttcggcgaccccattcttgttccactggggaatggatttgtgtcgggtcggtttggaagttggaaaacagatgaaaaattgtgtgtggtaaactccgggtacatggacgaagggacgatgatgacagaaaccgaaaagcttttgcatccccacggccgccgcaaggtcgttggctgggccggcaggagcagatcggttagttgacgagggagagcggtagcgaatgcagccgctgcacaggtccgcccgcaattggcctcgcgatggcgcatagctgattgcgcaagatctccccactgcgaacaatctgaaaacgaaacagattctagtgcacaaattatttggcccgaacgacagacagaacgacgcgcgtgcttcggactcgtagggggtgtttagatcaggtgtaaagttttgacgtgttacattgagtattatataaggtgtcgtctgaggtgttcgacactaataaaaaaaattaattacagaatccatcagtaaaccgcgagacgaatttattaagcttaattaatccgttattactaaatgtttactatggcaccacattatcaaatcatgaagcaattaagccgaaaagtttcatctcgcaaattagtcgcaatctatgcgattagttattttttagcctaaatttaatagttcatgtatgtgttcaaacgtttgatgtgacatggtaaacaaggccgaagatgacggacgagggtgagtacgtatacgacagaccaaatatttttggatgacgaaagtaagagtatcaatgtttcaattaggtagagatagaagagttgcggcaggtgggaaaataaggttgagtccatgatataggccattcacttgtgagaatactgtattagtcatagtctgtagtacatattaatggaaacatcatatccagtttcctcacaacaaatatagtgtttgggtttacgtgtgtgtgagtgagacatcctggtggtgggcaaaattaaaatcaatgtaaaaattatctactctctctaaaaaaaactcaaatctctaggatttatttatttttttgatacagaaagattgtggccgtgttaagattcaaaattttttcttcaaacttttaattttttcgtcacatcaaatatttggacacatgcatggaacattaaatgtggacgaaaaaaaaatcaattacatagtttgcatgtaaatcacgagacaaatctttttgagcctaattaattagacttaataaattcatctcgcagtttacaagcggaatctgtaatttgttttattattaatctacgtttaatactttgaatgtgtgttcatataattaaaaaaattgacatacgaaataaacacaacctgtgagagtgagtaaagagcagccaaaagaggaagtatgtgcgagtgagtaaggagcagccagcagtaagctactgaccaaggtttgaagccaggtgctcaccgtctcaaaaataagctcttcctcggaattcttatacatattttaagtttacttgctgctcgtatatagtgtcggggtgtgcattttaatctagtgctcgattttttacacactcattttttttagttattcaatattccgtactaagtttttccgttggtcgttagagttctttctagaacggtgcatagcttagccgatagagagctactagcgtagtcacttacatgggttagaattcatatgagctcaccacctactaaaattaaattctagacaggattagtgttgcttattttttgataaaacaatgcttagggtctgtttgaagtagtttctagttgatacaactcctccaaacaatccctccaaacaatcctttttttttacagattctgagaaactatagttgtagaatccagacaataaactactccctccatccaaaagaaacttaatctagaaagggatgtgacccctcctaagattatgaatctggactaccctttgtccagattcgttgttctaggaggggtcacgtcccctcttagattgaggttttttgtagaaggagggagtagaagtcagaagcaggaaaacttaattttttttccagattctcagaagttgttaccaaccagctgtttctcagaaatttaaactcccctaaataagccctaagcttcttagctggtagggagccgctgggaggaaggcaccgatctcggttcaaacctagccaataactttttttttacttagttctggatgtaacacaacaacattttaggacagatgtgtgcacagtacgcccttccgagaacatcacccacgcccttctaaaaaacgcatatgctcctgttacaacagaaaactagcagaactatcgccccgacgtactacacagctacccgactcacgacgactcccaaacagaagccccccactgatcgacttgacggactgactgagggtctgtttagttactaaaaagtttttcctaaaaatatcacattaaatctttgaagatatgtatgaagcattaaatgtagataaaaaaactaattgcataattatgatggaaatcgcgagacgaatcttttgagtctaattagtctataattagccacaagtgctacagtaacttatatatgctaatggcggattaattaggctcaaaagtttcgtctcgcggttttcaggcaagttatgaaattaattttttgattcgtgtccgaaaaacctttccgacatccgatcaaacgtctgatatgacaactaaaaatttttatttcaccaaactaaactggcccagactaatcctatttgcagggacgatcgacatgtcgtgaactcgtgatcctccggtttcccggccgtatacatgctaccgctagcaagcatcaaaactttctctccacagtggtgccatggcaggtgtacgtgcgatccctactttgattggctactcaccgtgacgtcgtctacaccgacgtaatacggcgcgggggagtgcagtgccggggacagcaccatgcacacgaatcttggccgggtcgccggccgtcggcatcggccggatcgcgaagtcgcggctacaggagaacgtgacggatcgccgagagagcgagagcgagtactccactactactcgagacaggccgacgagacgagaggaggaggccgtgggctctcgttggacgctggtgctcccccgaactgttgctgatgctaccggtgacacgtactgtgtgtgagcagctgctgctgctgctgcgtgtgtagctgtgtatgctggcgacggacggggtgagtggctgtgagactggagtatgcctgtgagcagtgtctcccactgtgtgcctgtgactgtgcttgctttgcttcttgcttgttgggccgagaagctgtgacatggctcctgcagtgactgtatccctcacgagtactgtagctctgtgacttcgggttggtttggattttgataggccgagagttttccactgataaatgcaagagttttttttttgtttgatcaggataatcttgtgtaacgtttcacaggctgagaattcagcgtacaacagtagttgccgcgaccacgaacatttaaggacagaccatgtgtgtgagaggtacttttgggatttccatcgtccttcacgttagcctcggcgctcgctttctccaactcacgaacgatgtttacgtgccagatagagataggtctaacacaagtagcactctcttaacccctgttcgtgatgcgtacatccacatgtgtagccagatgatcccactcctcccaatctcaatcgtcgtgctgagcccggcggcgcccacgacgcggacacgtacgccacccacccaccccccatcatcgcccgcacgcccggctcgcgtcgtatccgtagcccgtgttgcgcgatggcgcacacgccggtgtccccgcgcgaccacgcgcacgcgtggaaaagcagcttccnnanncccccccccccccccccccccgcgctagctgtcccggctggctggctggttggttgggcttcccatttgcagtgatgctactgcgtgcgtgcgtgcgtgcggccggcccagcggagggcggctggccggggtccccatccactactgcggagtactacggggattggatggcacacggaagtgaaggggttaccggttcggtcgcatttacagttgggctagggggtacgtgcacgtactacgtgtgttgttgtttgtgtacgttttctgggctgcgtgttttcttttcggtctgttactcctgttgggcctgtaccttgtgggaggacggggaacagtaatagtagcagtgacgggagcgagaaggactccgtcgtccatccatcatcatgctcggcctctcctgaacttatgagtttcactgttttttttaatggaaaatcgtttaaagttggttttgtgatgttgagtttggtgccaaaattttgtcaacagggagagaatgtataaggcgataccattattccgatagggcgccatgttttcaaaggacggataccgaacctttgctggatcaccgttggatcacagattaccatggatgagtcgaagcaatcattgaataactgaatctctgggcaaggcggaacggcacaagactagttctcacaatcaacgagatgctttgctatggagatcgatgcctgttgcgtcagggtcggcatacatacaaattaagcactgttcataggatcaaagactttccggctatgccaatctgagagaaagcctacttgactagcgcctcacgctgcaggttcacttgggctagttgcacgccgatgatctgtgacaaacgataggatgagaaggagaggattacctaatctcagtaattgcatactctatgatcaacaaaagaaaaccatccgccacattcttatagcatgctcgaaatccctctaactttggtggatcatactaggatctatttggggagtgtttaggaactacaacaacttctaccagaatctccacgtacttcaaacagttcatattctcgcccatattatgagaatatatagttataaaattttaatctaaaaaatctaacttatttagattttcaccaataagctagcttcctttggtgcgacaaaatgaaaagaaaatattgccaaacatatatggcatcggctcccgacatagtggccatcctcgcaacttggtcgatttctctctgtgtttttttagcgtgaatatggtgctctttactggtagtagaaagtaatctgaaccgttgatcttatttaatcaaagatttggatctacttttactaccaccccagttagcggtagtagaaatatgaaggggcattattgttttaaaaaatatgtgtgaaaagggtataatcgttattttgcattgactaaaccttattcttcttatttttagctttttcgatggtaaattagcgatgccagcggaatggatgaccacgatagacagaagaaaaacgtaaatgacaaagctactccaaatcactgttaaaagttattttaataatgaaccggttcggatcattaacagagagcactacagcaccggagcatatcgatctcaaaggaaaaagggacaacagattgttcaatcggcaacaacgatcctggcgcgaagaagcgagcacggctgctgaagcgcgtggaggccaccatcacggtgctatagtacattgttggtttgctgccctaatgtatgtagtagcttggtcgtgcggtaattagccatatgttgtaatctttgtgtgtcctttttttctttctttgatctgtcgttcctgtacaaaactccatgtccatcgaatgaagtagcccatgtctggacaagcccaatagcctcattgtttgttaatgtctttttgaaagaaaaagcttattgggtctctgaactgttgatctcaggctttttaagctcgcaccagcatgaagcggcttggtgcattggcccaattggtaaaggccactagatcagattgcccaaatgtaacgtttttccatttgctcctcttttttttttctctgaacttactgccgtgtaaatgcctactctatgatctctatcacttatatacctacatgaatgtgaatggtagtatcaagttgtatgcaccgaccagttcaatccaaaagcttaagatgatgaagaaatccgggcaattcactttatattccagcacttctcatgcgaggccgtctcaagcctctagcgtggaatagaagtgggttgcaacttttatttaattatgcattagccatgattctaacttgagtcctttggctctgataccatattgagttgtatgcaccgatcagtttcaacacaaaagcttaaactgataagaaaatgtgggcaattcattttgtattgcaatagatagaaaacaaagtaaacaaacggagaaaggcagtttaagaagtgagatgtggtggtttttcttaagagactaacagaaaatttcggtcaactctcctaattatcaacatatttcttctctctttttgcatggtttccaatactttgattattaatttcttttataatatattatcaacaattacaaaattactagatatgaaaatattttcaaatacgagcataatgatactacattttataatatgtttttagtttaattattagtcaaaatgttcaaatattgactttgtggaaaaccaggatgtttttttagattatattttataatagagagagtactatgcatagacctatggatttacgaaacatcagccctagctgaactttacgatttgtgaactattaatatttgatcaatttaggatgttttggaagtcgtatgaaccgacatttaaaagaaaaccgctagcgaaagctaacttgtaatgtagtcatcgataaaagctcttatgtccatggtacgcacaatttacctattttcactagatctgattaaaacattctctccacaaacaacatcaagaatgatatatctggtagggacttttctcctgtgttagacgacgcaacatgcaacctggagtgaggcgatgcaacatcctgtgaccatggagaaagggatgttacgccctttctcgacctcaacgacggtggtgatgatgggtggttagatttggatttggcacctatatctacagaacgcacgacagggcatagacctcgacgatagtggtgatgatgggtggatggatttggatttagcgtccaaccctccacagcacgcgaaggaggagagaggtgggccatcgaaggcggtgtgagccaaatccttgctaggcaaggacgggtgtgcctggcccctaagatgatatggttgatggcggtttaggtggcggcggtctacaatgtcaaaggtgatggaccaaatgcacgcgtgaggagagcgatgtgctcggctctaccacgatttggcccgccatagagcgatatgatggttcctgttggcaatgttgatgttggcatgacacaccaacactggggaagggtgcttgtggtcgaccctcgtgacggttcaagctgcgatatgacggtggtggcatgtagggggtgcttggcatgcaaagataggcgaaggctagctagcggatgagtgttggtgtatcggtgtcttcacgccaacagtagtggatgctagtggagcaatgtggcagtgtctatagagggtggctaggcgacagctgacaaacaaaagcctagctcaaaggacttcttggctagcaatggcaacgagtgccatgatcactctttagagcgttgttgacggacctcactatcttcttagcaggacattcacagtgaaaaaccttgttaaattttcaagtcggacgacatcgtatcctttcgggaggcgttgcataggaagtctcatatctacctcttctgtcaattgagccagcactttttcacagcggtgggttatacaaagaataagtggatcttttttccaatggcgctctctctcgcacctcttcttgcaagtggtgtttggaaggctagtttttcagctttttggaggtttattttttaaaaaactgaagtccggtggaaaaccatctttgactaactgcagttgtggttttcttttgaattaaaaaacacagtcacacagatgccgtgcataacaacgaacatggaagcaaccaatctctcaaggtgaagtcccttcacaaaattaatgggggatgctatataccggaatcccgttcaaaaacgggacgattctaataccgatatgacatcgctctgagcaactgtcatccgccacctgcgtgcattgcagcaaaatgagaatgacgaccagcgcttgccaaacgccggcttccctgcatcttggagaaacctcctcggaagcgctcgcctccgcgcgcgattactcgcttcctcccgccagcgcgcgcgccatccaccggcttctccccatcatggcgaatcctcctagaaagcgcgcgattcctcgcttccttccaccgccgcgagcatcgtccatcagctcctctgcatcccggtgaaacctcatcggaatcgcgcgccattccttgcttctttccagcggcaccctcgccgtccgtcggctcttctgcttcctggtgaaacatcctcagaatcgtgttttgcaaggatatgatcttacaatcaaaatagtacaaggtttgacagagaaagcttgcatcaatgaacttgacaccagtgggaggacaacatgctgagaaggcccggtttaagaatcgaggtgataggcagtaaaaatctgtgaatgagagtaacaccatcaagacagtgagtatcttgactgctatcatggtgcctgcgggtttcattgatgatacattagtagaatcatgtgatacttgggaggtttcacgatccttctcggtatcatgaaacctgaaggtttcacgcatgatccctcgctaggtatatatcatcttgtgtgatacctgaaggtttcatacatgatacatcaaaagtatcattatgtgtgatacttatgatgtatcacatgatcctacttagatatcatgcatggtatcatggttcctacgggtttcacgtatgatacttgaggatgatcatgtgatacctaggaggtatcacatgatcatgtatcatgtatggtatcatgtatcatgatcctcctcagtatcatgtatggtattatcaggtttcactgatgataccttaggaggatcatatgatacgtgggaggtatcatgattctgctcagatatcatgtctggtatcatcaggtttcatagatgataccttagaaggatcatgtgatacgtgggaggtatcatgattcttctcagatatcatgtctggtatcatcaagtttcatagatgataccttagaaggatcatgtgatacatgagatgtatcatgattctgctcaatatcatgactggtatcatggctcctgtgggtttcacagattataactaagtacgatcatgtgatacttgggaagtgccatgatcctcctcggtatcatggctggtatttactccacaaaaagtctacacccatgtaatacacttcatttgttcatatatggggaaatgatatttgcttccgtcaacttccagatcaaatatatgtacatggagtggacatggataagttcatatcatttgattcgatcgatgtatcgtctgacactgcttagagcaagaaaatgaagaacctcctgttgatggagactgtcaaccaaagaaaacgcggtgggtgtcagcgtcggcgccaccaccacgctcacaccgctctcccgcactgacctcgtgtgcatcggcggtgacactgaagaggtggagctgccaccaccacgctcacgccgctctcccgcactgacctcgtgtgcatcggcggcgacactgaagaggtggagctgccgtcgtcggcggacgcgatgtcacaccccaatctgataccgccgtacaacggcacctgacaggagcgtgtcgtagggaaaacggcgtgaaccgcttcctacgaaaccgcgatctcggtaccagtcccaggacatagtgttggtacccacggtgacaaatatgaatcataggaatccttaaaatagatagaggatttatttaccttaacttaggttgcagctcagacagcccgagaatacaaccgacgacacggacgaggcgaacaccaacaacaacagcagcagcggaaccaacggtctaacacccaacaccacaggcgacggctgggaaccaggacgaaaccctaatcttcactttatcttctcttcagggcggaggaactatatatatatatttatatagagcaagggtgagtactttcgtactcagcaagtcacggaaacttaggtgtttaatgcaagcttggaagagaggcaaggttgtttagcaaatcttttatttgaagacattttgaaatcactaagtgatttatttcttcctaagtttgggctgaaaagagacttacgtctcgattcgactttaagggatgtttttcaacagctcatttagtaatgtaccgacctcccgagtcagatcattacttctcggctcccagagccattccacttgattaatcggctcccagagcctttttcattttctcggacttccagagtccagctgcccagcagcacaacaatccgcttccactcgggaagcctagtctatgatgcccgcagacatcccgaatcacacagattcgtttctgactactcaggtcgtccatctgccacataggctgattctggttacgattcccacaccacaacaacttttcacaaagcacaggcaaacaaatctacgcaacgggaaccacctcacatccgcccatgaccgtgggcacggctgttcgaacagttagttaacctctgcagaggggtacactttacccacaagacacgaacttactccagacactggccggtgtcagaggttcgcgacaaagcctttcccaagccaacccagggttacctcatgccatatagaaggatcaaatcctcacgtaagcataggccattttaggcattcacaaatcaactccaaccaccttgatcggtaagtgagcaagcttctcgtccttgccttaccaggaacccggtttgtccgacctcgccccggcgttcccaactattggcatgcgaggtttccctgaaccgactagttacctagccagggtgtcccattccaccttgtggttgcactttgattatgtttgatgagtttcccacaggaatcggtccttatatgcgaatacgggacagtgccacataggcacaacccccgcatcgtgagttttcacaattcattttattttcaaacacaccgacaccacatgtcgggttttgaaggcttcacaaacccatttcccaagttttcgacaaacaacggtgtatgtgggatatttggtatacgcgctcagagagcacgaataccgaggtaccacaagggtggagcgacaaggaatcagggtggtacaacctacaggaattagtgcgactactgggtaggtccgtcggtttggcatgcaaaccgaggccaagcaagttaaacgtgagtgattctaatgatgcaagttgcaaacaaaataataatgactttccaattataggagcaattgatcaaagggtgacttgccttgctcaaggtcttcacgaagcttcacgaatcttcgagaaaacccgcgatcgacgaaaatccgataaccgccactatacgcaaacaatcgaaaacctaaacaaaggaccaaaagaaagatcctatttagactaattagtagtgccattaaatagatctcaatttcacggaattactggaagtgaaacggagtcaatcggacgagcggttggggagatatgaattttggaagtttaattggagtttctggaataggagaaatggtttatggaatttatagaaataatattctcaagaatattattgacagtcactgtcatgcgggaccaaaggaaatgttttatggaattttggaatagggaattgatttatgggacaaaggaaaaaggatttatcaaatccctggaaaaagaaaaggatggagggatgttaattggacttgggccgagcgaaggggcgcggcccgaagagatgcgcgggcgcggccgaggcgagcgggccggcgcgtgggagggaggcggcccaaggccgaacgaggcgcggcccacgcgacgcaagccgatggacgcggtccaccgagtcgggcgcaaggcgggacccacaaggcgatgacacggctcacgcgagcggggtgcacgcaaggcggcgcgttggatcggtggaccgggagacctttgaccggtctccgcggggccgggcaggtagatgtggcgtcctcgtggacagccacgttggcacggcgagagaggaggccgggcggccaatccgacggctcacggcgtgtggcgagttccggcgagcggcggcgaaccggagtgggcggcgggcaccggaagtgagagggggtcaaggtgggatgattcaacggtgcggatgagggagaggcggcgacacggcggctgacgacggcggccgtgcggcggcgggatgggtggcacggcgcggccgcagtcagcgaggcgggcggccgcggtggcgcgccggggaggttcaagaggacacggggtgggtcacggcgcaaggaatcggcgagagaagggccgacggcggcagattgcggcggcggccttcgccggcggagagaaggggaaaatctcgccggggcaacgggagtccaattcaccggggaaggagcttctacacggctccgggaactcgtttcaagccacgggcggcgacgagctagcctagggagtcatggcgacagcgagcgacctccggggcagagcaagagcgcgtggcgagctatggcgagcggcggcgggcgcggcgcatcgcgcggcaggaggagtattatggtggggatctcaccaacgaagaggaagcagcgttggcgtcgcggtcggtgtcgcggcgaggtggtcgcgacgccgagacggcacggcaccgagagggcgcggccggggaagaagggagggagaggtggtgcccggagctcctcgtcacgcgtccacgcacgcaccggctcctccggtgctcggcaacggacggcaacggcgagagcgggacgagcagcaacaaggcggcgacggtggttcggcggcaatggcgcggtgggtgtgaggactgaggcgagtgaaaacgagagaggaaggggataggggtggcttggttttatagcggaggcgaggtcggtttggggaggggagaactgaccttggcggtcaagtgctcggctggcggtagcggcggtttcgtgggcggtgcgaaagcggcgacggtgtggatgtgttgagcggcgaaggcggtggatcgagcagcggaaatcgaaccgctggagcgcgggctggcgcggtcaaggagatgaggcgggtggcgcgagcggtcaagcggcgcagaggtggtgacgccggcagtggtcgggaaagggaaaaagaaagggaaaagggggcttggtcccttgccataatgaggagagggagagtgaggaggaggaggagagggagagcagctgcttctcccactcttggacgggtgcggcgtggagtggcgggggccaaggatgacgtcgacgatgacggcggcggtcggtttggcatggagcgggggcaaggcggcagcgcatggcgtcggcggcgaccggccggtcggccacctcgcgaggcgcgcgcgggaatgggcgaaggcggtggaggttttgggcggcgacggcgggaaatcggctaagcagcggtgcatagcgcggcgagaggggagagagaaaggaagcagagagagagcgaggaaagatagaggtagaagagaggcgatgcctctctctctcggcgcgtgcagcgcacgtgcggggggggggaggagatgatgggctgggaggggaaatgggccgggggaggaaaatcggtccatccaaaaatacagggaggtaaagtagacttttacagagaaaactgatttggatagaattggagagatttagggtttggattcgaattctattttgatattcgaactcgagggtttagggatgtatcaagggaaactcaaggagaagtcatggaaaggattcaaaaggaatacttgggtatttgttctcgggaacatagggtggagtcaaagaaaggattcgaggcgggatttgaataattctggattcgtagaagttggcgaggatttcaaaggaaggatttgaatttcagaatttgatttcagagactcgaatcggaaaaggaattttcgaggtggaggattttgattccgatgagagggaacaacgggattaaattgagatccctggcacaatttagactctcacacaaagaacggaaattttcgcaattaggattttgccgagttagtttttaatgactcacgaaaagcggagcgttacacgcgagcaggtgccgccgccggctccaccgccgcaaccgccgccgtcggcgccagcgagatctcacgcgccatgcccacggtgagagaactgtgagtgggggactcggataagcacaagaaacgttgtgtctctgttgagagcgggactcggataagctcgtgatgatttctggtgattcctagaaaatctgtcccgtcccgaccgtgcccaaacgggataccggtgtttagcatttccgaaattaattgatacttcctccgtcctataatatagtaacgattttgctatatatttgtcgacaaatttttccccaaaaatttgacagatgtaattataggacaatcgtaatgtaattacactgtaacttacatgtaattacactgtaactatagtgtaacttgtatttaactttcaaaaatctctccgtaacatgttatttcggtaaaatggagatcgtgggaacaaattctttcacacatgtgtgtgctatgatttgttttcttcctcaccaaaataaatcttgtaatagatctaacgattcaaaattatgtgaaacttacatatatgttacactgtagttacgtgtaagttacagtgtaattacatataagttacagtgtaattacactacgattgtactataattacatctgtcaaatttttggggaaaaatttgtcgacaaatatataggtagtccctatagtaatctaataccggataagacactttatagtacaatgaatttgaacatgcttcttgtctagattcgttgtattataaaatgtcacatccggtaataggttgctatattatactaggacggagggagtacactagtacttaccatttaatatagtattgtctgacatcaaagtctctttaattcatactgtcaaaaaatcttaaacactaggactaagctactgaattttaggctaaaccgctagtaaacaaactaggtgctataatatatataactacctactgccattaggcagcttatcattcgcacacattctcacaagccatacatacatagtactagcatgttggtgtgcgctaatgcagagatgtcaccatggacaacttcatctacatgtaacaaatggtgatcaccgatcaaagatttcagaaacttccatcacttgcaccccactccggcctcggcggctctccgcggcgtggagttcttccgccggctcccgtgttgccggaacccgttctgctgccgcgacgacgacggctcgccgccgtccttcctccggcgccgctcaatggcggaggcgctgttgctgttgctgttgtcggagccgcgcttcagctgccgccgcctcttcctccccgggttctgagctgcggccttggacgaccccgccttgctggcttgtggcgccgccgccgccgccgccgtcgtcttcgcggcgtcgtcgtcgatcttggcgatgtcgtcgtgttcttcctcctcctcctcctcctcggtcttggcgacgctgtcgtcgtcttcgtcctcgtcgtcgccggcggcgtggtcgtccttgaggtggtgatgcttctgttgttgtggccttcccctcctcttgtacgccgggatcacctcctcgccgccgccgccgctgctgctgccatcgtcggctttcgcagcttcggtggatttcctgcctttcccacccctcggccttcccatccaggcgaaccaaacaaacaggggatgaggtggtggtgatgtttaagttggtaactgcaaaataatatgataaacaaatcgaagttaggatatattttttctctctctacttatctgtaatatgtgtgctgctagtttcaactagtcacaactcacaaactcaaatagctgactagatttgcatctatgctcgtgtgaaagaatacgaagaactgattcttacagctaaaagctgcaagcctataagcatcacatgtttgaggcttgtggggtgaaagatttgagccagttattattacagtgggaaaagaagtttgtttgatggatacaaaaggagaaccaaccacagaaatactattggaagtttggaacaacctaacacaaaggcaagaaccatgtgaacagactcattcatgtcctgtaatcttctatccactgtctagaacttcaatccaaagtcataactacctcaagagcatgagcatcccgagtactaactaggtaagtagagattggaaatcagaagaacgatcaagaacaagaacaaaaatatgtactgacctgttatgatgtctggcaatccgaaaacttccctcgacaagccttttcctccgggattaataagagggtttcagtttgcagcaaagagatcttcagagactagctagctgagctattctacgattgctatcaggcaagaaccaccaaccaggacatgaacaagagagagagaaagaacagaggggattcagatatcaagaagaaggcggcgagatcgagtcgagagcttgagatcgtgcacaagactacacgagtttgtgcacacagaaaagagaggaaccaagagacagcaggaagaagaactggctacaccatttctgcagatagagagagagagagagagagactgtaaagagataggagaagtagaaaagatggagatgggagtttgcttgcttgcttggtttggctgccggtggtaacaacgtgcagcaggaatgtacggccctcaggtacagcaatagcacagtgaaagcatttctgatgctcgcttactttctttctttcttttttttttgggagtggaatctctgtttcaggttttttcctgttacaaccaggatgaaattcgtagagctccagtgtctggccctattaaactattgatgatttactgcgagatgtaataagagtacaagtgtgtgtacaatggcgagttctaacttatacagacacagaaattatgaaatgcaccccctggctcagtacatatgtacactgctgatacacctgctggtttcttgtttggtgaaagggcgagatcgatgaaacggtgaagaaacagtagctaaccctggcatcttaatttggtggtactagggatgaaaacggtcagaaacgatcggaaaacagcctcaaccatttccgtaaccatattttttctcggaaacgaaatcggaaacggtaaagtcagaaacgaaaacgatatcggaaatatcggaaaaccggaaacggaacaatacggacggaaacatgtcggtacagatcggaaaccggtaacaaatacggaaacattaaactataaaaacatatatttaactttacataagtatgttatatatatacataaattcaagcttatactatataaattataaattaacttcattttagccatgtacaaaagttagagattttattgaagagtcattcaatctataagctatgggtcaagtatagacatgtcctataatatcgacatatttagaatacggtaattaccatattataagaaacgataatttccgcgagaatacggtaaatacggaaacgatcggtataacagcaaaaccattttcattttcatttccatattttttaccattttcatttttgtttcggtcgattaccatttctatatagctcggccggtagaaagtcgaaaaccaacgtcggtcggccggtaattaccgttaccgttttcacccctaggtggtacacacccaccaaatgcatgtgccgtaagaagccagttaccatctctgcccgatggacgaatcgaatcggtgatggtttcgagcaatacctggtgctgctacaaaaccgggtttattgcatgtatcacagacctgtgggccaccttgtgcagccacacagaaacaccagtgtactgtgtaataatgcactggtgcaggtacactggctgtttgcaaattgcatgtagtggaacttatgctaattatgggccacttttttggctatttcttggtgattttctctgtgaatgatgtacagatgtgcagtgcagtgatacggtgtggttagttgatggtcctgcctgtcacggaagatgaaaatatcaacggaacgaaccacttctctccaacacccgaccaaacgcgattccctctcgcatgcgagtcaaagaaaaaaaaaaacgttctcttttggagagaaaaagggaagcggccggcaggcagcagcagcagcgaaggcgcgcaccgcaccaacgacgcatcatgcgatgctgctgctggtgctggtggtggtgcgacggtcgcgtccggcgcacggaaagacgccgccggtgggcggtggcttcctcctcactcactcgctgcgctgccgagcccatgccgcggcagcagcagatgcactcattcatttacgccgctgcctgcctgcctgccatcgtgacatgccaattgaaacatgctgcagcgagaggtacaggggcagcagcagcagcttcagcttcagctcgtgtgggtgtgggtgtgggcggcgctggctgctgtgacgtgctttccctttctcgcctccgttaggaacgatcggcagataaacgatgaataacaacagattaatcacataagatacgagatttaacatgaaaaaccattctaagataggaaagagagagccatggataccagccagcaaatcttcactatatcagatgagattacaacgttgaacggcgacttacaatatatatatatatatataaaggtaaaacctctaaaagtatgacgatacatactgccgtgtgaaaatgaatttggatcctgactcaacagcctcgcagaagatatcgagaacgtacgtacgagtctacgtaggtacagcgaccgagcgagcgcgagtggcgagcaaagcaggcaagcggcagcgttggtggtgttggtggtggtggtgtgtctgcctgcctgccgcgtctgctggcgccgggccggccgacagcctcgtgccaacgcctgcagacgcgctcgtcgcgcgatcgccgattcgctttcccggtttcaaaccaaccatcatacgcgcgcgcgcgcgtacgtacgcgtacgtgaagtggtgtgggtttgctgctgctgctgctgcggcagcgcgtggccgcgcgcgcccgtgttcgaacagtggaggaggaggggagggctccaatgatctgtcagtttggtcggcacgacgacagtggggagaggaggggaaatcacggaggagctagctaatctctcgtctcgtttcttttgcagtcgtcgtcgtcacggtcacatgcggatgcaggggggggggggggggggtgaagtgaaaggaaggacaggatcacaggaatttactgggggatgattcatgaagcccatgaggagggtccgacaaagctgaaagggcattgggcttccggcctacaatgtccccatgggcctacatgtaggggaaccacgttccttttcatttttatggtatactcctatcttttaaacacagttttttttggcaaaattttataaactatcacaattatcactctagtttgaattttttttctttgaagcagatctcttgtgtttaggcgatccatgaagagtagccagagaaatacttcaagttttgcagtacatttactctttcagatgtgtgtcattggtatttctggctgtagatgagcgaagaggagggaacggaccttctttgatatttttttcgtattgctccaattgtatacccattgatcgtgattgctggttagagaggtgttcggtatgatgcaatgtaactcagaccactaatgtgcagcatgagttgagagagggaggtgaaagagctcagatatgtcgtgtgagttaaagagtgcagacatgtcgtcttcttttgcaaaatagaataagatttgaaattgatcttgtggaatatgtccatgccatttgtttttccaaagtgtatcttttacaagcaagaggctaaaacctataattatgtgataagggagatactcaatctatagtttcgtgagataagtttgttttgtgatagatttgtgcaaaatacatgtaattttatgaaatttattctttttatgattacatttgaaagtttcttttaaaagaatttatggtagctttataagatagtcgcatagtttttgagagagaccaaaagggagatatttaactatttatcactcctacaagtggcaattaataatttgtcactggattcacatgttataggcatataggaacccacatttcataaactatgaatggcaaattcttaattgccagtttgccacatcttaaaagtggtaaaaagttaaatgccccaccgaaagagcctccgcgttggggtgagtctactatgtaagtattcgcggacgacgaacggtttcaacagccacgtttgggctttcctatcctaattgatcattccaaaaagggacatttaacttcttgccgcttttaagatgtagcaattaattatttgtcactcactgtctatgatatgtgagccctcatgtgtctatgacatgtggatccagtggtaaataatttagcaccaagtggcaaatagttaattattcttccaaaagcacagaaacaaaagcagtcgacaagttcagatataacaacagccagtcagcaatggacgtacaatgcctgtcacactgtgtagatcgagctctaccatctctctgactctctactctctaaactctacaggccgccgtcgcagcagggaggcagcggggcaccacacaggcacctgttgcgagcgtagcaatccgcaccgtgcgccgccatgaacctccccgccggaatctcgccgcagagctcgttgtcgctgacgttgaggtgctccagcctgacgtccatcagcgacttggccaccttcccggtgatccggttgtggctgaggtcgaggtacctgaggtggtgcgggaacctcaccccggtcatgtcgaacgccagctcgttccacgacaggtcgatcttggccgccggcgccgcgatcccgaacaggtgcggcgacgggtcgccggtgaggcggttgtgcgagaggtcgacggtgtccacgtcgccgtagcagcgcggtatctcgccggtgagctggttgtgggagaggatcaagaacctgaagctgccgtgcaccagccccggcgggatggcgccggtgaggaagttgccgctgaggtcgaggtaccggaggttggggtggtcgccggcgagggacggcgggatcggcccggcgagcctgctgtcggcgatgacgagggtacggaggttggtggcgccggcgaggtaggacgccggcaccgggccggagatggaggtgccggtgatgtcgaggtcctcgagcagcgagaggttggcgaaggagggcgggatgggccccgacatgccccggacggacgcgatctggaggacggcgagccccgtcagctcgccgagcgccggcggcacgggcgcggcgacgccggcgagggagaagagcgccagcccggtgacgcggccgggctcgccggagcagaacacggcgggctcccacgcgcagcagttggtcgacggccgccacgacgacagcctgacggggtcgcccagctgcgccttcaccctcagcagcgcggcgcggtcgtcgccgttgcactccaccgccgacgagacggcggtgcaggcggacaggacgacgacgacgaggcagagcagtggaatccacgacgaggctactactgttgcattggccattttcttgggtttttagggttttttttggcagcaatgcaagctactgtgatgatctgcactgaacttgaccacctgcatatatctatagaaatcgccatgaaattcgtgtgctagcttctgcatcagattctcgtttattcacttcatgtaaaggacgttcttgtgttctgcattcaacatgcatgtgttagcagcaataaaaccgctcaaatccgtgcaggattctgcagagattgcctcaacatgtgcctcaaggtacacaaaccagaattcagttagcgatcagttactgccatccagagatcaattggattcatcagataataagcagtgcaagaacaaaattcttttctcaataagatacagattttggtggtgtttaaaacttatgtaggtgagatgaagatgaagattaagtgttatacacaaaatgaggtggatctcacccaatccaaatgtgggtgagatcgaaaaggccaagaaactttcgcaagtgagttggcttgtctgttgttatgcagttttctacagaattatgtatgatggagaaaagctccttatagatatccttcgtctgagagttgtgaggtcaaatggttgtccttgtaggaccaggagcagtcattactcgatgctatagccagacttgacgatgcatcagatagtgaaagtggtaagttactggcagactctacttgcactgttaacagtatctttgaagggtgatgagtattagccacattagtatatttggttttataatgcacaaccaaataattagaaagagtgaaacctggaacttcaaattctgcccaaacattgagaaattttggatgtgactcagtatgttttgatcgaaaatttgtcagtctttcgtagtactggccacccacttgtgtcgtccttgtctgatgcctcaaatttgttacagctatcaactattattctaactagtcattgtatatgacagaagatatggctgtcggggcccaaatggtttctgctggtgatcacatgggcaggaacggcgttgcttgttggtaacaactggcaaagtgttggattttgaagattgtgtttgtgaagcgcctgtgtagatcaccggtcaaaggaaaatcatcgatggggcattggcaatttggcatgccaaaagtggatgtactgaacatgtccctgatagggcctcttctttaggctgcgaaaagttcaggtcacaaggcgcagagcgcttttccttcggtgataacggtggctgtatttgccccctaacagacttgaaggaactctaatctgactattaacattccaaaactgttaaaccctttgccaccatctccaatcttcttgtctctctagtgcaggatttgtaaactccacctgaatgcaacgtgaaaacgaagactgtatcttgctttccagtgatcaggttgtgataggtaaacaactatagagaccatatttaatgcttagggcacatgaatgcggggatagctcagttgggagagcgtcagactgaagatctgaaggtcgcgtgttcgatccacgctcaccgcatttaactttcttttccttttcagcattgcattttttttctttcttttccttttcagcattgcattttcttttctgcattgtgcatagaactttcttttccttttcagcgttgcatttttttttctgaattgtgttctttgaatgcaccatttatttttttttccttctcttttcctctcatcttgatttcaacgttgcattttttttaactgcattcattcaatgcaccattttgtgtttttccttctctcatttaaagaaggataacgaattgcattctcaaggtgtgaatatattctcctttataagataactaaaaattatcttccagtaataaataaaaaaagtaggtcgactttcacaccaacaaaaccgttagcctactcccatccctgcgtgggcgcagttgtccccgatcccctcccgcgaacagtaacaccttcggagagcgggcacgcctaacttgtggagagctgagaagcatggggttatggatttcaattttaaatttcttcatagggtaactgttggagccgatctttaaaaaaatttctaaaatttagcaccttgagattgatggagtgggagggagcaaccatgactaaactcgtagagagcgagaaatatgaatgtggttgtggatttcaattttgggcatacggaactgttgaagccgatttgtttttctttcaaaaaaaaaacccaaaattttgagattgagaagggaataaaccaaacgatgtgagagtgagaccctggtgatgggtaacgatcaattcaaaccatcaatttgtaagtgatcaatggtgttgcttcaaacacatggtgatggggaacgacaaattcaaacagcaatttgcaagtgatcaatggtgttgctacaaagacagacgatcagttagtcgactacggaatgcaatacattagcctccaaatgctgcagacgcaaaactacgtaatttactcataccttgaactatccacctttgctacttgctacaggtcacatctgttctactagcttacactacactgcccccaaattggcaaatttctacctcctcccaccccgcttcgccgccgtcgccgtcgccgccgtcttctccgaccggttcaccttggccctcttcgacggcggcggcgtcgttgcggcggcggcacctcgcttcgacggtggccgccccacgcttctcttcggcgtggcgctcttgccgcccttcttggagccgccgcggccggcatccttcctgccgggccccttacgcgtcttctgcggctgctccggcgacgtcgccgccgcagcacgcttccgtgtccccattggtgagcctttcttcttcttcttcgacggcgacgagccctggtttagccgtttgaggaagtccacggcgttccgcttcttggcgggcgtggctgcgtcggcggcgatcttcttgtcgggcttcttgcttccgtcggtcgctgcctccgtcgcttccgagagcttggccattttccggccaccgacgctggccgagttcttgccggggccgcggcctttcttcgtcctcaacccccacgccttgtccttgctcgctgacgccgacacggagaccttcttctcgccgtcgtcgctcccctccccttcctcggcggcctcacccttctccgcgctctcctccttcttcgccgccgccgcggccttcgcgatggagctccgcttccggcaaacgatgagcggcttccctcccttctcgatcagcgacccgacgatgccagcgccgccgccgccgccgccgacggagacgacgccctcagctctccgcgtatcctcagccggaggggacccggccgccgccgccaccgcggcggcggcggcggtgccaggctcctgcttcggctcgcggaggcggagcgacgcggacacaagcgcgcgggcctccgcggcggcgccgcgctccggcccggcgcgcgggaagaagacgagcgcgttggcgcagagcagcaggaggtcgcggtagaactcggcggcggcggcgccgccgccgccgccaccggccggcgacgcgtccagcctccgccgcaccatctcgatgtccacgtggcgcctgatcgcgccacggtacgcgtcgctctcctgcaagtggattttaaaaaaaatgaaaaaaaagaaaaagaaaaaggaaaaaaaaaggagaaaatatctgtgggggcatctggctggaaggcaccccacccgcccaactgattgctacgctgcacccaaccaaccacgcagaatgattcaaaccaaaaatcgaacaaaaaactaggaactttcaaattcaccatgagctaatccgatttgaaactttcgcgttcgttcgaaggacacaaaaaatatgaggtgtgcacatgcgtctcacctacctaccacacaacaaaccaacccgaattcataagcaagcgatgacgcacacgaatttttctggtcacgtaattcggattagtgctagtgctatgtcatcatgccacatgcgtggccctaatctaatccataataatctagaggacccccgttaattacggatgggtcccaccctctgacatatcgtttgaaattcccctctttacccctcccctaacttttgaccggcggcggtaaaaaacaaagggtaaaaagggtaaattgtaaatgagcggtaaaattcatttttacctggctttcgtgcagccgctcgagcaggggaccgaacctggcggcgaacgtgtcgagcagcgcggcgagcggctgcgacgacgacgacgacgacggcgactgcgagggcggccgcagcgcggaggcctcctcgccgtcggcgtcctcgtcggcgccgggcttgtagcggcggcggcggcgcaggctggccgagctccgcaggtcgctgctctccttcgacgcggccaccgactcgccggaggcctgctgcttcgccgccgccgcgtcctcgtcttcctcctccgccttgacgctatggtcaccggcgcgcgccgcgggtttcagatctgtggaattggactccctgcacgaccggccgggctcctcgctcgacagccgctcgtcgccgttcgccgtctccggcttcccctcgccgccgccgccgccgtggatgctttgttctctctcctctctcagccgcttcactttcgtctgtagcgttctgagacatgaaaataataataataaaatagttatttatttatttaataagaattcaataattggagaccgagagatcagcatcagacggctcatgaaacgcgcggtttagaggctttttgaaagagaatttggtgattagattttttttttcttctggtgttttagtgttttttacccgatggagagatcgcatcgctcgacctcgcggcggagctcggcgacgcggaggcggcggagctcgtccatccacccgtccgcggcggaggcgtcggggccaccctcctccgcctcctcgtcgtcgtcgtcctcctccgccgccccgccgacggagaagcggcggtggaggtggcggaaccggaggcggcagctggtgggcgtgaggcccgggcgcgcggcgagggggctccgcgtctgcacctccatggcgacggagtcccagctccccgtgccgtgcctgctcacggcgcaggccaagagcagctcctccaacgtcccccagatctcacctccacctcctcctcccgccgccgccgccgccgccggagacacgtcggggccgtccgatccgtccgccatgtgctctcgtcgtcggcggctgcttcccccctttttcttctctctcgctcgcgcacgcttctttgttcgatttttatctcggagagatggatgggatggatagatagcctctgcctctgtgattcgagcgcgcggcggcctcgcgcacccaaaagacaatttcgcgtttctcaggggggtgttttggagaaggcgagcgtgctgttttcaaactggggcccaccttctgcctttctttttattgtacgatccccatattgcccctgattgcgcatactattatcccgtactatatatgagacgcaaatgtcgcaacaaaccgtgtttatttgttaggccttgttccattaatccctataagtaagggattagaggagatttatttcacatctattgtggcgtgaaattattctccctcaatctcctacaatcctattcaatcccctctaaattgaacaaggccttataggagaaaattcttgctctaattccaaaccgcaaatttgatacgcagtactctctctataaaaaaaaactcagcatatccagatttgttgtactataattccatcccaaaataaactcgttatgtacaaattcgttatactaggatatatctctatatccaattcgttgtaatatgtccaattctagtacgaggtttattattattttttttacagagggagtaagttttttttagaaaaaaattgattcacagtaaacgtgtaaacgatctaagcaaagtcagaccgtgcactttctttcttttttgacacggacggcaacaaaatgcttgatcctgaaggtgcatgatcctataaagtatgccaagaattcatcaggatgcggattagcccgtgagctgacacgtgggatctgaataattttggcccggattatcggctgcgttggattggtacgggtgaactgtttgactgggcctccttgatgattcgccaatgaacctgtccttgcttccgtgctgaacccgtgtcttcactgtgcggttacaagaaaaagatttgaacgaacagggcatgccactcgtcagaattcatagtttcaaactagtattccctaaattctcaaattcattcatgccgaatgcaaaagctggcactctgtttatcatcaattttttgtttaggaactttgatcaaaggtacaagcacagagataatgatcatatggattgaaattgtaataaggatgatctggaaaactaaagcgtttcatacatctcaatggagctgaaacttcaactaacaaaagagcgagtttatacatggcgaattggagataaataatactactagtagcagtctagcacaagcaacggcctggaaaataaggcgagattattacatcaccttatgagaattccatttgcttccctggggaagcaaactgcacctaccaaatgtattattgagcgcaaaattttaaccaagcagccatgtcaagttgcagtattgcagggggttgcaatttcagcaaattctgatacttcttcacttccggcgagcctccagtgccttcttcaactcctcgctcgcctcattcgacaccggcttcggtccactgtccaccatctccttgccgttcccgtggcgatctggcttcgccaggaatggttgtggtggtggtggtgccagggacgacggcatccttcgggcgtcgcctttaccgggcattgaggcggctctatttccaccgatctcggcacgcaggtcctccacggtacgccgcagcatgatgctctctgcattgagcacctcgagctgcctcttgacgagcgagaacccttcagtctgaaattccggcgcatccttcttcttccccttgtcggcatcggaatgtggaggattccgcagcgtgtgctcaattgtgatcttgttcatgaccagcagcggcaacttgttgatggccaggttacccgccttgcggccgtacccgtcgtcggcgagggcggccttcagctcgggcggcacgcgcagcccccactggaaccgcaggctcgccttgctccacagcggcagcacgctcctggtcgtgaggcgcatcccggacagcagcgcgccgaccccgccgccgctcttccccgcggcggccacgttcgcggcgaacccgttcccgctgaacgagaacgccctgtggtcgtcgccgccgttggcgaggtcggtcagcttgtgcgacggcggcggcggcggcagcggcggggccggggacgcggacgcgggcggggagatgacggagttggcgagcgagaagtcgccgatgcggggcttgaagaggagggagaaggccggcgggctggaggagaggaggttgaactcggcggatatggcgaacggcgcgcgggcgggggacccgagcgggccgaggccggtacggacggagagcgcgaagggctggagcgggtcgttggggcggtacgagaggcggagcgccgggccggaggcgaaggcggtggagaggtcgaagcggagatcccgcgagtcgccgccgccgccggccgagacgccggtgaggaacggcagcccgaggacgccgacgggcaccttggcgcgcaccagcggccggtcgtcgtcccggaacttgatcgacgccttcatggccggccacctagggttagggtttggtcgatgggggaattcgccggatttggtgaggttgcgggaggatagcggcagtggaggtggggaattttgaagtgcggaggtgagggatttgggggatggggcggaggtcgtcacgccatttcggaggagggggcgtcggcggcgggattgaattgtggggaggaagcggaaatggaagggggacggaattgggttggatggctctctagctggatggaccgtttttactctccttccttactccctttcctacctgtaataagtttatttttagctcctatgtttatttaaaataaatttatttttaaagcaattattgctctttacatttatttaaaataaacttattttaaagtaattattgttcgttacatttatttcaaaataaatttatttttaaaataactattgcattggagtttaggaaagtatgaagttattaaaattgaaaataggtaaaatgagaacatgttgtattgggatttgataaaattgactgcccaaactactcactctagtgcaggtttattataatataattcgtccgtttcatataagggtttttatgtttgtttaagttaaactattttaagtttgattaaatttagaaaataacaataatatttatgttattaaatgaaaataattattgtgaaatatatttcataatttacttttttatatagcatatgataatatttttctcaacaaaacctggtagcacttataatagtttgatttataaaaagagaaaatccaagaaatgttagtgataagcacccaatttcaagaaaatgtaatcgataagtatgagttctgtaaaatatcattgtataagcgacttttctcagaaatgtcatcgtcgaccatccgcgttgttaaatacatcattcatcctatagcacttaacggagggctaccaacggaatcctaatgatgatggtatttatagaacaagttgtttgtacgatgacatttcatgacactcacactcgtcgatatcatttcttgaaattgaatgattgtcaatgacatttcttagacttttttttctatgaaaaagatatagaatcttttatattttagaaacatatatgttcataatccaccgtttgcgaagcaaattcttgttttctcagaagattattttcgtaataatccacatgtgcataagttaattgtttagtttgttgttttggactctaccgtgcacatcaccaccttcttagttcgtgagtacatccctccatgatggtctaagaaagcctaatgacaggtccagtcattaattcctgatatggcctttaggcccaaaattgtactctcaaatagtcaaatctaaatctcattattatttttttccctataaaccatccatttttcaaaccttggccatccaactgaattttttttcttgggtgaaaaactgaaaatgcattacacggtgcagtcaaaactggcctaacatcctccaggaaatcaatcctaaacaaattatccaattgctaagcataagctacatttacaaagggatcaacaattcagagttcaaattatccaattgctaagcataagctacagttacagagggatcaacaattcagagttcactgggcatggcacgatcgcggcgtgcctgcacgccgccaacgacgacgacgccaccgccgccgccgccgccccggcgctccagaccacgccctcctccgccttccacaccccgtcgtcgaagttgcgcgcgtagctgtccgagtcgtactcgtacctcgccggcgcggcgagcctcctcctcgctgcgcgccgccgccgccccgccgcgcagtacagccccgcggccgccgcccgcctcaccgccgcccaccacgccctcgccgcggcggcggccgccgccaccgccaccgccaccgccaccgccgtgccgtcccctcctcctcgccgccggctctcgcacgccgtcagcctccggtacgcgatcgcacccatctccaaaaacgcgcctctcctcttccgactcgtgcgcgcgtgttttccattttataaactcttcacatcatcataaatgtgtttttccggaccagctggcatgtgggacccacccgtcggggaggaggacctgttcggtgctactccagctgccaggtgggtccaccaccagaggcagtttaataattttattgtgagctctaatccgtgttagtactactgctaaaacaaaagatttgggttgagtttagttcacatcaaaattagaagtttggttaaaattagaacgatgtgatggaaaagttaaaagtttatgcgtgtagaaaaattttgacgtgatgaaaaagttgaaagtttgaataattattttggaactaaacacggcgttgttatccgagatgggaggcatattggcattgtttccggatgcgtataatcaagctgggaaagagcagaagtacaggctgtttgattgcatttggtgacctgatcaaatcaaacctattagtgtgccagttgctgggcttgatctttgttaggaacaaaaaaggctgggagatgaataataataataataataataataatatagtatcagaacaagttcttccaaatcattggttatgaacggcaatgctttggatttcagaagttggcatctggtaatgaggggccatgacagcttcttaacagcagccaggattccagactacagagtgctggaataccgacacagtatcacaagactagttctatgttctggccaattagacaattagtacccataaacggatatatagctgctctaattggcaatcacctgttaacaacatagtagctgggatttagtagtaggcatcaactggcaaagcaagcttccatgatcttaacctgattgcagctgttaagggaactacccccaaaatgcatacaaatatgaaagtatgaaaggcatgtagccaaactactatggatattttactgagtttacgcacgtttcagaattccctgtacaaaagaatccaatttgaaacaaaataaggttttaccattaccatgaatctgtcttacacaactacttctcgatgcctaagttcatatctcatttctttgccttagagaaacgaaggcacctgtacttttcaccgctaacagtgatctcgagggcaccgtcttggttgtcctgattcgaagcagtgcccatgagcacgctcttttccttctctaagttctccttttccatcttcagccttgcctcttgccgcgcaatctcagcctgtgaaacatgcaattggatcaagtcatgctgcaggtcaagcatagttcactctatctgtcaaaacaagtttgtcatttcatttgcgaataaataaatatgagtaaaatcatcaagcatagttcactcttatatgtgaaaacaagtttgttcaagcttcaaaccatctgaaagaggaatgtgttctcaacttattatttctactaatctggcaaagatataatggtaacaggtcactctgcactaatacagggtccaaaatcactcggcatgacaaattgacaattaaccagaatggaaccaagtgattgttttggataggcaagaatcaagtgactgggagtttaaatttcccctatcaaataggattaccttattacagtcagaacaacaacatttaacaaatctcttaaccaacaacatagccttccatacgcaaaacatttatccaaatgaattaagatcagaatccgccaacacagccatattgcttatatctcaatagtagtctctgaatggaactatgaaaggattcagccatttttgggacttgctgacacaccataatcgatggacaggaggagggtaacatactgactactgagacaaaacgacatgataataggaacgccaacaaaacatgtaaagaagaaacaagccaaaatgtatgcaataaacttcggttgacataatataattcatgtaactgtacatgtcatgtgatgaagcaggtatgactattgaggaaagatcccaaatgtaccacgaactaacccacaggtctagattatctaggaaagattttgttctctcacaacatgattcaaacctattcatccttaaaaattgaaaccttgagaaggtattcataaataatacggcaatcctactcatacactctagtctacatatgcatattcttcacatttggcagcagttccaccaaatgaaattcttcaccattagcagtgtagtcagattcctatcggcataggagctaaactactgaaaaaaaaaatctaataaggcattacatccttgtccgcttagttgtttgacttgtttttaagccaaaaactgagaaaagaaaaaaaaacaaagaagaaagaacaggggcggatttggagtgatgggggaagcaaaggaaggggatcatcaacatcagatcatcaccgacctcgcggcgggagagctcggccttccaggcggcctcccgctcggcgacctcgcgctcccgctcctggatgtagctctgcatctcccgctccttcatgacgcgatcctggatgtccgcgtccagcgcctcctgcagctccttcacgaacctgtccaccaccgccttgatccgcaccgacatctccctcccccgcacttcgccgcctcgccgccgctggcgccggactccggcggctgggctagggctccgatgcggccgcggcgcggcgaaattttcgtgggccgctcgtttcgtcgtgggagagagcccagcctctgctgagtcagcaactctcctgggtccgtacgctttcgactgcgaaagcccgcagaaaacgtattccagaaaaccgtaatcatcaagtgaacacgtactctttgtaaacttgcaacaagccagcaggatgaaaacggttgggaaaacatcttcgtccttcgaccattttagtaaccatacttttctcggaaacagaaatggtttagaaaaatagaaaatatcaaaaaatcaaaatcacatatttaatttaacatggctatataatataaccacataaattcatttctatttttaccattttcattttcctttttcttttaccgtttccgacggtttggtaggtacaaataagaaacgggctttagtcggtcggttgagaattttcgtgactattttcatcctacctatgacctcctttgaaaattttcatttttgaggattttggtagaaattgagctaatttctaatgttccaaagaatccaaagtatcagcatctgagatgcggcataaaagagatgcctcttctgttggcatgtccttgccaaccgaaaacacatgatctcccaacttcacagacagtcacacaatgcaagacatacagtgacaaatgggttagcatcagcaacagagaaaaatgaaaaatgtgcagaacatttttcagcttcacacagagagagcataccagaaggtaaaagaactgagccacaagctaaccgcaacatgccaacatagttacatagaagcaatgagctttttcatcggtgtctggaagataaaaaaacaatttaaccacctaaataacacattgagtctagtctccaatagtaacagcacctacaccagaagagctagctagagatgcaacggctacagttttcttccctgattcaggttcagacattacactagataggggggctagttaggatccatggcgtcgcaccggagtacctcgagtaccaccgccacgacatttcctttcgcaagttctacggcggtcagacgggaccaaggtctggtcactgatgatgatgaggaggaggagctcacttccaggataagctgggtagccctggctggccatggttgctggccgtgacaccttggttcagcgggctccccgggccgcccgatgattcactcaatgtgccccttgatggcgggctgcttggccccgtcccgctcatcggcaccatctttagcggtgcagacattgggtctgaaggagcatgcagctttggcccctttttcccttcggtgttgaagcttcccaccacaatctgtggacacaggaatggtaattgttcattatacatagtgtgtaacacataattgttcattctgtagtagtgtgtcacacactttagaagatagaacaacctgacataagctacagcttcaaaagtaaatattctataaaaaatccaaagatgtccacctagcatcattcagataatatttccttttcgaaaactacatgaaagccaaaaaacttcaaaggaagtccaagacaatgaatgaatttcagcaaaccatatactatagtagttagtaaaaatagacaagatcataaaactataactaacaaacttacatacagagagattttctagaagtttatggttgatgtaagggggaatacctgcactggtgaagcagctgtcagaagtccagcaactccaccacccaagacgcgaccatcagggcctgctagagaaacactgagcccaccagttcgactacgatggcctccattctctgatagaaggaatgaaccggacagcgacagtatctcaaatcgtccctgttcacagaaaataagaaggtttcctggtttattcttcaacggaggaataagaatttccactgtggtaattctacacaaacctaaaactcgagctagataattcattaacacccacagttttaccatatacaaactcttgtattagtatttacagcttatgcagtggttgcatttgatgttgaaaatagattttctcgatatcttctgacggtcagaagcacatacctcgtatgttactgttccaccggaagtagcagcttgccgaagtgtcacatttgatatggcgccgtttgctgacagaacgcatactccacgagttccatgctgggagaatgacatgatctttgcagatacatcctgaaatgtagaattcaagtcatttccaattagaagactgtccatatttgatttctgcacccttatccttgtatctacacacaaccaaaacttgccaagtgcttctatagcatataatcttgtgatatgtaaagtacaataactaagataatgggtactgtagttaaaaaaaatctgaagatctcacaagatagaattccattcatacaccatgcataaagacacagctcacccgtagaaatgtaaaatggaactatgttagcatgagaccatatttttttcacacatttaattggaattaatagctacaagataaaaaaatgcccaggtgttagtatgtgctcaagtgacaataaaaaccagtaatctgatcaagacagcaacacaatcaacaacaaccaaatgtcctatgttgcatccaaaagcaagtagatggatgaaaagaaaaaaacagaaagcaaagactgaacattgctttacctctccagctttaacaaaaataacatgaggtgtgaatccagctcctgctgaccctgcaaattgcaattcaaccaataatgatcaaacacatttactgacctcgaaaagaagtgaaaaagacacattccaaaacaccagtcataaaaatcatagttcagtaatgtaacagctaaagagtaaccacgaagtggcacaaaaattactgaaaaaataaaaccaaactttcctattcaaattttgcactaaagaagggttcccttccatgctagaaacaaaagaaaaggtttcctaaccacttaaccaataatctgcatacagtaaatcatctcagatctagtaaaaacagccagcaaaacctgagcaagtgcagagttaagtactcctgacagtaactttttatcctctaaacaaacaataacaaaatgaaaaaccaaatgagtttcctctaaaacttcatctcctcttcttgaacataacaaaataacaaaaaatttagcaaaaaatggaatagtattataggtttagagatatagtgatataccgatatctccaattccgaaagagggcacgtgcttcttgttcgtggagccctttggccgccccctcttcttcgcccccggcggcggcgccgacgacacggcgtccggcgacttcgcggcagccgccggcgagaaaggcccggaggccgccaccgccgcggtggacacgggcaccaatgccagcgacatggagccgtcggggccgtacttccttggccggccacgcttcttcttgaccaccggctcgccggcgtcgagagccgccgcgccattgcctcctgcgggcgggtacgtcgccgccggggccggggccggggcggagttcaccggagcgaagatgggcgtgccgtccgccgtgtacgccatgcgcacgctctgcatgccgccggacgacggcggcggcggcgcaggcgccgccgccggcgggctcttgggcagcacgaacggctcccttcctcccgccatctccgacgacgccctcacctgagtcacctccatcattcccacaccttctctcgcagaagctcagctcagcagctcactcagctcagtgatttcttggaccgaaatttcaaggcgagctgaggaagaagacgagagctgcaaaaaccaccataaaccccgcgctgctcaaagctgtggaacaatttttttttcaacgattttacagcggaaggatggtgatttcttggaatgggtgagaaggaagctcaaatgaggggagaaaatggaaaagaaaatcggaggaagaaatggtaaacccacaatttcccaaataaaaacggaaaaatagctggaaggagttttaaaatccaaggtttaatttggttcggatttagcaagtgagcactgaaacacagatcccagctcgagcaaagtaagcagccaaaaattaccaagaaattaccaggaaattagggacactagcgagtacttaagaacaaaccgcaagaaaataatctgaacaaaaaaaaaaaggctagagcaaagcttgcaaagccttatgcggaaagatggaagctcaagagcactcgcagaaactcactcaaaacaactcgcgaggagaggagagaaaatttagggatttcgcttgtctcctacgtaaattcccctaactcgcccgcctctccaatttttctctctccgttttttttttccttctctttcttttcctttttcttaacgcccctactagcacgtaatctttggggaacaaaaaagaaaaggttttataatttgggaaataaaaaatgagcaggtgaggtgaagcacgtcaggattgcattggtaaagggtctaccttatttgaccccaggggactttattttatttactttgtgtccttcctttgctcttggctttatctgcttatgtatttcttcttcttttttttatcttcctcttttgttctgtttgtttttcactgtgctcatggacctaaccaaaaccatttccaatctgcccacaaactccagccaagcacatgccaactgtcttgcaacatctcataaaacaaaagagcatgccttttgaagttttgttttgaacagattcatattgaggtgaaaaacatgataagttgatgttttaaactggtatgtcattacatgtaaatatatatgccttcacatgtacactttgtatgcttgtaaaaatacaggaggtaatatttaatattttttaccatcacatgatttaatatttttatcatttaattataaatcatatggcatgaaaaagtcacgactatgagaaaaaaaatccaagaatactaatgatgacaatgaaatagggagcagtagtcgcacatatcctccttagaaaccactatatctcgtccttagatcctatgaaaataattgtaaaacatagataattctaacatcgttgttgaccagcagagttatgataaaaacatggttataacaacaagatacaataatattatatagtggtgagataagagatacctagaaaagtctataaatattgtattagtgatttctccgtaacatcccctgcaaagtgaaccacaggtttctatgacactacaaagtagatatgtagtaacatagattgaaatggaatttgctgggagagatgaagaatgtgggtggaatggtgaagtaatatagtgggatgcgaatggttatatatcatttgaatctttcagtttgttgatttacataaccaaagaaggaagctcttaacccataagctttgtaccaatcggatatgtgcaaccgttacgtattcacatattttttattaccctctccctatttcaaaatagcagtatgtgaatggatatatgccatatgaacgtttcgattttatcgattcaccaaagaaggaagctcataacccgttatttgtaccaaccaaatgtgtctagccattacgcattcatgtgttttagtaactgctctatgtttcaaaatagtaggatgtgaatagctaaaaatcatttgaaaacttaaaatgattttcgctcattaggcattacacattcatatgctcattaggcattcgcttttctgagcatccgctctcgatttcaaaattaaaacagaaaaaaaaatcgtgtggccaatacattttgttttccaaaaaaatattaaagtgaaaccatcggagtctgtaattgtatgaactggacaaggcacttgagattcctacaaacgcaccaattctttttattttggaaaagttgttgtgacataataaatctgtaatttgtaaaatcaatactcttcaaattaaagaagatgaatcaccaaccaagttatgcagtcctaaaaacatcattgatgtagtttcctcctcacacataacataatcatagtgtgtagaccacaaagaccattccagtaacgaatttacaaggaaattctagcctgagccattctagtattttgctaggtgacacaaaaaaagaaaaaagaaagaaaaagtcggcaccacaaccctggaccaggtcaacaaatccggatttaatttttgatgaagaaacgaaatcgaaataggacacggcatcattaagtcgagcacttttattcccctaaagatccaaacacaagcagtaccaattgctaggcatggcccatttttgcacccaaaatttctagcttttcttgtcccatgcaatgctccatcttcacggcaaagtaaatggagtatatttacatgaattttctcatgtccatgatgctttgaaataattgcagtcactagaggaataataattatttggaattaccaaaaagaaaaagaaagaggagggcctaagcaggagagattgagtgcctgctaagaattagcctgcaaatcgaataaagttctgcactttatttataccaccactctttatcaaacttgtccaccacgtgtcgtttgcatcgtccttatcgccgtctgtagattttttcattctaaaaactttaatttgtttactgtttgatactatcttcctcttaatataaaaagttttagagttaaaaacgattattaagaaagtagccaaaggccgtgtttagttcacccctaagtacctccaacttccaattttacacacaaccaaagttaaataggaagatgtgattggttaaaaagggtaggagaaaaaaatgaatggtgaataattataattggttgagaaataaatattggtgaagaaattattatattttaggataaattttaagtgctagaaattattatattttggaggcggaggaagtaactatttaatccctgtttgacgccttgacgttgtgagatgggctgttattgttgttgcatatatatatatattgccgtccaagctctagactgatcccataatacagatgtgctatgctgagaaatcgcaatttaggtactggtttggattatcacaccagtctgacatgacaagtaattgtttggaatatatatattagtatttttttcaacataaataggcagttgagatgtaataaatatttttgttcaaaatagtaggatggtacattgaggaggtgtgagtgtgacagaatgagctccatctgtacagagaaaaattaaagcagagtgacttcactattttcagttttgcaagcagtgacttcagctaacacatttgcacgtattaactgcattggtacagaaaaatgaagatggtgaatttatttacgtggagcaaaacacggagaaaacgatgaaattgtactggatgcatctgcaattctgcatcctgctgacaccttatcactggagccagcaagaatatactgaacttttcccgtgaaaagtgagaagaatatatcaatatactcagtgtttatctgtgttttccttgagaaaaaaaaacagaaggaattcactacaaaatgaactttgaagcaagatggacgtgattattatgatcaattcatgtataaaaaaattcatgtcagtactcatattcccaaaaaaaaaccaattaattcagataatttatttggctgggtacacaattcagattaattttgtactgcagggattagctaagtccaagctaacataacctaacctacttgtgaaaactaacaaaatgctcaacaagaaacaaaagacaaagaatgttttttttttcaataaaactgggtgaagaggatcactcagaattaatatttgtaagtgtcataatcatctttagatacatacacattaattcactgtaatttctagtgtgaaatatttctcttgccgaaagcgtgcaaccattgcatactgtgatgtttgcgtgcacttattgaccacttttttcccataataaacagcaaagcaaagtgagaacaaatgagcattgtaacttgctccaatatattttttttcttgatggccatacacgccatccttttctctttaatacaaaaaacaagccgtctattttcgtgtatcttcaccttctgactttcttctgttttagtgcggccaagcttatccatgagatagaaagaaagaaaaagaaaatctttatcaaaagtaacccttgtaaaataaattttcatttcttgaagcaagcattgagaagaagataagaacaagatttagccacaaatttccaaggaaaaaaatatcttcttcatgctagagaatggatggaatctttttgttattttaacatgctaagtgagagacgacagtgagtagatgtgtggttctaaatcctcctccactgtggtgtggtgttgttgccttgcaaatcaattattggtggggaaaactggaaaaggttggagaaaaaacgaccacttatattgactgtttctcctgtttatgttctgaatatttttctgaagaaaaataaaggaagggtgtgtttttgtgtctagggggtatgcacaattgcgcatgctaattaggtagtagagcattttctcctgttaggcagacatttgttggaaactatgtacttattgacaaatactagtgtggtgacacactattgagtcacaccctcatcaagaaattggtcctattaggtaaaggagaaaaaaaatgctatactcaattaaagtgatatgatattgttgcttcaattgagcacaccaatagtgtagggacttatggtggagccaattggcatgtcaattccacacatataaaaataaaacaaaatgcattaatgcaatacagcaaactgtaacagtcttttatgtttagaagaaatggacactcttttaagtagagggttattgtcaaatcacaagagaaaggaaaaaacaaaagcatgattactactggaaaagaaggaaaggaaagagaaagggaaagcagcaaggaaggagggctcaccccccatgtgagcttccccctgaaatttgataaattccacttatctttttttttttcacaacagccggccatccatgatggcttttggagccttgtaacctaacaatccgttcctgattttaataccactagactgctattacatatctcatttgaccaaattaatacaagctcaaatgcgattattgcacatgacacaaaattaaagcccttttagtttgttcatctgcaattttgtttgctcatgaactgtaaatttatctacggttttacttttaacctcaaagttttgtgttgctgctttttctgctcgtgagctcccggctttttattggtttgtcggtgtaaagatcaatcatctttcgacaaagctcccaacaaacggtacaatcttcgtttcacctagggagtatagactctactctacctgttactaaatataaatatgtacaggaatcaaatacataatataaatatttctgagacattgactccattatacaggaatccaaatatttttaggcaatcaggtgctcagtagagaaatccaagcaactcaaaactcaaaattaatcaataagataaatgcaatgaaatcttttctatctatcttaacgtttgccactgagagaggtagctaggtgggtacgtctgtacccccaaaatgttttacacaatactagtatataattttaatactgcaaaaatgtacttataattcatacacaaataagagctattcaagaaaattaaaaagtcatttgcatgaagaaagatttcaactttcacaaatcaatacaatatatattagtttgataatttattgataaatatcactattttcttatagcgccaccaaatcagagtttgaacccatgacgaaaatcctggctccgccacttatttttactactacaaaataacctataacctaaaagtttatatttaacacagtagctgctgaaggagtaattaccaccctgactgaagactccttgtgatcatctgctccaatgtgtttcaatgcggccaacctagtcgtagacactcctagctaggttcaccacttcaatgaacatctttgacagagagagagaggccgtgtttagttcacccccaacttttaactttccatcacatcacatcacatctaaaactttcttacacatataaatttttaacttgtttttttaaactttcaactttccctaaatttttagcttttttcagagactaaacacagccagagtagtagtaaatgcgagcggcagtgaagagggcagtcgcaagtagcagcagtaatgaaaggcgtttccaagaggaaaaggatgaacccgtggatgcaatcactcatgagatgagcaacgtagggccgtcgtcaatgaatgtcctttttctccaagtcgccaactgttttctgctccatcgcctccgatccggggaagacagtacagtacagtacagtatagttacagtcacaagccgccgcaagatcgtcgtcgtagtagttgttgtttcagtcttcagaggccatgtgagtgtggcccaattcgagttagatgaaaataaaaattaagattaagctgaagtaatagtatgcagacgagaaagtatgagttttaattattacaaacttaaagttgaatttaattgataatttaaagcaatttttatatagaaagttttttaacgaagcgtattgttcagcagtttgaaaatcgtgctatagaaatcgagatataatctgcatctcaatcagaaatgaacgggtaacgggtatatgttactactagatgttaatcgaggatttgtccggacctctgtaaattccgaatgtccttgccggatctattcgtttattcctgctacgtttctaaaattacaattttgaaaaagaaatatttgtacgaaatacattgcttagacccttagttctaaactactcgtccacttcagattatctgtcatcctagtattcagatttttttaatcaaaatatcacgttccaaagcattttttggtgtgaagcttgccaaacaacaaataatctgaaacgaaaggttgtacctggtaggtttataatttactctccccttccacttatatactccatgatgatagttagatcatttttgaactaacaaacgtcgtatataaataaaagaagggagtataatgtttatctattttataaacagatcgatcatctgttagccatcgtcctcatttcaccttagaaaaaacatgcctggaaggaatagactgatcccacgcaaaaaagattaaaagaaaataaaggaaatgggctgatggcctgatgggtagaggaagctgcaccgcaaacctgcacttgtttagcccaatcagacaggtagctgtagctcactccattagtggatagaaataagtccacttggagtcccttaattataaagatccataaccctaaaccgtaataccggatatcttgatccatccaactattaaaaccggtgtaatttgactttctcgatggttttgagagtgcttttcattgacatggcatgttgacctagtccgacttgtgctgacatggcaccctaatcacaaaatggaagtgaggcccacatgtaagtcacaaagaagaaaaaataaaaaattgtagggcacatgtgttagtccccttctccactctctagtctctatcttttccccaaccatagcaatttctcccacatgggcggcgcagctgcgcaaccacgtagctcaagtctggatccggcggcctcgtcctagcatcgtcgccgccgaagaagggggagggatccgccgcagcggtggaggatgtggtcatcaggcgacgatcggcggggagcacagcttgtggtaagagtaagtaggggtgaaaacggtacggaaacggacggaaacaacctttatcgttttcgttttcatatttttttcggaatcggaatcggaaaccccagaaacgaatattatcgaaaccgaaaacggagcgaaaacgaaccggcgcggatacggtaacggaaatttatcagaatacaaaaacccctcaaactgagcttcaaacttttgtcaagtccaattctcaagtctcaacagtcaacaattcatcataaaacacaattatatgaaatcgtcacaacagcaaaatatattcttctataacttcatataatttgcataacaaatatttaaaaaaaaaattacatcaaaacaccctttataagatatatagtatacactattattcagtgctatactgctaatctgctatgagctatcactccatcatcagtacatagttcatcaattgtttcggtcatcacacaacagcagcacacatcaatccatcagtacagtacttggatcaatcacaaaacagctacttgcatttgatgattccatcataaatctacagcacaaaagaaatcaaatcaatggtttaggctcgtcggctcgtcgctgggctgctggctgctgccgctgggctgttggctactgccgctgggctgctggctgctgcgactgcgaggcgaggcgtcgtcggctccttggtgtggctgtggcgtcatcgtcagtggtggtagcggcggtgaaacggtgggacggcgccgcggccgcgagacggcgctacgaaacggcgggacagcgtcgcgagatggcggcggtacgagacggcgaagacggtaggggcgaggtcgcgaggagccgaggacggcggaccagcggtgggcgctagcggtgggcggagcgcaatgcttcgccgccggctcgcggtctcgcaaagttgcgatgccgtgtggctgtctctctcctctagggttagccactatttgggtagatgccgcgatttgggttgggcttaaaacttggggacgagttatagactattgattctatgggcctttttaacttcggaaattccgataatttttccggaatttttccgaccgattccgagttccgacggaaactgctattatcatattcgattccgtttccgagaaaatatttccgttttcgattccgtttctgagaaattccgaaaaaattccgaccggctgattccgtttccgaaaacaggcccggaatccgaaaagtttccgtaccgttttcacccctaagagtaagaagggggcgggcagcctcaccctggcatcgtcgtcaattgaggaggtggagggattagctgaggcggtggaggatgcggtcggtgagtggcagaggatgcggtcggtgagtggcagaggatgcggaaggcaggcagcatagggcgtggtcgtcgagcgacagtcggcggggagcactgccagtggtaggaggaagaaggtacaacttctacagtggccactgctagataacaccgctacgcgaggctcgtgagcactgtggcagccatctgccgccccctcgcctccgaaacatcgtggcggcgggggaaggcaatgctcacactagaggaacatgcggaaaccaatggcaaggggcaacgggatgggtcaagggagagggtgggactcgtcggtggggggaggagaagtagggaggagcagcatgcgtggaagacctcaccagagcacgatagcttcctttttgtgttcgcagatccagtgggatctattctctctagctcatgatagtggacgagctcgaggagacttgccaaccgacggccaccacccaactccatcttctcgtctccgtgcgctagtccctccgtcctcccacctcccatgccacgccaccggcaggcgccacggcattgagctccatgatgacggtgcccatgaccatgctactctaggcgaggggcatgctacggcagtggacttggtgacggagggctcattgtagccgggtgcctagaggactgccctaccgtcgcccgccgttgccccactacatcctgcagatgctatgtagccgagaggaaatatgatgattaaaaggagacataagcaaaggaagagaagagtcactaacacgtggcccccacatgctgactctaacatattggactaggtcaacgcaccacgtcagcaaaaaccattgaaagagtcaaattatactggttttaatagttgggagggtcaaattattcagtattatagtttagggatacgaatcagattggacctgtatttaagggagtcagagtggacttagcggataaccgtttctcgctggatcctgggccatcccggcccggcccaaatatcgattaatttagccaaaatgtggcggcaaacacacacgccgaattacagatagtaatacaaatcacaacattatttgctcggaatgagacaacgaacacgaacgccatgaattgccttagctagatgtcgcgttgcatcttctccagcgacgcaaatgcgatgcagcagcagccgcgccgccctctcgccggcgtcatcttgcccggtcgcttcatcctgtctcgccggaggaacgcaccgtacgtctcgccgtcgtcgtctctgaaccccctgaaacctcctcacgccggcacgcggcgtccgatcgatcgatcgatctatcacgacagcgtccacatgaagaacgccgaccacaccgtcaccgcgacggaggcgagggcgtacacccacacgaagatgacggagcactcgctctcccccacgccgaacagctgcgtgatggtccctgaaccaaaaacacacacaccaagattcagtattaattcttcagttgacatgaagattcaagatgagtggggtaagaattacgatttgccccttcgcgctacagtgccaccttgaaacccacaaaatccctcgtctttttcgtgggttctagggtggtaccgtagaacgaaggggcaaattgcaattcttcgctgctacagggggctggctgtaaatgtgttgcctacgtggaatgccacatcggcggtcagctccggtcaaataagatttggacctactatagtccattaaaccaagatagtagaactaaatgtgcaattttcaagtgtatggatctaagtagcatttgctctcaagtttaaggaccggccatgtattttacgtattcaagattattccattctttctttcctaccaatgttcatcgccggcggcacggcgtactgaagcaataggatgaactggtagaggggatcagggtggatgaggcccaggtgaaccgccgatttgacgagcaaggtgcctagcgaagggagaagaatgtatctgacgacgattacgctcgctatcactgaaggctggacgcttgcttctcctcgtaatcctggaaaaaaagagttaatgtttcaggtcatcagattaatggcattgttcttttcgtcagtaaaatgtactggtatttctgtcaggttgtttagtgtgagaatagtagcatgcttaccattgaggaggttccctcccattatcagtgtgacagatggaattgctcctccactgtgcaggaaaaaaaaacacgtaaaaatgattagagatcggagttaatccaaaaggacaaaatgaagagaaaaaggcagcattatcattgatcaataggatttggaacaccatgaagaatgttcagaaaacaatagaaatgatgtggaggtgttaccctattagatcagctgactcatgaatgacacgaagaggagcgttttctccgataatagcatttctaattagaggcgttcctccaattataaacccaataatctatacaaaatgaaaaatgatactcagcatagttttataacacaatgttaaagtttgtaatactcagcataccacagcaatggttgaaggagcaaagatcttcttgaagtcaattgctccgaacattgatgatacaaatcgcttcgctctctctgacaatgtgacctatgaaaatttaaagtttataattcaacaaattgtcataacaacattgtgcactaaaacagtgtacaacttgaacttgtaaaaggtaaatatttcttccagcattaagagaccttagttttgcttgaaggtacacttgaattggatatcaaagggagtgtgcattgattgttatcgtttgggattgataaattctcttctgacgctgttcctgtactgctccctgaattggatacttttgtatcatttgttcgagcattaccttcatcagccacttttgaagtggctcgcataatgttatacgcgacagtccacagaaagacagcaccaagctgcagcaaatcactgacgattgtgacaccggtgttcttaatcacaattacagctcacaaacataagacagttgcatcgactatctgcagaatattttagatacaaaaaacagatatagccttacagccattgagagtgaagaatacgctaatccataagtgtgacaaacatcaggtgctccaaacgggcttcctttctctttgcaaagagcaggaatgatgatgagaaaaatattgccccaattgcctgcatccaaccaagggaaatgatcaacgttaggcaccggaagaaacaaaacgagggttgtagtattctaaggtgtgattattcaagttcagttagtcctctaaattgtcccattcaatgttatcaagtatcaattgactacagactcttagtaaggtgtaactgtccaagttcagttagtcctctaaagtgtcccattcaatgttggcagaaaatattgtacaaataatgttataaatcctcgacatgttcaatcatgatcttgtcctaagatctcctttttgttacatgtacggttcaagtccagcagaggtggttggttatcagtattatggctagtacaatggtccaacaggactacctgatctataccatctgaaatataaagacagccttgtctgttgtactcatattggctgatttgaattgtgtcaataatggcctagtgggatgctgggacaccttaagattggatcattggactggtactggtaatgacttactgtatacatacaattgattctcagcttttccatttggttatccatgaagaggtaatgtttttgacaatgacacttgcatgatgcgttgcatactcagattgacattgatttgtagtagtactataaactccagaggaataaccaacagaaaataaatataagagttttataactataagtggagctttgcataagcatgagaagctagcacttcataaagcaaagagttttccacactaacatacatgggcccaaacatccacacaataaatatgtatgtgaaggatttgtactatgtttatctactataagggcatgaattttaaaagatatgtgctgtcgatttacaagagcagaggaactcctagttaccagcagaacagcaacccaaaatgaggcctcttagcctagccggtgctctggtgacatgtaccacgatccatccaaggattaacccaaaggtacaagcaagaagaatattcacaggcatgaaccacctgcattgtgggtaaaaagaaaataattgttttatttcagttgttcaatgacagtttggcaaagaaacatgggagacttacaatttagccaagccttccaatgtgattgtttgtgctaaataggtcgcaacaagagatggattaaatacataaaatactatctgcaggcaaaaaagtttatttattcagagatgatgtatggcttgtattagcaaaatatttactacaattttgcacaattgaatttaccccaatcaccacaacttacattgtttagatatttccgtgcatctttgttcagtatgccaacaaaatcagttgccaggaatgatccaacaccagtaaccagaagcatgttcagaaccggcacacatgctgtaataaagagctccaggaggcccatgattgttgtagcttagttcaacaagcagtcactgttccctgtcctgaaaagtaaaaccatcaaacatgctaagtgcatcgcaactaataatagttctcatgtttcatgtcgagaaatgcgtatttgatcgtctaaaagataaacttctaaaataaaaaacgtttttttttgctacaatgatgagaaaggaccattattggaccaaatgtcatgtccatggtacagagattgcaaattgtacaactgttttacttcttccttgtctccaataattctactacatgcgaaaccaaacaagttttacttcttccttgtctccaaggattctactacatgcgaaaccaaacaagaagaagggcgaactaccagtctaccacaaggaagaaaaactaagggctagaggataaataaactaagaagttgattttttttttattttttagagaagggtattttttacccggcatctacatccaaccggatatatgcggccatttaaattaggaacttaaccccgcaaacaacttaatctgaaattcaacccaatctgaaattcgcttctatggagatttgaactcaaaaccttaaggtactgctcaggtcactgcaaccactaggctacaagaagttgatgcagcgaagtatcacaagattagcttttaaaaagagcaggtaactgagattctcccaaaggagaagaacactacaggagcatgtgaaatgagcttcagagtttcagacttcacatggtttcgatccacccctatatcgatatgctcatccatgcaaagtgcaagatcaaaacagctttgaactgagtcaatgcaaagcgcaagatcaaaacaactccaaggagtcagtcaactgtacaaaatactagagctcgactaccttatctctaaacgacttacagaaacagaatcgggagaatagggaggaatcctaaattcctagcctaattcatatggaaacttaattttaacaaactctaacatcaactccaagtgcatgcagctcattcgcacagccgtgcagcaaatgccatcagtagcctgatctgatcgtcgccgacgatggagcttgcactgtactatactatttactgacaaactaaactgtagcttacatctgccaatcatctagctctgactgatgactgatcgaatgagcacactccaatagggagagtactatagctttgactgaagaacaatttttcttcttcttcttcttctttttttttttaaaaaaaaaacagatgcagataggagatagcaacgcgcgcgggcacacgtcggaatcgagatctcctccgggatcatgcggccgaggaggaggtcgacgacgggaggagggcttggaacgcgtaccttagcttcgttcttgctggcctgcacgcgccgccgcaaaaccgccgccgccgccgccaatgaagaagatggagggagatgaagaaattaaagcgcgcgctcgccttcgattccgagagaggagaagagccacctggccgataccggcggagctctgcgccggcggcggaggtggcggcggccgacgattccgtggccgccttttcttctcttcttctccagctcgggctctcgagggtgtggttctgaggcttttctcactgaagattatatatatattgctcgttcgagttcaaagtcgtcgaagcttgtcttgaagtgtgggatcgatctccgcagaaacgtgccgtgtatgcgtgccggtgactcaaggagggttcggcttatctgatacaggtgattattatcttgatatcttgtcatgttttgtcttttattagtattgatattgttgactttttttcatatgaggtttgtccatttgcgtcttattattactccttccgtttttagctagtcaaagttatattaagaaagagattaaaaaatactatatatatgtaatacgaagagaaaatgagaaacttaagttattggactaaaattatattatttagagacaaagatagtagtacaaaagaacaatgtaaatactctatttgtccaaaaaaataataattttatctttaatcataggtgttcaaaaataagatagagtaaaaaaattgtctctggtagctaagtgataggtaagggtgtcctgaaagaataaaatttatcgatttactagtcaagggtagattaaagggacgagagcaaacttattttgggacaaagcgtagatgctaagttatttttgggacagagagtactgtctattttgttgtgacttgttttataattaaatgtattttacatatgacttatattcttattatatattttctttgaataaaatgaatgactaagtgctcattcgaaatgcaagtttgaaaaaacataagaatatcattaacacaaaactatgctatgaatacatatacagaacatgaaaacacaagaatcttcgaatagagattcatcaagcaggatcacaaagctactcaagcgaacaaaggaaatattatttcatcaataaaccttcgaatattttaaattgtataatactatgatatagaattatacatgctagggtgcaaaaatataataatacaacgaactaaaaaaaaagaagtttccaatggagaaagtttgaataataccagaaacgcttagtatcggacgtctgacgtatcgtgaaaaatcggatggacaaactactatccccatatccacttcatatatccattacatgacataatgatctttaaaatatttttttctcctaaactacttatccaatcgatgatatgatcacactattatattttttataattaaatctttacaacaagatatcacatcattacattccgatgaaagaaaagtatatgtttcaatccgttaaaatttaatgtttcagacacgatagcaatatgtttcaacacatgttttcattatgtttcataaaaaaattttaaatgttttgataactgaattttttatttcaccatatataacctaatgtttcataaatgaccgagaaaaagtatgggatgtttacgccactactctctcatgccattcgattggctttctccccacaccatacatgtatgcatgtatttagtgatcttaaaaatactttttcttccaaactatttatgcgatgagtgatttgatcataccgttgaatttgttataattaaatctttacaataagatatcacatgactatattttgatgaaagaaaaacatatgtttcaaacaataagaacttaatgtttcatacgtgatagcaatatgtttcaccatgtattctaattgtgtttcacaaaatttttatatgtttcagaggttgatttttttgtttcaccatgtataacgtaatgttgcaccaacggtcaactgaaacatttgaccgtcctattttttttatatcatcgggcgtccgatttgtagctctctccgaataatactcacaagaagtataactactttggctttaatgggctacaaagcctgaacatgtcaaagcccaaaacttctaccccgaatctttcagaaccggcccagcccacgagcttaacccaaaaagcccacaacagcaggaaccttctagtattctcccgtccagcgcatctggaccgtccatacgacaaccgacggctggatttccctggaaggcctttatatgcgcttccagacgctactcgaagcaggaaacccaccaccgaattcgtccgtactcctcctcctgcttcccctccggcgacggcggcgcagatctccggtaagcctcctccgtctccgtttcccgcgtccgattgcgtatgtcacagcggttagcgtagtagtggtagatttgattcggatttggattgactgttcctctctcggttgtgatggatggattgattgatgttgtatttttgcgtgtcttattatctatctatcgattcttatcaggttggaagttagggtgttcatcttgacacaaaatcatgccgaaatca
